United States Patent Application Publication US 2018/0126003 A1 - sequence listing, part 112

SEQ ID NO: 197898 - protein, 456 aa, Artificial Sequence
  derived and/or modified sequence
MNSSDEEKQLQLITSLKEQAIGEYEDLRAENQKTKEKCDKIRQERDEAVKKLEEFQKISHMVIEEVNFMQNHLEIEKTCRESAEALATKLNKENKTLKRISMLYMAKLGPDVITEEINIDDEDSTTDTDGAAETCVSVQCQKQIKELRDQIVSVQEEKKILAIELENLKSKLVEVIEEVNKVKQEKTVLNSEVLEQRKVLEKCNRVSMLAVEEYEEMQVNLELEKDLRKKAESFAQEMFIEQNKLKRQSHLLLQSSIPDQQLLKALDENAKLTQQLEEERIQHQQKVKELEEQLENETLHKEIHNLKQQLELLEEDKKELELKYQNSEEKARNLKHSVDELQKRVNQSENSVPPPPPPPPPLPPPPPNPIRSLMSMIRKRSHPSGSGAKKEKATQPETTEEVTDLKRQAVEEMMDRIKKGVHLRPVNQTARPKTKPESSKGCESAVDELKGILASQ

SEQ ID NO: 197899 - DNA, 237 bp, Artificial Sequence
  derived and/or modified sequence
atgcggccctgcatctggatccacgtgcacctgaagcccccctgccgccttgttgaattactgccatttagctcagccctgcaaggcctatctcatctgtctctaggaaccaccctgccggtcattttacccgaaaggaacgaggaacaaaacctgcaggaactgtcccataatgccgacaaataccagatgggagactgttgcaaagaagaaatcgacgacagcatcttctattag

SEQ ID NO: 197900 - DNA, 1371 bp, Artificial Sequence
  derived and/or modified sequence
atgaatagctcagatgaagaaaagcagcttcagcttattacgtccctgaaagagcaggccatcggtgagtacgaggacctccgagcagaaaaccagaagacgaaggaaaagtgcgataaaattaggcaggagagggatgaggcggtcaagaaactcgaggaattccagaaaattagtcacatggtcatcgaagaggtgaacttcatgcagaaccacctggagatagaaaaaacttgtcgggaaagtgctgaggccttagccaccaaactgaacaaggagaacaaaaccctgaagagaatcagcatgctctatatggctaagctgggccctgacgttatcactgaggaaattaatattgacgacgaagacagcaccaccgatactgatggcgctgcagagacctgcgtgagcgtccagtgtcaaaagcaaattaaggaactgcgagaccagatagtgtctgtgcaggaagagaaaaagattctcgccatagaactagaaaacctcaagtcaaagttggtcgaggtaatcgaggaggtcaataaagtgaagcaggaaaaaacggtcctgaacagtgaggtgctggaacagagaaaagttttagaaaaatgcaatagagtctccatgctcgccgtggaggaatacgaagaaatgcaggtcaacctcgaactcgaaaaagatctgcgaaagaaagccgaaagctttgctcaagaaatgttcatcgagcagaataaactgaagaggcagtctcatctattgctgcagtcctctatcccggaccagcagctcttgaaagcattagatgagaacgctaagctgactcagcagctggaagaagaaaggatacagcatcagcagaaagtcaaggaactggaggagcagctagagaatgaaacactacacaaagaaattcacaatttaaaacagcaactggagctgctggaagaggacaaaaaggagctagagctgaagtaccaaaattccgaggagaaggcacgcaatttgaagcactctgtcgacgagctgcagaagcgggttaaccaaagcgaaaactcagtgcctcctcccccacccccgccccccccacttccacctcccccacctaaccccattaggtccctaatgagcatgattaggaaaaggagtcacccttcagggtcaggcgcgaagaaggagaaagctacccaacccgagacgaccgaggaagtgaccgacttgaagagacaagccgtggaagagatgatggatcggattaagaaaggggtacatctgaggcccgtaaatcagactgccaggccaaaaaccaagcctgagtctagcaaaggatgtgagtccgctgtagatgagctgaaggggatattagcctcgcagtag

SEQ ID NO: 197901 - DNA, 1371 bp, Artificial Sequence
  derived and/or modified sequence
atgaacagcagtgatgaggagaagcagctgcagctgatcaccagcctgaaggagcaggccatcggggagtatgaggacctgcgggcagagaaccagaagaccaaggagaagtgtgacaagatccggcaggagagagatgaggccgtgaagaagctggaggagttccagaagatcagccacatggtgattgaggaggtgaacttcatgcagaaccacctggagattgagaagacctgccgggagagcgctgaggccctggccaccaagctgaacaaggagaacaagaccctgaagaggatctccatgctgtacatggccaagctgggcccagatgtgatcacagaggagatcaacattgatgatgaggacagcaccacagacacagatggagctgctgagacctgtgtgtctgtgcagtgccagaagcagatcaaggagctgcgggaccagatcgtgtctgtgcaggaggagaagaagatcctggccatcgagctggagaacctgaagagcaagctggtggaggtgattgaggaggtgaacaaggtgaagcaggagaagacagtgctgaacagcgaggtgctggagcagaggaaggtgctggagaagtgcaacagagtgtccatgctggccgtggaggagtatgaggagatgcaggtgaacctggagctggagaaggacctgaggaagaaggccgagagctttgcccaggagatgttcatcgagcagaacaagctgaagaggcagagccacctgctgctgcagagcagcatcccagaccagcagctgctgaaggccctggatgaaaatgccaagctgacccagcagctggaggaggagcgcatccagcaccagcagaaggtgaaggagctggaggagcagctggagaatgagaccctgcacaaggagatccacaacctgaagcagcagctggagctgctggaggaggacaagaaggagctggagctgaagtaccagaacagcgaggagaaggccaggaacctgaagcacagcgtggatgagctgcagaagagggtgaaccagagtgaaaattctgtgcccccacctcctcctcctcctccacccctgcccccacctccacccaaccccatccgcagcctgatgtccatgatcaggaagaggagccaccccagcggcagcggggccaagaaggagaaggccacccagcctgagaccacagaggaggtgacagacctgaagaggcaggccgtggaggagatgatggaccgcatcaagaagggcgtgcacctgcggcctgtgaaccagacagcccggcccaagaccaagccagagagcagcaagggctgtgagagcgctgtggatgagctgaagggcatcctggccagccagtag

SEQ ID NO: 197902 - DNA, 1371 bp, Artificial Sequence
  derived and/or modified sequence
atgaacagcagcgacgaggagaagcagctgcagctgatcaccagcctgaaggagcaggccatcggggagtacgaggatctgcgagcagaaaatcaaaagaccaaggagaagtgcgataaaatccggcaggagagagacgaggcagtgaagaagctagaagagttccagaagataagccatatggtcattgaagaggtcaatttcatgcagaaccacctggaaatagagaagacctgcagggagtcagccgaggcccttgccactaaattaaacaaggaaaataagaccctgaaaagaatttcaatgctttatatggccaaactagggccggatgtgatcacagaggagatcaacattgacgacgaggattcaacgaccgacacagatggcgccgctgagacttgcgtctcagtccagtgccaaaaacagatcaaagaactcagggaccaaattgtgtctgtgcaggaagaaaaaaagatattggccatcgagctggagaatcttaaatctaagctggtagaggtgatagaagaggtcaataaagtgaagcaggagaaaacagtcctgaattcagaggtattggagcaacgcaaagtgctggagaaatgcaaccgcgtttccatgcttgctgtcgaagagtacgaggagatgcaggtgaatctggagctggagaaagacctcaggaagaaggccgaatctttcgctcaggaaatgttcatagagcagaacaagcttaaaagacagtcacacctgcttctgcagagcagcatccctgatcaacagctgctgaaggcgctggatgagaacgctaaactgacacagcagctagaggaagaacggatccaacaccagcagaaggtcaaggagttagaagagcagctggaaaacgagactctgcataaggaaatccacaatctgaagcaacagctggagcttttggaggaagacaaaaaggagctggagctgaagtaccagaactcagaggaaaaagctcgaaatctgaaacactcagtggatgaactgcaaaagagagtaaaccagtcagaaaactctgtcccccctcctccgccccctcctccccccttgccgccacctccccctaatcccataaggagcctgatgtccatgatccggaagaggtcacatccgagtgggtcaggtgccaagaaagagaaggcaacccagccagagaccaccgaagaggttacagatttgaagagacaagctgtggaagagatgatggaccgcatcaaaaagggggttcacctccgccccgtcaaccagactgctcggccgaagacaaaaccagagagctctaagggctgcgagagcgctgtggatgaacttaaggggatccttgcctctcagtag

SEQ ID NO: 197903 - DNA, 1371 bp, Artificial Sequence
  derived and/or modified sequence
atgaattctagcgatgaagaaaagcagctccagctgattacaagcctcaaggagcaggcaattggtgagtacgaagacctaagggctgagaatcagaaaacaaaagaaaagtgcgacaagataagacaagaacgcgacgaggccgtcaaaaagctcgaggagttccagaagatatcacacatggtgattgaagaagtgaattttatgcagaaccacctggaaattgaaaagacttgcagggagtcagctgaagcccttgcaactaagcttaacaaagagaacaagacccttaagcgaatctctatgttgtacatggccaaactggggcctgacgtgattacagaagaaattaacatcgacgatgaggactcaacaaccgatacggacggcgctgcggagacttgcgtatcagtccaatgccagaagcagatcaaagagcttcgggaccagattgtcagcgtgcaagaagagaaaaaaattttagccatcgagttggagaacttgaaatctaagctagtagaggtgatcgaggaggtaaataaggtgaaacaggagaaaaccgtgctgaattccgaagtgctcgaacagcgcaaagtgttggaaaaatgtaatagggtcagtatgttagctgttgaagaatatgaagaaatgcaggtcaaccttgaactggaaaaggaccttaggaaaaaggctgaaagctttgcccaagaaatgttcatcgagcagaataaactaaaacggcagagtcatctcctgttacagagcagcattcctgaccagcaactattgaaagcccttgacgaaaacgctaagcttactcagcaactggaagaggaacgcatccagcatcagcagaaggtaaaagaactggaagaacagctggagaatgagaccttgcacaaggagattcacaatcttaaacagcagctggagcttctggaggaggacaagaaggaactggagctgaagtaccaaaactcagaggagaaggccagaaatctcaaacactccgtcgatgaactccagaagagggttaatcaatcagaaaattccgtgcccccaccgccaccccctcccccacctctgccacctccacctcctaacccgattcggagccttatgtcgatgatccgtaagagaagtcatccctcaggatccggtgcgaagaaggagaaggccactcaaccggagacaaccgaagaagtcactgatcttaaaaggcaagctgtggaggagatgatggatcgcatcaaaaagggtgtgcacctgagacccgttaaccagacagcacgaccgaagactaaacccgaatccagtaaaggttgcgagagcgccgtcgacgaactgaagggcattttagcctcccaatag

SEQ ID NO: 197904 - DNA, 3415 bp, Artificial Sequence
  derived and/or modified sequence
aggctggcatagcggctgccgacccgccctcgttcctccaccccctgaacgggactgctgggcccgccccgccccgcctgcaggtgaagcggccgcagccgccgagtaggtgcgtggggatgatctcactcgcgcgctccgcgccaggaggaggaggagcgggagcggatccaacttccgggtagtggagccgcaagccaccggcatcttgctttttcttccccctcctcctgtgtgccccgcgccgctccctctttcccttttattcccggccccacccgccaaaatgaacagctcggacgaagagaagcagctgcagctcattaccagtctgaaggagcaagcaataggcgaatatgaagaccttagagcagagaaccagaaaacaaaggagaagtgtgacaaaattaggcaagaacgagatgaagccgttaaaaaactggaagaatttcagaaaatttctcacatggtcatagaggaagttaatttcatgcagaaccatcttgaaatagagaagacttgtcgagaaagtgctgaagctttggcaacaaagctaaataaagaaaataaaacgttgaaaagaatcagcatgttgtacatggccaagctgggaccagatgtaataactgaagagataaacattgatgatgaagattcgactacagacacagacggtgccgccgagacttgtgtctcagtacagtgtcagaagcaaattaaagaacttcgagatcaaattgtatctgttcaggaggaaaagaagattttagccattgagctggaaaatctcaagagcaaactcgtagaagtaattgaagaagtaaataaagttaaacaagaaaagactgttttaaattcagaagttcttgaacagagaaaagtcttagaaaaatgcaatagagtgtccatgttagctgtagaagagtatgaggagatgcaagtaaacctggagctggagaaggaccttcgaaagaaagcagagtcatttgcacaagagatgttcattgagcaaaacaagctaaagagacaaagccaccttctgctgcagagctccatccctgatcagcagcttttgaaagctttagacgaaaatgcaaaactcacccagcaacttgaagaagagagaattcagcatcaacaaaaggtcaaagaattagaagagcaactagaaaatgaaacactccacaaagaaatacacaacctcaaacagcaactggagcttctagaggaagataaaaaggaattggaattgaaatatcagaattctgaagagaaagccagaaatttaaagcactctgttgatgaactccagaaacgagtgaaccagtctgagaattcagtacctccaccacctcctcctccaccaccacttccccctccacctcccaatcctatccgatccctcatgtccatgatccggaaacgatcccaccccagtggcagtggtgctaagaaagaaaaggcaactcaaccagaaacaactgaagaagtcacagatctaaagaggcaagcagttgaagagatgatggatagaattaaaaagggagttcatcttagacccgttaatcagacagccagaccgaagacaaagccagaatcttcgaaaggctgcgaaagtgcagtggatgaactaaaaggaatactggcctcccagtagcattggatgcaggaaaaaatacattgacggtgaaaaacaagccgaaccagttgtagttttagatcctgtttctacacatgaaccccaaaccaaagaccaggttgctgaaaaagatccaactcaacacaaggaggatgaaggcgaaattcaaccagaaaacaaagaagacagcattgaaaacgtgagagagacagacagctccaactgctgatccataaaccagaagcctgacatgtttggaagtccttttcaataagcacatgattagtgttgttatattggcaagggctgtagacattctgctctggtcactgtattcagaatacaggttcttttctggtgtcacttttgtaagtagcaactataaacataagtaagctgtttagcaaaacacacattcctagtaggttttggttttttgatctttataaagatgaggtttttttcctagttactgtattaagtatgacttcttttagaaggttacaaaaaaattcagatgttgatacctttttaggaaatgtgcataccactcatcaaatggaatgctgaaagtttgaggtgcttgtatataatcggataaacaaaactgatcaacccaatgtgattttaaaagcccccaaagaagcttctgttttgggtctgatcctcttgatggagaaactgcagcagcatggaaattgttgggtactgtggcatacaagttattttctacagtagactgagataaactgaaaactcaggagctggcatcaaactcgtagtcccatagtcagtgttaattacacacattgttaactattggatgaaaaatacatgctattgattgtgtccaaagcctcccgaggacctccgtggggatgctctggtagcctgaatacagaactgaggtgaaagtccaaaccttgaattttacagtagtaagttggtaaaccatgtgctctgtgctatgagttaattatgttttcccaaatactaatgtggcacaagtaccatattttatcagagttcttatgtacagtatggtgaagataagtgacaagcacacatttttcttgcttcactgctgttctatattacacaggtttgttgttgttttttttaaaaaagaaattaagcagtagttagtctctaaaaatacaatgtttcaggctaccacagtgaataaatagaaatgtaatcagggattaaaaaaaaaacttatgcagcttttcaaagttgattgtttcaaaattggtgtttatttaaaataagtggtaatgtacttgaatgcactttttatgacaatgattcagtaatggtaattttactattaaagaaagtgaaaggtttagttttgttagcatggctcagcatgtagctgtcaggtgtttttcacctaagggcaaaagaaaatgatagtaataattgcagtagttgtattgtattgtatttttgcacgtgtggtaagcataggcttgaagaggtgggtaggcaggtacatgtacttcctaaatttggagataattatctttctgtaagttcgttatgcttgactgtttccatgttctcccaataatgattttatagttacttatcactttactcatggagaattaaaacgtaatgtttttcaactgtatctttctttaactggataatactgctatatgatatgcttactacagactgcattaattcacgaaacgaattctgttatgctgtaatttgaactctcctcaccacaacttattaaaaaggcaccaatagtttcccatt

SEQ ID NO: 197905 - DNA, 1371 bp, Artificial Sequence
  derived and/or modified sequence
atgaacagcagcgacgaggagaagcagctgcagctgatcaccagcctgaaggagcaggccatcggcgagtacgaggacctgagagccgagaaccagaagaccaaggagaagtgcgacaagatcagacaggagagagacgaggccgtgaagaagctggaggagttccagaagatcagccacatggtgatcgaggaggtgaacttcatgcagaaccacctggagatcgagaagacctgcagagagagcgccgaggccctggccaccaagctgaacaaggagaacaagaccctgaagagaatcagcatgctgtacatggccaagctgggccccgacgtgatcaccgaggagatcaacatcgacgacgaggacagcaccaccgacaccgacggcgccgccgagacctgcgtgagcgtgcagtgccagaagcagatcaaggagctgagagaccagatcgtgagcgtgcaggaggagaagaagatcctggccatcgagctggagaacctgaagagcaagctggtggaggtgatcgaggaggtgaacaaggtgaagcaggagaagaccgtgctgaacagcgaggtgctggagcagagaaaggtgctggagaagtgcaacagagtgagcatgctggccgtggaggagtacgaggagatgcaggtgaacctggagctggagaaggacctgagaaagaaggccgagagcttcgcccaggagatgttcatcgagcagaacaagctgaagagacagagccacctgctgctgcagagcagcatccccgaccagcagctgctgaaggccctggacgagaacgccaagctgacccagcagctggaggaggagagaatccagcaccagcagaaggtgaaggagctggaggagcagctggagaacgagaccctgcacaaggagatccacaacctgaagcagcagctggagctgctggaggaggacaagaaggagctggagctgaagtaccagaacagcgaggagaaggccagaaacctgaagcacagcgtggacgagctgcagaagagagtgaaccagagcgagaacagcgtgcccccccccccccccccccccccccccctgcccccccccccccccaaccccatcagaagcctgatgagcatgatcagaaagagaagccaccccagcggcagcggcgccaagaaggagaaggccacccagcccgagaccaccgaggaggtgaccgacctgaagagacaggccgtggaggagatgatggacagaatcaagaagggcgtgcacctgagacccgtgaaccagaccgccagacccaagaccaagcccgagagcagcaagggctgcgagagcgccgtggacgagctgaagggcatcctggccagccagtag

SEQ ID NO: 197906 - protein, 370 aa, Artificial Sequence [sequence omitted]

SEQ ID NO: 197907 - protein, 478 aa, Artificial Sequence
  derived and/or modified sequence
MATDSWALAVDEQEAAVKSMTNLQIKEEKVKADTNGIIKTSTTAEKTDEEEKEDRAAQSLLNKLIRSNLVDNTNQVEVLQRDPNSPLYSVKSFEELRLKPQLLQGVYAMGFNRPSKIQENALPMMLAEPPQNLIAQSQSGTGKTAAFVLAMLSRVEPSDRYPQCLCLSPTYELALQTGKVIEQMGKFYPELKLAYAVRGNKLERGQKISEQIVIGTPGTVLDWCSKLKFIDPKKIKVFVLDEADVMIATQGHQDQSIRIQRMLPRNCQMLLFSATFEDSVWKFAQKVVPDPNVIKLKREEETLDTIKQYYVLCSSRDEKFQALCNLYGAITIAQAMIFCHTRKTASWLAAELSKEGHQVALLSGEMMVEQRAAVIERFREGKEKVLVTTNVCARGIDVEQVSVVINFDLPVDKDGNPDNETYLHRIGRTGRFGKRGLAVNMVDSKHSMNILNRIQEHFNKKIERLDTDDLDEIEKIAN

SEQ ID NO: 197908 - protein, 447 aa, Artificial Sequence
  derived and/or modified sequence
MATDSWALAVDEQEAAVKSMTNLQIKEEKVKADTNGIIKTSTTAEKTDEEEKEDRAAQSLLNKLIRSNLVDNTNQVEVLQRDPNSPLYSVKSFEELRLPQNLIAQSQSGTGKTAAFVLAMLSRVEPSDRYPQCLCLSPTYELALQTGKVIEQMGKFYPELKLAYAVRGNKLERGQKISEQIVIGTPGTVLDWCSKLKFIDPKKIKVFVLDEADVMIATQGHQDQSIRIQRMLPRNCQMLLFSATFEDSVWKFAQKVVPDPNVIKLKREEETLDTIKQYYVLCSSRDEKFQALCNLYGAITIAQAMIFCHTRKTASWLAAELSKEGHQVALLSGEMMVEQRAAVIERFREGKEKVLVTTNVCARGIDVEQVSVVINFDLPVDKDGNPDNETYLHRIGRTGRFGKRGLAVNMVDSKHSMNILNRIQEHFNKKIERLDTDDLDEIEKIAN

SEQ ID NO: 197909 - DNA, 1344 bp, Artificial Sequence
  derived and/or modified sequence
atggccaccgacagctgggccctggccgtggacgagcaggaggccgccgtgaagagcatgaccaacctgcagatcaaggaggagaaggtgaaggccgacaccaacggcatcatcaagaccagcaccaccgccgagaagaccgacgaggaggagaaggaggacagagccgcccagagcctgctgaacaagctgatcagaagcaacctggtggacaacaccaaccaggtggaggtgctgcagagagaccccaacagccccctgtacagcgtgaagagcttcgaggagctgagactgccccagaacctgatcgcccagagccagagcggcaccggcaagaccgccgccttcgtgctggccatgctgagcagagtggagcccagcgacagatacccccagtgcctgtgcctgagccccacctacgagctggccctgcagaccggcaaggtgatcgagcagatgggcaagttctaccccgagctgaagctggcctacgccgtgagaggcaacaagctggagagaggccagaagatcagcgagcagatcgtgatcggcacccccggcaccgtgctggactggtgcagcaagctgaagttcatcgaccccaagaagatcaaggtgttcgtgctggacgaggccgacgtgatgatcgccacccagggccaccaggaccagagcatcagaatccagagaatgctgcccagaaactgccagatgctgctgttcagcgccaccttcgaggacagcgtgtggaagttcgcccagaaggtggtgcccgaccccaacgtgatcaagctgaagagagaggaggagaccctggacaccatcaagcagtactacgtgctgtgcagcagcagagacgagaagttccaggccctgtgcaacctgtacggcgccatcaccatcgcccaggccatgatcttctgccacaccagaaagaccgccagctggctggccgccgagctgagcaaggagggccaccaggtggccctgctgagcggcgagatgatggtggagcagagagccgccgtgatcgagagattcagagagggcaaggagaaggtgctggtgaccaccaacgtgtgcgccagaggcatcgacgtggagcaggtgagcgtggtgatcaacttcgacctgcccgtggacaaggacggcaaccccgacaacgagacctacctgcacagaatcggcagaaccggcagattcggcaagagaggcctggccgtgaacatggtggacagcaagcacagcatgaacatcctgaacagaatccaggagcacttcaacaagaagatcgagagactggacaccgacgacctggacgagatcgagaagatcgccaactag

SEQ ID NO: 197910 - DNA, 1437 bp, Artificial Sequence
  derived and/or modified sequence
atggcaaccgactcctgggcattggcggtcgatgagcaggaggctgcagtgaaatccatgaccaacctgcagatcaaagaagaaaaggtcaaagccgatacaaacgggatcatcaaaacctcgaccaccgccgaaaagaccgatgaggaagaaaaggaggacagagccgcccaatcgttgttaaacaaacttatccggagcaacctggtggacaacaccaaccaggttgaagtcctgcagagggaccccaatagccccttgtatagtgttaagagctttgaagagctgcggctgaaaccccagctattacagggagtttatgctatgggcttcaatcgaccttcgaaaattcaagagaacgccttgcccatgatgctggctgagcctccgcagaacttgatagcccagtcacagagcggcaccgggaaaacggctgcttttgttctggcgatgctaagccgcgtagaaccctccgacagatacccacagtgcctatgcttgtccccaacctatgaactcgccctgcagactggaaaagttattgaacagatggggaaattctaccccgagctgaaacttgcctacgcagtcaggggcaacaaactcgaacgcgggcagaaaatatccgaacagatagtcattggcactcccggtactgtgttggactggtgtagtaaactaaaattcatagaccctaagaagatcaaggtattcgtgctcgatgaagctgacgtcatgattgcaacgcagggacaccaggatcagagcattagaattcaaagaatgctgccaagaaactgccaaatgctgctgttctctgctacttttgaagatagtgtctggaaattcgcccagaaggtggtgcccgacccaaacgtgatcaagcttaaacgcgaggaggaaaccctggatacaatcaagcagtattacgttctctgttctagtcgtgacgaaaagttccaggcactgtgcaacctgtatggcgcaatcaccatcgctcaagcgatgatcttttgccataccagaaagaccgcatcatggcttgccgccgagctctccaaggaaggacatcaagttgcgctgctgtctggtgagatgatggtcgaacagcgggcagcagtcattgaacggttccgagagggtaaagagaaggtcctggtcacaacgaacgtttgcgctcgtggcattgatgtcgaacaagtttctgtagttatcaattttgaccttccggtggataaggacggcaatcccgacaacgaaacttacctgcatcggatcgggcggaccgggaggttcggcaagagaggcctcgccgttaatatggtggatagcaaacattccatgaatattttgaaccgcatccaagagcattttaataagaagatagaaaggttagacacagatgacctggacgagatagaaaagatcgcaaactag

SEQ ID NO: 197911 - DNA, 1344 bp, Artificial Sequence
  derived and/or modified sequence
atggcaaccgactcctgggcactggcggtggacgagcaggaggccgccgtgaagagtatgaccaacttgcagatcaaggaggagaaggtaaaggccgacacaaatggaattatcaaaacaagcacgacagcagaaaaaacagacgaagaggagaaagaggacagagccgcccagagccttttgaacaagttaatcaggtcaaatctcgtagataatacgaaccaggtggaggtgctgcagcgcgacccaaactcacctctgtactcggtgaagtccttcgaagaactgcggctgccacaaaatctgatcgctcagtcacaatctggaactggtaagacagctgcattcgtgctggccatgctgtcgagagtcgaaccatccgaccggtacccacagtgtctttgcttgtcacccacctacgagctggccctccagaccggtaaggtgattgaacagatgggaaaattttatccagaactgaagcttgcttacgctgtgcgcggtaataagctggaacgagggcagaaaattagtgaacagattgtcatagggactcccggcactgttttggactggtgttcaaaactcaagtttatcgacccaaagaaaataaaggtcttcgtcctggatgaggccgatgtcatgatcgccacgcagggacatcaggaccagagcattaggatccagaggatgcttccacggaactgccagatgctcttgttctcggcgaccttcgaagatagcgtttggaagtttgcccagaaagtggttccagaccctaatgtgattaaactgaaaagggaggaagagacgctagatacaatcaaacagtactacgtcctatgtagctctcgggacgaaaagtttcaggcattgtgcaatctctacggggcaattaccatcgcgcaggccatgatcttctgccacacccgtaaaactgcatcatggttggccgctgaactgtccaaggaaggccaccaagtggcactgctgtcaggggagatgatggtggagcaaagggcagctgtaattgagcggtttagggaaggcaaggaaaaggttctcgttaccaccaacgtttgcgctcgcgggatcgatgtcgagcaggtcagtgtagtgatcaatttcgacctgcccgtggataaagatggcaaccctgacaatgaaacatatcttcatcgaatcggaagaacaggcaggtttggaaagcgcgggttggccgttaatatggtggatagcaagcatagcatgaatatcctgaatagaattcaagagcattttaacaaaaaaatcgaaaggctcgacactgacgacctcgatgagattgagaagatagccaactag

SEQ ID NO: 197912 - DNA, 1437 bp, Artificial Sequence
  derived and/or modified sequence
atggccacagacagctgggccctggccgtggatgagcaggaggccgctgtgaagtccatgaccaacctgcagatcaaggaggagaaggtgaaggctgacaccaacggcatcatcaagaccagcaccacagctgagaagacagatgaggaggagaaggaggaccgggccgcccagagcctgctgaacaagctgatccgcagcaacctggtggacaacaccaaccaggtggaggtgctgcagagggaccccaacagccccctgtacagcgtgaagagctttgaggagctgcggctgaagccccagctgctgcagggcgtgtatgccatgggcttcaaccggcccagcaagatccaggagaatgccctgcccatgatgctggccgagcccccccagaacctgattgcccagagccagagcggcaccgggaagacagctgcctttgtgctggccatgctgagccgggtggagcccagcgaccgctacccccagtgcctgtgcctgagccccacctatgagctggccctgcagacaggcaaggtgattgagcagatgggcaagttctacccagagctgaagctggcctatgctgtgcggggcaacaagctggagcggggccagaagatcagcgagcagatcgtcatcggcaccccaggcaccgtgctggactggtgcagcaagctgaagttcatcgaccccaagaagatcaaggtgtttgtgctggatgaagcagatgtgatgattgccacccagggccaccaggaccagagcatccgcatccagaggatgctgcccaggaactgccagatgctgctcttcagcgccacctttgaagattctgtgtggaagtttgcccagaaggtggtgcctgaccccaacgtcatcaagctgaagcgggaggaggagaccctggacaccatcaagcagtactacgtgctgtgcagcagcagagatgagaagttccaggccctgtgcaacctgtatggagccatcaccatcgcccaggccatgatcttctgccacaccaggaagacagcctcctggctggccgctgagctgagcaaggagggccaccaggtggccctgctgtctggagagatgatggtggagcagagagctgctgtgattgagcgcttccgggagggcaaggagaaggtgctggtgaccaccaacgtgtgtgcccggggcattgatgtggagcaggtgtctgtggtgatcaactttgacctgcctgtggacaaggatggcaacccagacaatgagacctacctgcaccgcatcggccgcacaggccgctttgggaagaggggcctggccgtgaacatggtggacagcaagcacagcatgaacatcctgaaccgcatccaggagcacttcaacaagaagattgaaaggctggacacagatgacctggatgaaattgagaagatcgccaactag

SEQ ID NO: 197913 - DNA, 1344 bp, Artificial Sequence
  derived and/or modified sequence
atggccacagacagctgggccctggccgtggatgagcaggaggccgctgtgaagtccatgaccaacctgcagatcaaggaggagaaggtgaaggctgacaccaacggcatcatcaagaccagcaccacagctgagaagacagatgaggaggagaaggaggaccgggccgcccagagcctgctgaacaagctgatccgcagcaacctggtggacaacaccaaccaggtggaggtgctgcagagggaccccaacagccccctgtacagcgtgaagagctttgaggagctgcggctgccccagaacctgattgcccagagccagagcggcaccgggaagacagctgcctttgtgctggccatgctgagccgggtggagcccagcgaccgctacccccagtgcctgtgcctgagccccacctatgagctggccctgcagacaggcaaggtgattgagcagatgggcaagttctacccagagctgaagctggcctatgctgtgcggggcaacaagctggagcggggccagaagatcagcgagcagatcgtgattggcaccccaggcaccgtgctggactggtgcagcaagctgaagttcatcgaccccaagaagatcaaggtgtttgtgctggatgaagcagatgtgatgattgccacccagggccaccaggaccagagcatccgcatccagaggatgctgcccaggaactgccagatgctgctcttcagcgccacctttgaggacagcgtgtggaagtttgcccagaaggtggtgcctgaccccaacgtcatcaagctgaagcgggaggaggagaccctggacaccatcaagcagtactacgtgctgtgcagcagcagagatgagaagttccaggccctgtgcaacctgtatggagccatcaccatcgcccaggccatgatcttctgccacaccaggaagacagcctcctggctggccgctgagctgagcaaggagggccaccaggtggccctgctgagcggggagatgatggtggagcagagagctgctgtgattgagcgcttccgggagggcaaggagaaggtgctggtgaccaccaacgtgtgtgcccggggcattgatgtggagcaggtgtctgtggtgatcaactttgacctgcctgtggacaaggatggcaacccagacaatgagacctacctgcacagaattggaagaacaggccgctttgggaagaggggcctggccgtgaacatggtggacagcaagcacagcatgaacatcctgaaccgcatccaggagcacttcaacaagaagattgagcggctggacacagatgacctggatgaaattgagaagatcgccaactag

SEQ ID NO: 197914 - DNA, 1437 bp, Artificial Sequence
  derived and/or modified sequence
atggccaccgacagctgggccctggccgtggacgagcaggaggccgcagtcaagtccatgactaatctgcagattaaggaggagaaagtgaaagctgacactaacggcatcattaaaacatctaccacagccgagaaaaccgatgaggaagagaaggaggaccgggccgcccagtccttgctaaataaactaattaggagcaacctggttgataacaccaatcaggtggaggtgcttcagagagatccaaattctccactatatagtgtgaaaagtttcgaagagcttaggctgaaacctcagctgcttcagggggtctacgctatgggtttcaatcgcccttccaaaattcaggagaacgctttacctatgatgctcgccgaaccaccacagaacctgatcgctcaaagccagtcaggcacgggcaaaacagctgcattcgtgctggccatgctctcacgggtggagccctcagataggtaccctcagtgcctatgcttgagtcctacctacgagttggctctccaaacaggcaaggtgatagaacagatgggcaaattctacccagagcttaaactggcttatgctgtgagggggaacaagttagagagagggcaaaagatatcagagcagatcgtgatcggaactcccggcacagtgctggactggtgcagcaaattgaagtttattgaccccaagaaaattaaagtgttcgtgctggatgaggcagatgttatgattgcaacacagggtcatcaggaccagagcatccgcatacagcgcatgcttcctagaaactgccagatgctgctcttttctgcaacctttgaagatagcgtctggaagttcgctcagaaagtggtcccagaccccaacgtgatcaaactcaaacgcgaggaggaaaccctggatacgatcaagcaatactacgtcctatgctcgagccgcgacgaaaagttccaggcgctctgcaatctctatggtgccatcacaattgcccaggcaatgattttctgccacactaggaagacagcatcttggctcgctgctgaactctccaaggaaggacaccaggtcgcactcctttcgggggaaatgatggtagagcagcgggcagccgttatcgagcggttccgcgaaggaaaggaaaaggtactggtgaccaccaacgtgtgtgcacggggaatcgacgtagagcaggtttccgtggtcattaatttcgacctgcccgtggataaagacggtaatccagacaatgagacctaccttcacaggatagggcggacagggcgtttcgggaaaaggggcctggctgtgaacatggtcgattccaagcatagcatgaatatcttgaaccggattcaggagcatttcaacaagaaaatcgagcgtctcgatactgacgatctggatgagattgaaaagattgccaattag

SEQ ID NO: 197915 - DNA, 1344 bp, Artificial Sequence
  derived and/or modified sequence
atggccaccgacagctgggccctggccgtggacgagcaggaggccgccgtgaaaagtatgacaaacttacagatcaaggaagaaaaggtcaaagccgacacaaacggaatcatcaaaacctccactacggcagagaaaacagacgaggaggagaaggaggacagagctgctcaatcgctgctaaacaagcttatacgctcaaaccttgtggataacacgaatcaggtggaagtcctgcaaagggaccccaattccccactgtacagcgtgaaatcattcgaagagttaagactccctcagaacctgatagctcagagccagagcggcacaggcaaaacggccgcctttgttctcgccatgctctccagggtggaaccatctgaccggtaccctcagtgtctgtgtttgtctcctacctatgaactggccttacaaacggggaaagtgatagaacagatgggcaagttttacccagaactgaaactcgcctatgccgtcagaggaaataaactggagcggggtcaaaagatcagtgagcaaatcgtaattggcacgcctggcacggtcctagactggtgttctaagctcaaattcattgaccccaagaagatcaaggtgtttgtcctggacgaggccgacgtgatgatcgccacccagggacatcaggaccaatcgattagaattcaaaggatgttgcctcgtaactgccagatgctgttgtttagcgcaacttttgaggactccgtctggaaattcgcccagaaagtggtgccagatccaaacgtgataaagcttaagcgtgaagaggagactttggacaccataaagcagtactacgtgttgtgtagtagtcgcgacgagaagtttcaggcactctgtaacctttacggggctatcaccatagcccaggctatgattttctgccacactcgaaaaaccgccagctggcttgcggccgaactctccaaagaaggacatcaggtggctttacttagcggagagatgatggtagagcagcgtgccgcagtgattgaaagattccgagaaggaaaggaaaaagttcttgtaactactaatgtgtgtgcaaggggcatcgacgtggagcaagtgtccgttgtcattaacttcgaccttcccgtggataaagacggcaatcctgacaacgaaacttacctccacagaatcgggcggactgggcgtttcggaaagcgaggcctggctgtgaatatggtcgactctaagcactccatgaatattctgaatagaatacaggagcactttaataaaaagattgaaaggctggacacggatgatctggacgagatcgagaaaatcgcaaactag

SEQ ID NO: 197916 - DNA, 1437 bp, Artificial Sequence
  derived and/or modified sequence
atggccaccgactcttgggctctggctgtggacgagcaggaagcggcagttaagagtatgaccaatctgcagatcaaagaggagaaggtgaaggcagacaccaacggcatcattaaaacatccacaacagccgagaaaaccgacgaggaggagaaggaagatcgggctgctcagtccctgctaaacaagctgatccgcagcaacctcgtggacaatactaaccaagtggaagttctgcagcgcgaccccaacagtccactttattccgtcaagtcctttgaggagttgcgtttgaaacctcagttactgcagggagtttatgctatgggctttaacagacccagcaagatccaggagaatgctttacctatgatgctggccgaaccaccccaaaacctcattgcccaaagccagtccggtacgggtaagaccgctgcctttgtcctggctatgttaagccgggtcgaaccctctgacaggtatcctcagtgcttgtgtttgtcccccacctacgagctggcattacaaaccgggaaagtgatcgaacagatgggcaaattctatccagagctgaaattggcctatgcagtaaggggcaacaaattagagcgtggccagaaaattagtgagcagattgtcatcgggaccccgggaactgtgctggactggtgttccaagttgaagtttattgatcccaaaaagataaaagtctttgtgctagacgaggctgatgtgatgatagccacccagggccatcaggatcagtcaatccgaatccagcggatgctcccaagaaattgccagatgctgcttttcagtgctaccttcgaagattcagtctggaaatttgcccagaaggtggtgccagatccgaacgtcattaagctcaagcgggaggaagagaccctggacacgattaagcagtactacgtgctctgttcaagcagagacgaaaagttccaggctctgtgcaatctgtacggcgctattaccatagctcaagctatgattttctgccacacacggaagactgcatcatggcttgccgcagagctgtctaaggaagggcaccaggtagccctcctgtcaggagagatgatggtggagcagagggctgccgtgattgaaaggtttagagaaggtaaggagaaggtccttgtaacaaccaatgtatgtgcacgtggaatcgatgtggagcaggtatcagttgtgattaacttcgacctgcctgtcgataaagatggaaatcccgacaatgagacctacctgcatagaattggtcgaacaggacggttcggcaaacgcggactggccgtgaatatggtggatagtaaacattctatgaatatcctgaaccgcatccaggagcactttaataaaaagattgagcgcctggacaccgacgacttggacgaaatcgaaaaaatcgcaaattag

SEQ ID NO: 197917 - DNA, 1344 bp, Artificial Sequence
  derived and/or modified sequence
atggcaacagactcttgggctttggcggtggacgagcaagaggctgccgtgaaatctatgaccaacctccagattaaagaggagaaagtgaaagctgatactaacggaatcatcaagacaagtaccaccgccgagaagacagacgaagaggaaaaggaagaccgagcggctcagtctcttctcaacaagctgattcggtccaacctggtagataacaccaaccaggttgaagtcctgcagcgggaccccaactctcctctatattccgtgaagtcctttgaggagctccggctcccccagaatctgattgcccagtcccaatcgggaacaggcaaaactgctgcattcgttctggccatgcttagcagagtggagccctccgatcgctacccacagtgtctttgcttgtctccaacttatgagttagctctgcagactggtaaggtgattgaacagatggggaagttctatcctgagctgaaattggcttacgccgtcagggggaataagctggaaagggggcagaagatctcagaacagatcgtgataggcacccctggcacagttttagactggtgttctaagttgaaattcatcgacccaaagaagatcaaagtctttgtccttgatgaggctgatgtaatgatcgcaacccagggccaccaggaccaaagcattcggattcagcgcatgctccccaggaattgtcagatgctgctgttctcggctaccttcgaagactctgtgtggaaatttgctcagaaggtcgtcccagaccccaacgtcatcaaattaaaaagagaggaagaaaccctcgatactattaagcagtattacgtgttatgcagcagtagagacgaaaagtttcaggcattgtgcaacctctacggagctataactattgcacaggccatgattttttgccacacccgcaagacagccagttggctggcagccgaactgtccaaggaggggcatcaagtagctctcctgtctggtgaaatgatggtagagcaaagggccgctgtcattgagaggttccgagagggcaaggagaaagttctggtgacaactaacgtatgtgcaagaggtattgatgttgaacaggtttctgtagtgatcaactttgaccttccagtggataaagacggtaacccggacaatgagacctatctgcatcgtattggcagaactgggaggttcggaaagcgaggtctggccgtgaatatggtggattctaagcattccatgaatattctgaatcgaattcaggaacattttaacaaaaagatagaaaggttggacactgatgacctggacgagatcgaaaaaatcgctaactag

SEQ ID NO: 197918 - DNA, 2901 bp, Artificial Sequence
  derived and/or modified sequence
tggcgaggttagggcccgcgttgcgacgtggtgcagcgcatattttcacaagtgggtctcccttgtccgggactatggccaccgactcgtgggccctggcggtggacgagcaggaagcggctgtcaagtcgatgaccaatttgcagatcaaggaagagaaagtcaaagcagataccaatggtattatcaaaaccagtaccactgccgagaaaacagatgaagaggagaaagaggacagagctgcccagtccttactcaacaagctgatcagaagcaaccttgttgataacacaaaccaagtggaagtcctgcaacgggatccaaactcccctctgtactcggtgaagtcgtttgaagagcttcggctgaaaccacagcttctccagggagtctatgccatgggcttcaatcgaccctccaagatacaagagaacgcattacccatgatgcttgctgaacccccacagaatctgattgcccagtctcagtctggcactggtaaaacagctgcctttgtcttagccatgctcagccgagtggagccatcagacagatacccccagtgtctgtgcctctccccaacatatgagctggcgcttcaaacaggaaaagtgattgagcagatgggcaaattttacccagaactgaagcttgcctatgccgttcgaggcaataaattggaaagaggccagaagatcagtgagcagattgtcattggcacccctgggaccgtgctggactggtgctccaagctcaagttcattgatcccaagaaaatcaaggtgtttgttctggatgaggctgatgtcatgatagccactcagggccaccaagatcagagcatccgcatccagaggatgctgcccaggaactgccagatgctgcttttctccgccacctttgaagactctgtgtggaagtttgcccagaaagtggtcccagacccaaatgttatcaaactgaagcgtgaggaagagaccctggataccatcaagcagtactatgtcctgtgcagcagcagagacgagaagttccaggccttgtgtaacctctacggggccatcaccattgctcaagccatgatcttctgccatactcgcaaaacagctagttggctggcagcagagctctcaaaagaaggccaccaggtggctctgctgagtggggagatgatggtggagcagagggctgcggtgattgagcgcttccgagagggcaaagagaaggttttggtgaccaccaacgtgtgtgcccgcggcattgatgttgaacaagtgtctgtcgtcatcaactttgatcttcccgtggacaaggacgggaatcctgacaatgagacctacctgcaccggatcgggcgcacgggccgctttggcaagaggggcctggcagtgaacatggtggacagcaagcacagcatgaacatcctgaacagaatccaggagcattttaataagaagatagaaagattggacacagatgatttggacgagattgagaaaatagccaactgagaagctccaccagccactgatgccagccctggcactgcccctgcacaggagacaagtgcatttagggcacaggccccgacatcaccccaaggacaacggcagaagtagagagaaactacctacctcacttcaaattatgtttggacttgacaaaaataggtgcaaatgatggggggcaatagaagaaaaaatttgcattttggaaaattgggtcctttccccacttttttaaagccacattcccccatctttataataatctggtcacagtggtagtcgctggccccaggaccccctcctgattttggctaggcatcgtggaaccagctccagcccctgaagaaacgatagatgtgcaggttgtgcggaagaggctgagtggaaaatggtgtgagccccaccgctgtgcatcgaatgagggaagtggcagcagagaggccagagctgccccctctctgtctcttcaatggacccttcacaagtgtttctcctgcccttggggctgtcttccttctcctgaaatccagagactttcttgctcatcccttctccctttcacttctgttctctgctgcagaaagcagacttgcatatccctgatgagcagctcggctacttttgtaaacttcagatttggagagaaacacgaaagtctgaatcctgaccccttgagagagagtgatctggcgagggccgatgaaggggctgggcctggtcttgccttctcttctctcggttgctccctctgcctaggcccctggtactcagtcacggcagccaggagaccccaggtgagtttctgagcgcatacgtagttggttcttacccccaggtgtcacacggggccgagagctgagcaagaatttggaatggaagttatgaccaagggaattatgctgttcatttataatagtggacattatggagagctctgattcctacataatatgaataaggatggataggccgggcgtggtggctcatgcctataatcccagcacgttgggaggctgaggcgggcggatcggttgagctcaggcgttcgggaccagcctggccaacatgatgaaaccccgtctctaccaaaaatagaaaaaaatatagccgggcctggtggcgcacgcctgtagtcccagctactcgggaggctgaggtaggaggatcgcttgagcctgggtagaggctgctgtgagctgaaatggcgccactgcactccagcctgggtaacagagcgagaccccgactcaataaataaataaggatggataaattgtagcgtatgcaccattcattatgctaagacattttaaagtaattatgagaaacgctctactaatgatttgtttttatttgtatttttctgcttattagacaaatatatactcatttt

SEQ ID NO: 197919 - DNA, 2995 bp, Artificial Sequence
  derived and/or modified sequence
agaatgatgatgtcgcacgctgggtgggaactgacgtcacctgtgctcaccgccgcttccggtccgcgtgaggtgcattctcgcgccggtggcgaggttagggcccgcgttgcgacgtggtgcagcgcatattttcacaagtgggtctcccttgtccgggactatggccaccgactcgtgggccctggcggtggacgagcaggaagcggctgtcaagtcgatgaccaatttgcagatcaaggaagagaaagtcaaagcagataccaatggtattatcaaaaccagtaccactgccgagaaaacagatgaagaggagaaagaggacagagctgcccagtccttactcaacaagctgatcagaagcaaccttgttgataacacaaaccaagtggaagtcctgcaacgggatccaaactcccctctgtactcggtgaagtcgtttgaagagcttcggctgaaaccacagcttctccagggagtctatgccatgggcttcaatcgaccctccaagatacaagagaacgcattacccatgatgcttgctgaacccccacagaatctgattgcccagtctcagtctggcactggtaaaacagctgcctttgtcttagccatgctcagccgagtggagccatcagacagatacccccagtgtctgtgcctctccccaacatatgagctggcgcttcaaacaggaaaagtgattgagcagatgggcaaattttacccagaactgaagcttgcctatgccgttcgaggcaataaattggaaagaggccagaagatcagtgagcagattgtcattggcacccctgggaccgtgctggactggtgctccaagctcaagttcattgatcccaagaaaatcaaggtgtttgttctggatgaggctgatgtcatgatagccactcagggccaccaagatcagagcatccgcatccagaggatgctgcccaggaactgccagatgctgcttttctccgccacctttgaagactctgtgtggaagtttgcccagaaagtggtcccagacccaaatgttatcaaactgaagcgtgaggaagagaccctggataccatcaagcagtactatgtcctgtgcagcagcagagacgagaagttccaggccttgtgtaacctctacggggccatcaccattgctcaagccatgatcttctgccatactcgcaaaacagctagttggctggcagcagagctctcaaaagaaggccaccaggtggctctgctgagtggggagatgatggtggagcagagggctgcggtgattgagcgcttccgagagggcaaagagaaggttttggtgaccaccaacgtgtgtgcccgcggcattgatgttgaacaagtgtctgtcgtcatcaactttgatcttcccgtggacaaggacgggaatcctgacaatgagacctacctgcaccggatcgggcgcacgggccgctttggcaagaggggcctggcagtgaacatggtggacagcaagcacagcatgaacatcctgaacagaatccaggagcattttaataagaagatagaaagattggacacagatgatttggacgagattgagaaaatagccaactgagaagctccaccagccactgatgccagccctggcactgcccctgcacaggagacaagtgcatttagggcacaggccccgacatcaccccaaggacaacggcagaagtagagagaaactacctacctcacttcaaattatgtttggacttgacaaaaataggtgcaaatgatggggggcaatagaagaaaaaatttgcattttggaaaattgggtcctttccccacttttttaaagccacattcccccatctttataataatctggtcacagtggtagtcgctggccccaggaccccctcctgattttggctaggcatcgtggaaccagctccagcccctgaagaaacgatagatgtgcaggttgtgcggaagaggctgagtggaaaatggtgtgagccccaccgctgtgcatcgaatgagggaagtggcagcagagaggccagagctgccccctctctgtctcttcaatggacccttcacaagtgtttctcctgcccttggggctgtcttccttctcctgaaatccagagactttcttgctcatcccttctccctttcacttctgttctctgctgcagaaagcagacttgcatatccctgatgagcagctcggctacttttgtaaacttcagatttggagagaaacacgaaagtctgaatcctgaccccttgagagagagtgatctggcgagggccgatgaaggggctgggcctggtcttgccttctcttctctcggttgctccctctgcctaggcccctggtactcagtcacggcagccaggagaccccaggtgagtttctgagcgcatacgtagttggttcttacccccaggtgtcacacggggccgagagctgagcaagaatttggaatggaagttatgaccaagggaattatgctgttcatttataatagtggacattatggagagctctgattcctacataatatgaataaggatggataggccgggcgtggtggctcatgcctataatcccagcacgttgggaggctgaggcgggcggatcggttgagctcaggcgttcgggaccagcctggccaacatgatgaaaccccgtctctaccaaaaatagaaaaaaatatagccgggcctggtggcgcacgcctgtagtcccagctactcgggaggctgaggtaggaggatcgcttgagcctgggtagaggctgctgtgagctgaaatggcgccactgcactccagcctgggtaacagagcgagaccccgactcaataaataaataaggatggataaattgtagcgtatgcaccattcattatgctaagacattttaaagtaattatgagaaacgctctactaatgatttgtttttatttgtatttttctgcttattagacaaatatatactcattttaaaaa

SEQ ID NO: 197920 - DNA, 1437 bp, Artificial Sequence
  derived and/or modified sequence
atggccaccgacagctgggccctggccgtggacgagcaggaggccgccgtgaagagcatgaccaacctgcagatcaaggaggagaaggtgaaggccgacaccaacggcatcatcaagaccagcaccaccgccgagaagaccgacgaggaggagaaggaggacagagccgcccagagcctgctgaacaagctgatcagaagcaacctggtggacaacaccaaccaggtggaggtgctgcagagagaccccaacagccccctgtacagcgtgaagagcttcgaggagctgagactgaagccccagctgctgcagggcgtgtacgccatgggcttcaacagacccagcaagatccaggagaacgccctgcccatgatgctggccgagcccccccagaacctgatcgcccagagccagagcggcaccggcaagaccgccgccttcgtgctggccatgctgagcagagtggagcccagcgacagatacccccagtgcctgtgcctgagccccacctacgagctggccctgcagaccggcaaggtgatcgagcagatgggcaagttctaccccgagctgaagctggcctacgccgtgagaggcaacaagctggagagaggccagaagatcagcgagcagatcgtgatcggcacccccggcaccgtgctggactggtgcagcaagctgaagttcatcgaccccaagaagatcaaggtgttcgtgctggacgaggccgacgtgatgatcgccacccagggccaccaggaccagagcatcagaatccagagaatgctgcccagaaactgccagatgctgctgttcagcgccaccttcgaggacagcgtgtggaagttcgcccagaaggtggtgcccgaccccaacgtgatcaagctgaagagagaggaggagaccctggacaccatcaagcagtactacgtgctgtgcagcagcagagacgagaagttccaggccctgtgcaacctgtacggcgccatcaccatcgcccaggccatgatcttctgccacaccagaaagaccgccagctggctggccgccgagctgagcaaggagggccaccaggtggccctgctgagcggcgagatgatggtggagcagagagccgccgtgatcgagagattcagagagggcaaggagaaggtgctggtgaccaccaacgtgtgcgccagaggcatcgacgtggagcaggtgagcgtggtgatcaacttcgacctgcccgtggacaaggacggcaaccccgacaacgagacctacctgcacagaatcggcagaaccggcagattcggcaagagaggcctggccgtgaacatggtggacagcaagcacagcatgaacatcctgaacagaatccaggagcacttcaacaagaagatcgagagactggacaccgacgacctggacgagatcgagaagatcgccaactag

SEQ ID NO: 197921 - DNA, 2949 bp, Artificial Sequence
  derived and/or modified sequence
atgaaggagcccgacgaccaggacaccgacggcgagaagagcgtgaccagcaagagcgacggcaagaagagcctgagaagcagcaagagcgagagcagaagccccgtgcaggaggacaacaccttcctggaggacgacaccgacgagaccttcaccaagggcgagggcagctacctggaggaggacagcgacgaggagagactggagggcagcctgagcagcttccagtacggcgacctgcagagcaccaccgtgccccagcagacccccgcccccgccgtggaggaggccgaggaggaggtgaagaagaagatcagcgagagcttcttctacgactacatggagctggccagcatgcccttcgtgaccctggacagcaacatccccctggacctgctgaccctggtgcacagcttcggctacgactgcagaaagagagccaacctgcagctgctggacgacagcatcgccatctacatcgccggcaaccagctgatcttcctgaacctgaagaccaaggagcagatctacctgagaagcagcagcggcgagggcatcggcgtgatcggcgtgcacccccacaagacctacttcaccgtggccgagaagggcagcttccccgacatcatcatctacgagtaccccagcctgagaccctacagagtgctgagagacggcaccgagaagggctacgcctacgtggacttcaactacagcggcaacctgctggccagcgtgggcagcaaccccgactacaccctgaccatctggaactggaaggaggagcagcccatcctgagaaccaaggccttcagccaggaggtgttcaaggtgaccttcaaccccgacaaggaggagcagctgaccaccagcggcagcggccacatcaagttctgggagatggccttcaccttcaccggcctgaagctgcagggcagcctgggcagattcggcaagaccatcaccaccgacatcgagggctacatggagctgcccgacggcaaggtgctgagcggcagcgagtggggcaacatgctgctgtgggagggcggcctgatcaaggtggagctgtgcagaggcaccagcaagagctgccacaacggccccatcaaccagatcatgctgtacgagggcgaggtgatcaccgtgggcagcgacggctacgtgagaatctgggacttcgagaccatcgacaccgccgacgtgatcgacgagaccggcctgctggagatcgagcccatcaacgagctgcaggtggacaagaacgtgaacctgttcagcatgatcaagatgaacgagaccggcaacaacttctggctggcccaggacgccaacggcgccatctggaagctggacctgagcttcagcaacatcacccaggaccccgagtgcctgttcagcttccacagcggcgccatcgaggccgtggccgtgagccccctgacctacctgatggccaccaccgccctggactgcagcgtgagaatctacgacttcgccagcaagacccccctggcccagatgaagttcaagcagggcggcaccgccctggtgtgggtgcccagaatggtgaacttcaccggcgcccagatcatcgtgggcttcgaggacggcgtggtgagaatcctggagctgtacgaccccaagggcctgaccatcttcgccggcagaaagaagatcctggacgccgacatccagctgaagcaggtgttcaagccccacaccgcctgcgtgaccgccctggcctacgagagagacggcgagatcctggccaccggcagcaaggaccagaccgtgttcttcttcgaggtggagagagactacaagcccatcggctacatcaacacccccggccccgtgtgccagctgatgtggagccccatgagccaccccgagagcaccctgctgatcatctgcgagaacggctacatcctggaggcccccctgcccaccatcaagcaggaggaggacgaccacgacgtggtgagctacgagatcaaggacatgtgcatcaagtgcttccacttcagcagcgtgaagagcaagatcctgagactgatcgagatcgagaagagagagagacagagagagctgaaggagaagatcagagaggagagaagaaacaagctggccgccgagatgggcgaggacggcgagaaggagttccaggaggaggaggaggagaaggaggaggaggaggaggaggaggagcccctgcccgagatcttcatccccagcacccccagccccatcctgtgcggcttctacagcgagcccggcaagttctgggtgagcctgggcggctacgacagcggcttcctgtaccactgcgagttccccccctgcgacgagagcagcgacttcaaggagcagaaggacgagcccatcgacgtgagatacctggccgacaccgaggacaaccccatccagaccatcaccttcaacatcaacaaggtgatgatgttctgcggcatgaagaacggcgccatcagagtgtacgtgctgaaccagaacgaccccagcctgaccagcctggtggactactggcacttcaacatgcacgacaacaactacggctgcatcaagagcatcgccaacagcttcgacgacagattcctggtgaccgccggcgccgacggcaacatcttcgtgttcaacatcttcagcgagttcatgctgagaaaggacatgaaggccaaggtgcccagccccagattcggcatcgagaccgagcccatccccgaggacatcgaggaccccaaggcctacagcatcgagaacgccagaagaaagagagagcacgacaagctgatgaaggaggtgggcgagatcaaggccagaaagagagagcagatcaaggccctgagaagcgagttctgcaacctgctggagatgaacgagaagctgcccaagcacatgcagttcaagagaaccgtgagcctgatctag

SEQ ID NO: 197922 - DNA, 255 bp, Artificial Sequence
  derived and/or modified sequence
atgaaggagcccgacgaccaggacaccgacggcgagaagagcgtgaccagcaagagcgacggcaagaagagcctgagaagcagcaagagcgagagcagaagccccgtgcaggaggacaacaccttcctggaggacgacaccgacgagaccttcaccaagggcgagggcagctacctggaggaggacagcgacgaggagagactggagggcagcctgagcagcttccagtacggcgacctgcagagcaccacctag

SEQ ID NO: 197923 - DNA, 2949 bp, Artificial Sequence
  derived and/or modified sequence
atgaaagagcccgacgaccaggacactgacggagagaaaagcgtgacctccaagtcagatggcaagaaaagcctccgctctagcaagagcgagtccaggtccccagtgcaggaggataacacctttttggaagatgacactgatgagacattcaccaagggagaggggtcttacctcgaagaggattctgatgaggagaggctcgaaggttctctgtcttcattccagtatggggacctacagagtaccacagtgcctcagcagacacctgcccccgcagttgaagaggccgaggaagaggtgaaaaagaaaatttcagaatcctttttttacgactacatggagctagcgagtatgccattcgtgacactggactccaacatcccactcgacttgttgaccctggtacactcattcgggtacgactgtagaaaaagagccaatctgcagctccttgatgactccatcgcgatttatatagcgggtaaccaactcatctttctcaatttgaaaacaaaagaacagatatacctgcgatcttccagcggcgaaggcattggggttatcggcgtgcacccccacaagacgtatttcacagtggccgagaaaggatcttttccagatatcataatctacgaatacccttcacttcggccgtaccgtgtgttgcgcgatggcactgaaaaaggttacgcttacgttgacttcaactattcgggaaatcttctcgcgtccgtgggatccaatcccgactacactcttactatttggaattggaaggaagaacagcctattttgcggaccaaggccttcagtcaggaggtttttaaagttacatttaaccctgataaagaagaacagctgaccacaagcgggtcggggcacattaaattctgggagatggctttcacattcacaggcctgaagcttcagggctctctcgggaggttcggcaagaccatcaccacggatatcgaaggctacatggaactgcccgacggcaaggttttaagcggaagtgagtggggcaacatgctcctatgggaaggtggcttaatcaaggttgagctgtgccgcggaacgtccaaatcctgccacaatgggcccatcaatcagatcatgctgtacgagggagaggtcatcacagtgggttctgatgggtacgtcaggatttgggacttcgaaactatcgacacagcggatgtgatcgacgaaaccggtctgctcgagatcgaacctattaacgagttacaggtggacaagaatgtcaacctcttctctatgataaaaatgaacgaaaccggcaacaatttctggcttgctcaggacgccaacggggccatttggaagctcgacctgagcttcagcaatatcactcaggacccagaatgcctctttagcttccattccggggcgattgaggccgtggcagtgagtccactgacttaccttatggcaaccacagccctggactgctccgtcaggatctacgattttgcctcaaaaacccccctcgcccagatgaaattcaaacaaggaggaacagcactggtatgggtcccacggatggtgaacttcactggggcgcagatcattgtcggtttcgaagatggcgtcgtgcgcatccttgagctgtatgacccgaaggggctcacaatctttgccggtaggaagaaaattctggatgctgacatccaattaaaacaagtgtttaaaccacataccgcttgtgtcaccgcactggcctacgagcgggacggagaaatcctcgcgactgggtctaaagaccagacggtgttcttcttcgaggttgagcgcgactataaacctattgggtacattaacacccctgggcccgtctgccaattaatgtggtctccaatgagccatcccgagagtactcttctcatcatttgcgagaacggatacatcctagaggcgcccctgcctacaattaaacaggaggaggacgatcatgatgtggtgagctacgagattaaggatatgtgcattaaatgtttccatttctccagcgttaaatcaaagatcctgaggctcatcgagattgaaaagcgagagcggcaacgggaattgaaggagaagattcgggaggaaagaagaaataagcttgctgccgaaatgggagaggatggcgaaaaagagtttcaggaagaggaggaagagaaggaagaggaagaggaagaagaagagcccctgcccgagatcttcatcccatctactccaagccccattctgtgcgggttttattcggagccaggaaagttttgggtgtctttgggaggatatgattcaggcttcctgtatcactgcgaattccccccttgtgatgagagctctgatttcaaagagcagaaagacgaacctatagacgtgcgttacttggccgatacagaagacaatccaattcagacgattacatttaatatcaataaggttatgatgttttgcggaatgaagaacggggctattcgagtttatgtactgaaccaaaatgacccgagtttgacctctctcgtcgattattggcattttaacatgcacgataataattacggatgtattaaatctattgccaatagctttgacgataggtttttggtaactgcaggagctgatgggaacatattcgttttcaatatcttttcggagtttatgctgaggaaggatatgaaagccaaggtgccatctccccgattcgggatcgaaacggagccaatccccgaggatatagaagaccctaaagcctacagtatcgagaacgcaaggaggaaaagggaacacgataaactgatgaaggaagtgggagagattaaggcacgcaaaagggagcaaatcaaagccctgaggagcgagttctgtaacctgctcgagatgaatgagaagcttcctaagcacatgcagtttaaaagaacggtcagccttatctag

SEQ ID NO: 197924 - DNA, 255 bp, Artificial Sequence
  derived and/or modified sequence
atgaaggaacccgacgaccaagatacggatggagagaaaagtgtcacaagcaaatctgatgggaagaaatcccttcgatcctccaagtccgaaagccggagtcccgtgcaggaggataacacgttcctggaggacgacactgatgagacgtttacaaaaggcgaggggtcctatctggaagaagattcagacgaggagcggctggagggttccttgtcatcgtttcaatatggagacctgcaatccacaacctag

SEQ ID NO: 197925 - DNA, 2949 bp, Artificial Sequence
  derived and/or modified sequence
atgaaggagccagatgaccaggacacagatggagagaagtctgtgaccagcaagagtgatggcaagaagagcctgcggagcagcaagtctgagagccgcagccctgtgcaggaggacaacaccttcctggaggatgacacagatgagaccttcaccaagggggagggcagctacctggaggaggacagtgatgaggagcggctggagggcagcctgagcagcttccagtatggagacctgcagagcaccaccgtgccccagcagaccccagccccagctgtggaggaggccgaggaggaggtgaagaagaagatcagcgagagcttcttctatgactacatggagctggcctccatgccctttgtgaccctggacagcaacatccccctggacctgctgaccctggtgcacagctttggctatgactgcaggaagagggccaacctgcagctgctggatgacagcatcgccatctacatcgccggcaaccagctgatcttcctgaacctgaagaccaaggagcagatctacctgcggagcagcagcggggagggcatcggcgtgattggagtgcacccccacaagacctacttcaccgtggccgagaagggcagcttcccagacatcatcatctatgagtaccccagcctgcggccctacagagtgctgagagatggaacagagaagggctacgcctacgtggacttcaactacagcggcaacctgctggcctctgtgggcagcaacccagactacaccctgaccatctggaactggaaggaggagcagcccatcctgcggaccaaggccttcagccaggaggtgttcaaggtgaccttcaacccagacaaggaggagcagctgaccaccagcggcagcggccacatcaagttctgggagatggccttcaccttcaccggcctgaagctgcagggcagcctgggccgctttgggaagaccatcaccacagacatcgagggctacatggagctgcctgatggcaaggtgctgagcggcagcgagtggggcaacatgctgctgtgggagggcggcctcatcaaggtggagctgtgccggggcaccagcaagagctgccacaacggccccatcaaccagatcatgctgtatgaaggagaggtgatcaccgtgggcagtgatggctacgtgcgcatctgggactttgagaccatcgacacagcagatgtgattgatgagaccggcctgctggagattgagcccatcaatgagctgcaggtggacaagaatgtgaacctcttctccatgatcaagatgaatgagaccggcaacaacttctggctggcccaggatgccaatggagccatctggaagctggacctgtccttcagcaacatcacccaggaccctgaatgtctcttctccttccacagcggggccattgaagctgtggccgtgagccccctgacctacctgatggccaccacagccctggactgcagcgtgcgcatctatgactttgccagcaagacccccctggcccagatgaagttcaagcagggcggcacagccctggtgtgggtgcccaggatggtgaacttcaccggggcccagatcatcgtgggctttgaagatggagtggtgcgcatcctggagctgtatgaccccaagggcctgaccatctttgctggcaggaagaagatcctggatgctgacatccagctgaagcaggtgttcaagccccacacagcctgtgtgacagccctggcctatgaaagagatggagagatcctggccaccggcagcaaggaccagaccgtcttcttctttgaggtggagcgggactacaagcccatcggctacatcaacaccccaggccctgtgtgccagctgatgtggagccccatgagccaccctgagagcaccctgctgatcatctgtgaaaatggctacatcctggaggcccccctgcccaccatcaagcaggaggaggatgaccatgatgtggtgtcctatgagatcaaggacatgtgcatcaagtgcttccacttcagctctgtgaagagcaagatcctgcggctgattgaaattgagaagcgggagcggcagcgggagctgaaggagaagatccgggaggagaggaggaacaagctggccgctgagatgggagaagatggagagaaggagttccaggaggaggaggaggagaaggaggaggaggaggaggaggaggagcccctgcctgagatcttcatccccagcacccccagccccatcctgtgtggcttctacagcgagcccgggaagttctgggtgtccctgggcggctatgattctggcttcctgtaccactgtgagttccccccctgtgatgagagcagtgacttcaaggagcagaaggatgagcccattgatgtgcgctacctggccgacacagaggacaaccccatccagaccatcaccttcaacatcaacaaggtgatgatgttctgtggcatgaagaatggagccatccgggtgtatgtgctgaaccagaatgaccccagcctgaccagcctggtggactactggcacttcaacatgcatgacaacaactacggctgcatcaagagcatcgccaacagctttgatgaccgcttcctggtgacagctggagcagatggcaacatctttgtgttcaacatcttcagcgagttcatgctgaggaaggacatgaaggccaaggtgcccagcccccgcttcggcatcgagacagagcccatcccagaagatattgaggaccccaaggcctacagcattgaaaatgcccggaggaagcgggagcatgacaagctgatgaaggaggtgggggagatcaaggccaggaagcgggagcagatcaaggccctgcggtctgagttctgcaacctgctggagatgaatgagaagctgcccaagcacatgcagttcaagaggacagtgtccctcatctag

SEQ ID NO: 197926 - DNA, 255 bp, Artificial Sequence
  derived and/or modified sequence
atgaaggagccagatgaccaggacacagatggagagaagtctgtgaccagcaagagtgatggcaagaagagcctgcggagcagcaagtctgagagccgcagccctgtgcaggaggacaacaccttcctggaggatgacacagatgagaccttcaccaagggggagggcagctacctggaggaggacagtgatgaggagcggctggagggcagcctgagcagcttccagtatggagacctgcagagcaccacctag

SEQ ID NO: 197927 - DNA, 2949 bp, Artificial Sequence
  derived and/or modified sequence
atgaaggagcccgacgaccaggacaccgacggcgagaagagcgtgacctccaaatctgacggcaaaaaatctcttaggtcctccaagtccgagagccgcagtccagtgcaggaggacaacactttcctggaggacgatacggatgaaacatttactaagggcgagggctcttacctggaggaggattccgatgaggaaagactagagggaagtctgtccagttttcaatatggagacctccagtcaacaactgtgcctcagcagactcctgccccggctgtggaagaggcagaagaggaggtgaaaaagaagatttctgagtcttttttctatgattacatggaactggcgagcatgccttttgtgacactggactctaacattcctctggatcttctgacccttgtgcattctttcggatatgattgtcgaaaaagggccaatctacagctgctggacgatagcatcgctatctacattgcaggaaatcagctgatcttcctgaacttaaagacaaaagaacagatctacttgcgtagctcctcaggtgagggaattggcgtgattggagtgcatcctcacaaaacctactttactgtggcagagaaagggtcatttcctgatatcattatctacgagtacccctccctgaggccgtatcgagtcctcagagatgggactgagaaggggtatgcctatgttgattttaactacagtggcaacctcttggcctccgtgggatctaaccctgactatacactgactatttggaactggaaagaggaacagcccatcctcaggacgaaggcgttcagccaggaggtctttaaggtcaccttcaaccccgataaggaggagcagctaacgacgagcggatccgggcatattaagttttgggagatggccttcacttttacagggttgaaactccaagggtcgcttggacgtttcggaaagacaatcaccaccgatattgaaggatatatggagctgccagacggtaaagttttatctggctccgagtggggcaatatgctcctgtgggagggcggtttgatcaaagttgagttatgcaggggtacgagcaagtcctgccacaacgggccaatcaaccagatcatgctctacgagggcgaggtcatcacggtggggagtgacggctacgtgagaatttgggactttgagaccattgataccgccgacgtgatcgacgagaccggattgctggagatcgagcctatcaacgagttgcaggtggacaagaacgtcaacctgttctccatgatcaagatgaacgagaccgggaataacttctggctggctcaggatgctaacggtgctatctggaagctggacctgtctttcagcaacattacccaggatcccgaatgtttatttagctttcactctggcgccattgaggctgtcgccgtgagcccactgacttatctcatggccactaccgcgctggattgttctgtgaggatctacgactttgcctctaagacccctttggcacaaatgaaattcaagcagggggggacagcgttggtgtgggtgccaaggatggtgaactttacaggggcccagatcatcgtcgggttcgaagatggcgtggtgagaatcttagagctgtacgacccaaaaggactgaccatcttcgcagggaggaagaagattctggacgctgacatacaactgaaacaggtgtttaaaccacacaccgcatgtgtgacagctctcgcctacgaacgcgatggagaaattcttgcgacaggctccaaggatcagaccgtgttctttttcgaggtggagagagattacaaaccaattggatatataaacacgccaggacccgtgtgtcagctgatgtggtcccccatgagtcatcctgagtcaaccctgcttataatttgcgaaaatgggtatattttggaagcaccccttccgacaatcaagcaggaagaagacgaccatgatgtggtgtcgtacgaaataaaggacatgtgcatcaagtgcttccatttctcttctgtaaaatctaaaatcctgaggctgattgaaatcgagaagagggagcggcagcgtgagctgaaggagaagatcagagaagagcgaagaaataagctggccgccgagatgggggaggatggtgagaaagaattccaggaagaggaagaggaaaaggaggaggaggaagaagaagaagaaccgctaccggagatctttatcccttccaccccttcaccgatcctgtgcggtttctactctgaacctgggaagttctgggtctctttggggggatacgattctggtttcctgtaccactgcgagtttccgccttgtgatgaaagctctgactttaaagaacagaaagacgagccgatcgatgttcggtacctggcggacacagaagacaacccaattcagacgataacttttaacattaataaagtgatgatgttctgtgggatgaaaaatggggcaatccgcgtttatgtccttaaccagaacgacccaagtctgaccagtttagtggactattggcacttcaatatgcacgacaacaactacggctgtatcaagtccatagcaaatagcttcgatgaccgtttccttgtaactgccggggcagatgggaatatatttgtgttcaatatcttttccgagtttatgctcaggaaagatatgaaggcgaaggtcccctcaccaaggttcggaatagagacggagcccatcccagaagatattgaggacccaaaggcttattctattgagaacgcgcgtaggaagcgcgagcacgacaagcttatgaaagaggtgggcgagattaaagcgagaaaaagagaacaaatcaaagccttgaggagtgagttctgcaatttgctcgagatgaatgagaaactcccaaagcatatgcagttcaaacggacagtaagtctgatctag

SEQ ID NO: 197928 - DNA, 255 bp, Artificial Sequence
  derived and/or modified sequence
atgaaggagcccgacgaccaggacaccgacggcgagaagagcgtgacgtctaagtcagacggtaaaaaatctctccgctccagcaagtctgaaagccgatctcctgtccaggaggacaatacattcctggaggatgacacagatgaaactttcaccaagggcgaaggctcttatttggaggaggacagtgacgaggagcgcttggagggcagcctttccagcttccagtatggcgacctgcaaagtaccacgtag

SEQ ID NO: 197929 - DNA, 2949 bp, Artificial Sequence
  derived and/or modified sequence
atgaaggagcccgatgatcaggacacggatggagagaagtcagtgacaagtaagagcgatggcaagaaatccctcaggtcaagcaagtcagaatctcgttctccagtgcaggaggacaacactttcctggaggatgacaccgacgaaactttcacaaaaggggaaggctcatatttagaagaagactcggacgaggagcgcctagagggctccctttctagctttcagtacggcgatctgcagagcaccacagtgccccagcaaacacccgctcccgctgttgaggaagcagaagaggaagtcaagaaaaagattagcgaaagtttcttctatgattatatggaactggcctctatgcctttcgtgaccttagattctaacattcccctagatctgttgacactagtgcacagctttggttatgactgtaggaaaagggcgaatctacagctattggatgactccattgcgatttatatcgcagggaatcagttgattttccttaatctcaagactaaagaacaaatctacctccggagctcaagcggagagggcataggcgtcatcggcgtgcacccccacaagacatattttaccgtggccgaaaagggtagtttcccggacattattatttacgagtacccatcattacgcccatacagagtgctccgagacgggaccgagaaaggctacgcgtatgtggacttcaactattcaggcaacctcctggcaagcgtggggagcaatcctgactatacgcttaccatctggaactggaaggaggagcaacccatcttacgcacaaaagcatttagccaggaggtgttcaaggttacttttaatccagacaaagaggagcaactgaccacatctggatcaggtcatatcaaattctgggagatggcgttcacgtttacaggattgaaactccaagggagcctaggcaggttcgggaaaacaattaccactgatatagagggatatatggagctccccgacgggaaagtgctgtcagggtcagagtggggtaatatgctcttatgggaagggggtctcattaaagtggaactgtgtcgtgggacgagcaagtcctgccataacgggccaatcaatcaaattatgctgtatgaaggcgaggtaataacagttgggtccgacggttatgtgaggatctgggattttgagacgattgacacagctgacgtgattgatgaaacagggctgctggaaatcgagcctatcaatgagctccaagtagacaaaaacgtgaacctgttcagcatgattaagatgaatgagacgggcaacaacttctggttagcacaggacgctaacggtgccatttggaagttagatttgtccttctccaatatcactcaggaccccgaatgcttgttttctttccacagtggcgcaatcgaagcggtggccgtctccccccttacctatctcatggccacgacagcattagattgctccgtaagaatctacgatttcgcctccaagacacctctggcgcagatgaaatttaagcaagggggtacagcgctggtgtgggtgcccaggatggtgaattttacgggtgcacagatcatcgttggattcgaagatggggtggtgagaattttggaattatacgaccctaagggccttaccatcttcgctggtcgcaagaaaatactggatgcggacatccagcttaagcaagtgtttaaaccccacacagcttgcgtgacggctctcgcctacgagcgagacggagagatattagccaccgggtctaaggaccagacagtctttttctttgaggtggaaagagactacaagcctatcgggtacattaatacacctgggccagtatgtcaactgatgtggtcgcccatgtcacatcccgagtcaactctcttaatcatctgcgaaaatgggtacatattggaggctccacttcccacaattaagcaggaagaagacgaccacgacgtcgtgtcctatgagattaaagacatgtgcatcaaatgcttccacttttcatccgtgaaatccaagatcctgcggctaattgaaatcgagaagagagagcgccagcgagagctaaaagaaaaaattcgggaggagcgacgaaataaattggcagccgaaatgggggaagatggagagaaggaattccaggaagaggaagaagagaaagaggaagaggaagaggaagaagagccccttccagaaatcttcatcccatctactccttcccctatcctctgtggcttttacagcgaacccggtaagttttgggtgtctctgggcggatacgacagcggcttcctgtatcactgtgagtttcctccctgcgatgaatcgtcagattttaaggaacagaaggatgagcctattgacgttcgctatctggcagatacagaggacaacccaattcagaccatcacttttaatattaacaaggtgatgatgttttgcggtatgaagaatggggcaattagagtctacgtactgaaccagaatgaccccagccttacttccctcgtggattactggcactttaatatgcatgataataactatggatgtatcaaatcgatcgccaactcatttgatgatcgttttcttgtaacagctggcgctgacggcaatatcttcgtgttcaacattttttcagagtttatgctccgcaaagacatgaaggccaaagtgccttccccacgcttcggcatcgagacagagcccatcccggaggatattgaggatcccaaagcttattcaattgagaacgccaggcggaaaagggagcacgataagttgatgaaggaagttggagaaattaaggcacgtaagagggaacagattaaggcgctgagaagtgagttttgcaacctcctggaaatgaacgagaaactccccaagcatatgcagttcaagcggactgtgtcactgatctag

SEQ ID NO: 197930 - DNA, 255 bp, Artificial Sequence
  derived and/or modified sequence
atgaaggagcccgacgaccaggacacagatggagagaaaagcgtgacgtcaaaaagcgacggcaaaaagtccctaaggagtagcaaatcagaatcccgaagtcccgttcaggaggataacaccttcctcgaagatgatactgatgaaactttcaccaagggggagggctcttatctggaggaagactcggacgaagagcgcctggagggctctctgtctagctttcagtacggagatctgcagagtactacatag

SEQ ID NO: 197931 - protein, 155 aa, Artificial Sequence
  derived and/or modified sequence
MRHLPYFCRGQVVRGFGRGSKQLGIPTANFPEQVVDNLPADISTGIYYGWASVGSGDVHKMVVSIGWNPYYKNTKKSMETHIMHTFKEDFYGEILNVAIVGYLRPEKNFDSLESLISAIQGDIEEAKKRLELPEHLKIKEDNFFQVSKSKIMNGH

SEQ ID NO: 197932 - DNA, 468 bp, Artificial Sequence
  derived and/or modified sequence
atgcgccacttaccttacttctgtagggggcaggtcgtaagaggcttcggccgagggagcaagcagctcggcatccctactgctaatttccctgagcaggtggtcgacaacttgcccgcggacatttcaaccgggatctattacggatgggctagtgtcgggagtggagatgtgcacaagatggtcgtaagtataggctggaacccttattataagaatacaaagaaaagtatggagacccatatcatgcatacattcaaagaggacttctatggagagatcctcaacgtagctatcgtcggatatctccggcctgaaaagaacttcgattccctcgagagcctgatctccgctatccaaggtgacatcgaagaagccaagaaaaggctggagttacctgagcacctgaagatcaaggaggataacttcttccaggtgagcaaatccaagatcatgaatggacactag

SEQ ID NO: 197933 - DNA, 468 bp, Artificial Sequence
  derived and/or modified sequence
atgaggcacctgccctacttctgccggggccaggtggtgcggggcttcggccggggcagcaagcagctgggcatccccacagccaacttccctgagcaggtggtggacaacctgcctgctgacatcagcacaggcatctactacggctgggcctctgtgggcagcggagatgtgcacaagatggtggtgtccatcggctggaacccctactacaagaacaccaagaagtccatggagacccacatcatgcacaccttcaaggaggacttctatggagagatcctgaatgtggccatcgtgggctacctgcggcctgagaagaactttgacagcctggagagcctcatcagcgccatccagggcgacatcgaggaggccaagaagaggctggagctgcctgagcacctgaagatcaaggaggacaacttcttccaggtgtccaagagcaagatcatgaatggccactag

SEQ ID NO: 197934 - DNA, 468 bp, Artificial Sequence
  derived and/or modified sequence
atgcggcacctgccctacttctgccggggccaggtggtgcggggctttgggcgcgggtcgaagcaactggggattcctacggcgaactttcccgagcaagttgtcgataatctgccagctgatatttccacaggcatttactacggttgggctagcgtgggaagtggagacgtacacaaaatggtagtcagtatcggatggaacccgtactacaagaatactaaaaagtctatggagacacatattatgcatacctttaaggaagatttctacggcgaaatactgaatgtcgctatcgtgggctatctccgacccgagaaaaacttcgacagcctggaatcacttatcagtgcaatccagggcgatattgaggaggccaaaaagcgcttagagcttcctgagcatctgaagataaaggaggacaatttctttcaggtgagtaaatcaaaaatcatgaatggtcactag

SEQ ID NO: 197935 - DNA, 468 bp, Artificial Sequence
  derived and/or modified sequence
atgcgacacctgccctatttctgcaggggtcaggtggtcagagggtttggtagggggagcaagcagctgggaatccctacagctaattttccggaacaggtcgtcgacaacttacccgctgacatttccaccggcatatactacggctgggcgtccgtgggctccggcgatgtgcacaaaatggttgtttctattggatggaacccatattacaaaaataccaagaagagcatggaaacacatattatgcacacattcaaggaggatttttacggggagatcctcaacgtagctatagtggggtacttgcggcctgaaaagaattttgactccctcgaatctctgatatctgccatacagggtgacatcgaggaagccaagaaacgcctcgagctgccagagcatttgaaaataaaagaggataatttcttccaggtgagcaaaagtaagatcatgaatggccactag

SEQ ID NO: 197936 - DNA, 2684 bp, Artificial Sequence
  derived and/or modified sequence
aagggagcgcacgccggcggcgcggaggccggctctgcgcttcgggccgccccctccccccaccccgctcacacccggcacttacttcggctgtctccgctgccctccagcggagacgcagctcctcaggcgcccggcggtatttgttgggtcggcggcgtcagggattcgcagtggcctgtggtcggcgtcgtccggccactggtgcgcccccgcggcaggcagagctcacgctcctgtcccccggctggtccggggtctgggcgccgcgtcgacggcggctccgcaggacgcgcagaccgggccgcagcccattccccgagcggactgcattatgaggcacctgccttacttctgccggggtcaagtggtgcggggcttcggccgcggctccaagcagctgggcatccccacagctaattttcctgagcaagtggtagataatcttccagctgatatatccactggtatttactatggttgggccagtgttggaagtggagatgtccataagatggtggtgagcataggatggaacccatattacaagaatacgaagaagtctatggaaacacatatcatgcataccttcaaagaggacttctatggggaaatcctcaatgtggccattgttggctacctgagaccagaaaagaactttgattctttagagtcacttatttcagcaattcaaggtgatattgaagaagctaagaaacgactagagttaccagaacatttgaaaatcaaagaagacaatttcttccaggtttctaaaagcaaaataatgaatggccactgatgaaaaattgtattatttattcattcactgttttctagtgtttctgtgtttattactgttcagcatcatcttggttatatactgaaaatcaaacactttactacagttgtgaattagtttaaaccgtacaatgttgttatcatatcatgcttcaactattaaattaagcccatcatatcatagcactaaaaagattgagttaaaaataagatttaaaaaatatatattgattaaaatgtaccactagaaaggtattacatgtgtataagtatgggtaaaaaggcaagtcactagtttgagatgaaaactaaaattttcatggtaaaatgccagcatgtatgtacttgtgtagtgtgtacttctaaacagagaaggcttataaaagtaaatgcattaaggccaagtgcagtggctcacaccggtaatcccagcactttgggaggccgaggtgggaggattgcttgagctcatgagttcaagaccagcctgggcaacatagcgagactccatctctataaataaaaaaaaaggaaatgcattaaatagaaggttgatagtttatcataaacctgcggggaagaaactcagactttctatttttgatattttgtgcattaatacattacaaacatgaagatgtttgtaaagttttgttttagtcattttctttgcagtcacatcattgtaccaccttcattattgtatagagctgcttcaattctgagtcctctggacttcccctgcctatctgtttgttgttgttgttgaagacagtaaaataagtgttttcaaatctatatgtctcctttttgttggataatgtttcttctttttaatggtaaatattcttgttcttcaacatttttctttggttcttttttccttttttaggaaaaacaaaacaacagacttcatccttaggttttctcaagatttaagtgaacacatttacacatatcaatttcttaaagaacacaaaatgtttcctccctagcaaaactatttaagagccaattaaactatgaaatagttataaaattatttttaatatttaaggccttgaaattatattccaaggcaaatctaaatgggtgtagttgtatatgcacgatgtaatttaatgctaaagagtacttacagcttgagggaaaagcataaagttttagttaaatagccttcatactgtggatttttcctcctactaactaatatgtgggaaattaagattacagatgctttgggccccctcaaacagtacattgctacagttcactgtagcaacagatttggtggtgatggggggatagaggtagaagcagatagaaggtaattttaaagttaatttattatgaatcattttcccctaatctgcataaatgaattagaactgattttaataaaaatattctgtgtaaaaagtactcagaaaaacatctaaagctgttggagaagagggactcatataaatagttggattgcgttttgctttttatttctttataaaaatatgtcaaaaacagtttttaattttagaaatcttatacttgaaagaaacctcaattatcagtggctttatgaagtaaagttaaaaacaaacataggaaatgtgaaaatatttgtgtttgttttgtctgactaacttgctgctaaatgctatctttaggtgtgtgaaagttctttgatatgttattgtccttttacatcttgttaaatagccattgcttttgagaatcagatagtgtgttgtttaggggttaattgtgtctatatctttcaaaaacttttatattatgtattataagaagttacagtagtaccattttgattagtctgaatgttttcaggccttgaaataaattttgactaagtgatattttttctt

SEQ ID NO: 197937 - DNA, 468 bp, Artificial Sequence
  derived and/or modified sequence
atgagacacctgccctacttctgcagaggccaggtggtgagaggcttcggcagaggcagcaagcagctgggcatccccaccgccaacttccccgagcaggtggtggacaacctgcccgccgacatcagcaccggcatctactacggctgggccagcgtgggcagcggcgacgtgcacaagatggtggtgagcatcggctggaacccctactacaagaacaccaagaagagcatggagacccacatcatgcacaccttcaaggaggacttctacggcgagatcctgaacgtggccatcgtgggctacctgagacccgagaagaacttcgacagcctggagagcctgatcagcgccatccagggcgacatcgaggaggccaagaagagactggagctgcccgagcacctgaagatcaaggaggacaacttcttccaggtgagcaagagcaagatcatgaacggccactag

SEQ ID NO: 197938 - protein, 314 aa, Artificial Sequence
  derived and/or modified sequence
MSAAEAGGVFHRARGRTLAAFPAEKESEWKGPFYFILGADPQFGLIKAWSTGDCDNGGDEWEQEIRLTEQAVQAINKLNPKPKFFVLCGDLIHAMPGKPWRTEQTEDLKRVLRAVDRAIPLVLVSGNHDIGNTPTAETVEEFCRTWGDDYFSFWVGGVLFLVLNSQFYENPSKCPSLKQAQDQWLDEQLSIARQRHCQHAIVFQHIPLFLESIDEDDDYYFNLSKSTRKKLADKFIHAGVKVVFSGHYHRNAGGTYQNLDMVVSSAIGCQLGRDPHGLRVVVVTAEKIVHRYYSLDELSEKGIEDDLMDLIKKK

SEQ ID NO: 197939 - DNA, 945 bp, Artificial Sequence
  derived and/or modified sequence
atgagcgccgccgaggccggcggcgtgttccacagagccagaggcagaaccctggccgccttccccgccgagaaggagagcgagtggaagggccccttctacttcatcctgggcgccgacccccagttcggcctgatcaaggcctggagcaccggcgactgcgacaacggcggcgacgagtgggagcaggagatcagactgaccgagcaggccgtgcaggccatcaacaagctgaaccccaagcccaagttcttcgtgctgtgcggcgacctgatccacgccatgcccggcaagccctggagaaccgagcagaccgaggacctgaagagagtgctgagagccgtggacagagccatccccctggtgctggtgagcggcaaccacgacatcggcaacacccccaccgccgagaccgtggaggagttctgcagaacctggggcgacgactacttcagcttctgggtgggcggcgtgctgttcctggtgctgaacagccagttctacgagaaccccagcaagtgccccagcctgaagcaggcccaggaccagtggctggacgagcagctgagcatcgccagacagagacactgccagcacgccatcgtgttccagcacatccccctgttcctggagagcatcgacgaggacgacgactactacttcaacctgagcaagagcaccagaaagaagctggccgacaagttcatccacgccggcgtgaaggtggtgttcagcggccactaccacagaaacgccggcggcacctaccagaacctggacatggtggtgagcagcgccatcggctgccagctgggcagagacccccacggcctgagagtggtggtggtgaccgccgagaagatcgtgcacagatactacagcctggacgagctgagcgagaagggcatcgaggacgacctgatggacctgatcaagaagaagtag

SEQ ID NO: 197940 - DNA, 945 bp, Artificial Sequence
  derived and/or modified sequence
atgtctgccgcggaggcaggcggtgttttccacagggctcgggggcgtactctggcagcattcccagcagaaaaggagtctgagtggaagggccctttttacttcatactaggagctgatcctcagttcggtcttattaaggcatggtcaacgggcgattgtgacaatgggggagacgagtgggaacaggaaattcggctcactgagcaggcagtgcaggcaatcaacaagctgaatcctaaacctaaatttttcgtgctatgcggggacctgatccatgccatgccggggaaaccttggagaacagagcagaccgaggatttaaagcgggtgctgcgggcagtggaccgcgctatcccactagtcctcgtgtctggcaatcacgatatagggaacacgcctactgcagagaccgtcgaagagttctgtaggacatggggcgacgactacttctcgttttgggtgggaggagtgctcttcctggtgctgaatagccagttctacgaaaacccttccaaatgtccctctctcaagcaggcccaggaccagtggctggatgagcagctgtctatagcaagacagaggcactgccagcatgctatcgtttttcagcatatacctttattcctggagtctatcgatgaagacgatgactattatttcaacttatcgaaatctactagaaaaaaacttgccgataagtttattcacgctggcgtaaaagtggtgttcagtggtcactaccacagaaacgcgggaggaacataccagaacctggacatggtcgtgtcctcagccattggatgccagcttggccgtgacccacacggcctgcgcgtggtcgttgtgactgctgagaagattgtacaccgctactactcactggacgagctgtccgagaagggaatcgaagacgacctgatggacctgatcaaaaagaagtag

SEQ ID NO: 197941 - DNA, 945 bp, Artificial Sequence
  derived and/or modified sequence
atgtctgctgctgaggccggcggcgtcttccaccgggcccggggccgcaccctggccgccttccctgctgagaaggagagcgagtggaagggccccttctacttcatcctgggcgctgacccccagtttggcctcatcaaggcctggagcactggagactgtgacaatggaggagatgagtgggagcaggagatccggctgacagagcaggccgtgcaggccatcaacaagctgaaccccaagcccaagttctttgtgctgtgtggggacctgattcatgccatgcctgggaagccctggaggacagagcagacagaggacctgaagagggtgctgcgggctgtggaccgggccatccccctggtgctggtgtctggcaaccacgacatcggcaacacccccacagctgagaccgtggaggagttctgcaggacctggggagatgactacttctccttctgggtgggcggcgtgctcttcctggtgctgaacagccagttctatgagaaccccagcaaatgtcccagcctgaagcaggcccaggaccagtggctggatgagcagctgagcatcgcccggcagaggcactgccagcacgccatcgtgttccagcacatccccctcttcctggagagcattgatgaagatgatgactactacttcaacctgagcaagagcaccaggaagaagctggccgacaagttcatccacgccggcgtgaaggtggtgttttctggccactaccacagaaatgctgggggcacctaccagaacctggacatggtggtgtcctctgccatcggctgccagctgggccgggacccccacggcctgcgggtggtggtggtgacagctgagaagatcgtgcaccgctactacagcctggatgagctgtctgagaagggcattgaagatgacctgatggacctgatcaagaagaagtag

SEQ ID NO: 197942 - DNA, 945 bp, Artificial Sequence
  derived and/or modified sequence
atgagcgccgccgaggccggcggcgtgttccaccgggcccggggcaggacacttgccgcctttccggccgagaaggagtcagagtggaaaggccccttttacttcatactgggcgccgatcctcagtttggtctgatcaaagcctggtccacaggggactgtgacaacgggggagatgagtgggagcaggaaatccgtctgacagaacaggccgtacaggccattaataagctcaatccgaagcctaagttctttgtcctttgcggggacctcatccacgccatgcccgggaagccatggaggaccgagcagaccgaggacttgaaacgagtccttagggcagtcgatcgcgccattcctctggtgcttgtgtctggcaaccatgacatagggaatacccccaccgccgagacagttgaggagttctgccggacgtggggcgacgactatttttccttctgggtaggaggcgtacttttcctggttcttaatagccagttctatgaaaatccttcaaagtgtccctctctgaaacaggcccaagatcagtggttagatgagcagctttcgattgctcggcaacggcattgtcagcacgccatcgttttccagcacatcccacttttcctggagtcaatcgacgaagatgatgattattacttcaacttgtccaaatcaacaagaaaaaagctcgcggataagtttatccatgccggtgtgaaggtggtgttttctggtcactaccataggaacgccggagggacatatcaaaacctggatatggtggttagctctgccattgggtgccaactagggcgggacccccacgggctgcgagtcgtggtcgtgacagcggaaaaaattgttcatcgctactattcacttgacgagctgtctgagaagggaatcgaagatgacctcatggacttgatcaagaagaaatag

SEQ ID NO: 197943 - DNA, 945 bp, Artificial Sequence
  derived and/or modified sequence
atgtctgctgctgaagccggaggcgtgtttcacagggctcgtggcagaaccctggcagcttttcccgctgaaaaggagtctgaatggaagggccctttctatttcattctgggggctgacccacagttcggccttattaaggcctggtctacaggtgattgcgacaacggaggagatgaatgggaacaggaaatccgtctgactgagcaagcagtgcaagctatcaataagctgaatcccaagcctaagttctttgtcctctgtggcgatctcatccatgccatgccagggaaaccatggagaaccgaacaaacagaagatcttaagagagtcctgcgtgctgtggatcgggcaatccctctagtgttggtcagtggcaaccacgacattggcaacacccccaccgcagaaaccgtcgaggagttctgcagaacatggggggacgactatttctctttttgggtagggggagtcctgttcctggtgctcaatagccagttttacgaaaatccgagcaagtgtccctcgttgaagcaggcccaggaccagtggctggatgaacagctgagtattgctaggcagcgtcattgtcagcacgcaatcgtgttccaacatatccccctgttcctggagtctattgatgaagatgatgactactactttaatctttcgaaatcaacgcggaagaaactggcagataaatttatccatgccggtgtaaaggtagtgttctcaggtcactaccatagaaacgctggtggtacctatcagaacctcgacatggtggtttcttccgcaatcggttgccagctgggaagagacccccatggtctgagggtggtggttgttacggcagagaaaatcgtccatcgctactacagccttgacgaactctctgagaaaggcatagaagatgaccttatggatttgatcaagaaaaaatag

SEQ ID NO: 197944 - DNA, 2874 bp, Artificial Sequence
  derived and/or modified sequence
aaagggcgtcgcccaaagcgggacaggtccagcggttgttctgtgtgaagtcgcgcggcttccacccacgcagtgttctaagtgaaggccagaaactcgctcgccatgtcggctgcagaggcggggggtgttttccacagagccaggggcaggaccctggccgcgtttcccgcagaaaaggaaagcgaatggaaaggcccattctacttcatcctgggcgcagacccacagtttgggctgatcaaggcctggtccactggggactgtgacaatggcggtgacgaatgggaacaggagatccgtctaactgagcaagccgtccaggccatcaacaagctgaaccccaaacccaaattcttcgttctgtgcggcgacctcatccacgccatgccagggaagccgtggcggacggagcagacggaggacctgaagcgagtgcttagggcagtggacagggccatcccactggtccttgtcagcggcaaccatgacattggcaacacccccacggccgagaccgtcgaggagttctgccggacttggggagatgactacttcagcttctgggtcgggggcgtcctgttcctggtcctcaactcccagttctacgagaacccctccaaatgccccagcctgaagcaggctcaggaccagtggctggacgagcagctgagcatcgcgaggcagcggcactgccagcatgccatcgtcttccagcacatcccgctgttcctggagagcatcgacgaggacgacgactactacttcaacctcagcaagtccactcggaagaagttggcagacaagttcatccacgcaggtgtcaaagtcgtgttctcaggccactaccacaggaatgccgggggtacctaccagaacctcgacatggtggtgtcatctgccattggatgccagctgggcagagacccccacgggctccgagtcgtggtggtcaccgccgagaaaattgttcaccgatactacagtctagatgagctgagtgagaaaggaatagaagacgatctcatggatttgatcaagaaaaaatgacgctccttcccgttcccgttcacttttcacttgcactatttttttattttgccagaaacagcagctgcacacaacctcttgctgaaatataaaaatagcccaggcaggtttgtgaatttatgtccttttgcataaatcagagagctggggccctgtcctgaattatattcaaaatagaactgcatttcctttaaaatggagcgaatgatcctggaaatcagtttttaaaatattagactatctctgcatggatgtttgaataaattctcctaatgctgtgtttctcaactccacttttgaattggattgtattctggttagcatatggtcaaagtctgcctatcgacctcaattccaatctgacagccaagtatgatctttgataattccttaaacaaactacacctgattgtattaaattgtggtcacgattcccaaaacgctaggcaaaacaaagttcatctcctttcctttccagcggaacgaacagctgtctcccttgttgtgagagccatgcagacttattttgacaaggagccaagtaggcaccatttactgttcaattctgagacttctgatgataggaacagaatgcagttgatacagctcggagcttaaatttgccttcctgggtgcctagaaaagtcacctttgcacataaattggccatttctgaaaatctcctccaagagactgaaaccaaagctctaaaacgccgcttcttcagtctctggggagcacgttgagttggttcacatccacattctggctgtgtagccactccacagatgggtggtctcttgggatcagaatgcccctccactcatgagactcttcattttgtccactttgacaggaaaagtgggaatgtatgcagagctctcaaaagaaacaaaaaaggccaaaacggtgccttcagccacatcctctgaattggccctgacttggactaaatgcactaatgcaaaatcccttgacaaaagcgcataggttatttcaaaccagcattgttttttatgtaacctgttttaccgcatcttctcagcagcttctgaccactgctcaattttctcctttacagccattgttctggtggacaaataacctaggtactccaaatcctggcaggaaaaatatacagcattatgaaacagcactcagtaatcctaaaatgatttccaaagctggttacacatgacctgcaaagtctattaaattaaaagactttctcattacagagtttagtcaacgtagcaaaaccatgggaaattaaatggaaagataattaaatatgtaaattcataaggaacaaaagacgagaagttaattatacaataggctggtgacaccagagttcattgttatgtgccacaagaaaattaaattttttaaaaaactagaacgctcttcttttagtgttttgctgaaatcctgttttgtatttgtttctttacaacaggtgtaggtataggaggtcaagaaaaggagttcggtaaagggcatagctaataacaaccacacattgggccaggcacagtggcttacgcctgtaatcccagcactttgggaggctgagacgggcagatcacctgagatcaggagtttgagaacagcctggccaacatggtgaaactccatctctactaaaaatacaaaaattagccaggcatgctggtgcacacctgtaatcccagctactcgggaggctgaggcaggagatcgctggaactcaggaggcagaggttgcagtgagccaagatcatgccactgcactccagcctgggcaacagagcaagactctgtctcaaaaaaaaaaaaaaaaaa

SEQ ID NO: 197945 - protein, 678 aa, Artificial Sequence
  derived and/or modified sequence
MEVLIGDPITTCLSPSVYDIICNLGFQLRENCDINSIVTQNGEVCWKTITDCVSYTESEQGLDYWGSVRLLGPVCEAVHSHFLSLTKGQFEIRYAPWFQWTSFPELFPEIFDALESLQSPAISLSLMKLTSCLERALGDVFLLIGKECPFLLRDLLSSEELAQVFSQSVMNVLKVFVGSPCGLNLRNVLWHGFASPEEIPPKYCSMMILLTAGLGQLLKSYLQNTKLTLAHRSFISLTNLEDLIVFPDVTYEVLSVLEEVMMKSAFILKIMLPYWEVALVKFKSHRFADCAILLLTQLETGLRNVFATLNRCPKRLLTAESTALYTTFDQILAKHLNDGKINQLPLFLGEPAMEFLWDFLNHQEGPRIRDHLSHGEINLHEFSKETTNQLLAFSLVLLLRFVDDCLLSVFKEKSAVELLISLAEGYSSRCHPVFQLKKQVLSCEESIRVWALLPFPEELTRQAVRLEDNSETNACHSLITKMTDELYHHMPENRCVLKDLDRLPTETWPQLLRELCSTPVPTLFCPRIVLEVLVVLRSISEQCRRVSSQVTVASELRHRQWVERTLRSRQRQNYLRMWSSIRLLSPVLSLILLLIALELVNIHAVCGKNAHEYQQYLKFVKSILQYTENLVAYTSYEKNKWNETINLTHTALLKMWTFSEKKQMLIHLAKKSTSKVLL

SEQ ID NO: 197946 - DNA, 2141 bp, Artificial Sequence
  derived and/or modified sequence
attcacgcgcgccgcagcggggcaccggaagttatggaggtattaataggggaccctattaccacatgtctttctccctcagtgtatgatataatttgtaatcttgggtttcaactcagagaaaattgtgatatcaatagcattgtaactcagaatggtgaagtatgctggaaaacaatcacagactgtgtgagctacacagagtcagagcagggtctggattactggggaagcgtgaggctgctgggccctgtgtgtgaggctgtccattcacatttcttatctctgaccaaggggcaatttgaaattcgatatgcaccgtggttccagtggacaagttttccagagttatttcctgaaatatttgatgccttggaaagtctacaatctcctgctatttctcttagcttaatgaaactgacatcgtgtctagaacgagccttgggtgatgtatttttactgattgggaaggaatgcccctttcttttaagagatctgctttcatctgaggagcttgctcaagtcttcagtcagtctgtgatgaatgtgctaaaagtcttcgttggctctccgtgtggtctcaacctgcgtaacgtcttatggcatgggtttgcgtcacctgaagaaattcctccaaaatactgttcaatgatgatactgttgacggcaggattgggtcagttactgaagagttaccttcaaaacactaaacttacattggcacatcgctctttcatatctcttacaaacctcgaggatttgattgtttttcctgatgttacttatgaggtgctttcagtattagaagaagtgatgatgaaatctgcttttatattaaaaatcatgttaccatattgggaagttgcactggtcaagttcaagtcacacaggtttgctgactgcgccatattgttgctgacacaactggagactggacttaggaatgtttttgccacacttaacagatgtccaaaaagactcctgactgctgagtcaacagctctttataccacctttgatcaaatattggcaaaacacttgaatgatggtaaaatcaatcagcttcctcttttccttggagagcctgctatggaatttctctgggatttcctgaaccatcaggagggtccccgcataagagatcatttaagccacggggagatcaacttacatgaattttcaaaagaaacaactaatcagttgcttgcattttctcttgtactgctactcagattcgttgatgactgtctgctatcagtttttaaggaaaaatcagccgtagaattgttgattagtcttgcagaaggctatagttctcgctgtcatccggtttttcagcttaaaaaacaggtgctgagctgtgaggagagcatcagggtttgggctctgctgcctttccccgaagaactcactcggcaagccgtcagattagaagataattctgaaacaaatgcctgccactctttgattacaaaaatgacggatgagctgtatcaccatatgcctgagaatcgttgtgtgttaaaggacttggatcgtcttcctactgagacgtggccccagcttctccgtgagctctgcagcacacctgttcccaccctgttctgccccaggattgtgctggaagtgctggttgtgctccgaagcatcagcgaacagtgccgccgtgtgtccagccaggtcaccgttgcctcagagctgagacacaggcagtgggtggaaaggacgctgcggtctcgccagcggcagaactacctgcgtatgtggagtagtatcagactactgtcccctgtgctcagcctgatactgttactcattgcgctggagttggtcaacattcatgctgtttgtgggaagaatgcgcatgagtatcagcagtacctaaagtttgtaaagtcgatcttgcagtacacggagaacctggtggcttacaccagttacgaaaagaacaagtggaatgaaactatcaatcttacacatacagctttgttgaaaatgtggacttttagtgagaagaaacaaatgttaatacatttagccaagaaatccacaagtaaagtactcttatgaaaacttgtaagtcaggatgcttttaattttaacagattttaacagcgtgtaaattaaaaacccaaagacag

SEQ ID NO: 197947 - DNA, 1908 bp, Artificial Sequence
  derived and/or modified sequence
attcacgcgcgccgcagcggggcaccggaagttatggagagcagggtctggattactggggaagcgtgaggctgctgggccctgtgtgtgaggctgtccattcacatttcttatctctgaccaaggggcaatttgaaattcgatatgcaccgtggttccagtggacaagttttccagagttatttcctgaaatatttgatgccttggaaagtctacaatctcctgctatttctcttagcttaatgaaactgacatcgtgtctagaacgagccttgggtgatgtatttttactgattgggaaggaatgcccctttcttttaagagatctgctttcatctgaggagcttgctcaagtcttcagtcagtctgtgatgaatgtgctaaaagtcttcgttggctctccgtgtggtctcaacctgcgtaacgtcttatggcatgggtttgcgtcacctgaagaaattcctccaaaatactgttcaatgatgatactgttgacggcaggattgggtcagttactgaagagttaccttcaaaacactaaacttacattggcacatcgctctttcatatctcttacaaacctcgaggatttgattgtttttcctgatgttacttatgaggtgctttcagtattagaagaagtgatgatgaaatctgcttttatattaaaaatcatgttaccatattgggaagttgcactggtcaagttcaagtcacacaggtttgctgactgcgccatattgttgctgacacaactggagactggacttaggaatgtttttgccacacttaacagatgtccaaaaagactcctgactgctgagtcaacagctctttataccacctttgatcaaatattggcaaaacacttgaatgatggtaaaatcaatcagcttcctcttttccttggagagcctgctatggaatttctctgggatttcctgaaccatcaggagggtccccgcataagagatcatttaagccacggggagatcaacttacatgaattttcaaaagaaacaactaatcagttgcttgcattttctcttgtactgctactcagattcgttgatgactgtctgctatcagtttttaaggaaaaatcagccgtagaattgttgattagtcttgcagaaggctatagttctcgctgtcatccggtttttcagcttaaaaaacaggtgctgagctgtgaggagagcatcagggtttgggctctgctgcctttccccgaagaactcactcggcaagccgtcagattagaagataattctgaaacaaatgcctgccactctttgattacaaaaatgacggatgagctgtatcaccatatgcctgagaatcgttgtgtgttaaaggacttggatcgtcttcctactgagacgtggccccagcttctccgtgagctctgcagcacacctgttcccaccctgttctgccccaggattgtgctggaagtgctggttgtgctccgaagcatcagcgaacagtgccgccgtgtgtccagccaggtcaccgttgcctcagagctgagacacaggcagtgggtggaaaggacgctgcggtctcgccagcggcagaactacctgcgtatgtggagtagtatcagactactgtcccctgtgctcagcctgatactgttactcattgcgctggagttggtcaacattcatgctgtttgtgggaagaatgcgcatgagtatcagcagtacctaaagtttgtaaagtcgatcttgcagtacacggagaacctggtggcttacaccagttacgaaaagaacaagtggaatgaaactatcaatcttacacatacagctttgttgaaaatgtggacttttagtgagaagaaacaaatgttaatacatttagccaagaaatccacaagtaaagtactcttatgaaaacttg

SEQ ID NO: 197948 - DNA, 2037 bp, Artificial Sequence
  derived and/or modified sequence
atggaggtgctgatcggcgaccccatcaccacctgcctgagccccagcgtgtacgacatcatctgcaacctgggcttccagctgagagagaactgcgacatcaacagcatcgtgacccagaacggcgaggtgtgctggaagaccatcaccgactgcgtgagctacaccgagagcgagcagggcctggactactggggcagcgtgagactgctgggccccgtgtgcgaggccgtgcacagccacttcctgagcctgaccaagggccagttcgagatcagatacgccccctggttccagtggaccagcttccccgagctgttccccgagatcttcgacgccctggagagcctgcagagccccgccatcagcctgagcctgatgaagctgaccagctgcctggagagagccctgggcgacgtgttcctgctgatcggcaaggagtgccccttcctgctgagagacctgctgagcagcgaggagctggcccaggtgttcagccagagcgtgatgaacgtgctgaaggtgttcgtgggcagcccctgcggcctgaacctgagaaacgtgctgtggcacggcttcgccagccccgaggagatcccccccaagtactgcagcatgatgatcctgctgaccgccggcctgggccagctgctgaagagctacctgcagaacaccaagctgaccctggcccacagaagcttcatcagcctgaccaacctggaggacctgatcgtgttccccgacgtgacctacgaggtgctgagcgtgctggaggaggtgatgatgaagagcgccttcatcctgaagatcatgctgccctactgggaggtggccctggtgaagttcaagagccacagattcgccgactgcgccatcctgctgctgacccagctggagaccggcctgagaaacgtgttcgccaccctgaacagatgccccaagagactgctgaccgccgagagcaccgccctgtacaccaccttcgaccagatcctggccaagcacctgaacgacggcaagatcaaccagctgcccctgttcctgggcgagcccgccatggagttcctgtgggacttcctgaaccaccaggagggccccagaatcagagaccacctgagccacggcgagatcaacctgcacgagttcagcaaggagaccaccaaccagctgctggccttcagcctggtgctgctgctgagattcgtggacgactgcctgctgagcgtgttcaaggagaagagcgccgtggagctgctgatcagcctggccgagggctacagcagcagatgccaccccgtgttccagctgaagaagcaggtgctgagctgcgaggagagcatcagagtgtgggccctgctgcccttccccgaggagctgaccagacaggccgtgagactggaggacaacagcgagaccaacgcctgccacagcctgatcaccaagatgaccgacgagctgtaccaccacatgcccgagaacagatgcgtgctgaaggacctggacagactgcccaccgagacctggccccagctgctgagagagctgtgcagcacccccgtgcccaccctgttctgccccagaatcgtgctggaggtgctggtggtgctgagaagcatcagcgagcagtgcagaagagtgagcagccaggtgaccgtggccagcgagctgagacacagacagtgggtggagagaaccctgagaagcagacagagacagaactacctgagaatgtggagcagcatcagactgctgagccccgtgctgagcctgatcctgctgctgatcgccctggagctggtgaacatccacgccgtgtgcggcaagaacgcccacgagtaccagcagtacctgaagttcgtgaagagcatcctgcagtacaccgagaacctggtggcctacaccagctacgagaagaacaagtggaacgagaccatcaacctgacccacaccgccctgctgaagatgtggaccttcagcgagaagaagcagatgctgatccacctggccaagaagagcaccagcaaggtgctgctgtag

SEQ ID NO: 197949 - DNA, 2037 bp, Artificial Sequence
  derived and/or modified sequence
atggaagtgctcatcggggaccctatcacaacctgcctgtccccatctgtgtacgacatcatttgcaatctcggttttcaacttcgggagaattgcgatattaattcaatcgtgacacagaacggtgaggtttgctggaagactattactgactgcgtgtcctacaccgagtctgaacagggactcgattactgggggtccgtaagactgttaggccccgtgtgcgaggctgtccatagtcatttcctgtctctgaccaaaggtcagtttgagattcgctatgcaccgtggttccagtggacttcgttccccgaactctttcccgagatcttcgacgctcttgagtccttgcagtcccctgccatttccctctctctcatgaagctgacttcctgtttggagcgcgcactcggcgatgttttcttgctgatagggaaagagtgtccgttcttactgcgtgacctgctgagcagcgaggagctcgcccaggtgttctcccagtccgtgatgaatgttctgaaagtcttcgtaggcagcccctgtggactcaatctccgaaacgttctctggcatgggttcgcatctccagaggagattccgccaaaatactgctctatgatgatcttgttgacagctgggcttgggcaactcctgaaatcctacttgcagaataccaaacttaccctggcccaccgcagcttcatctctctcaccaacttggaagacctgatcgtgtttcccgacgtcacttacgaggtcttgagcgtgttggaagaggttatgatgaagtccgcattcattctgaagatcatgcttccatattgggaagtggccctggttaagtttaagtcacatcgctttgcagattgcgcgatcctgttgctgacacagcttgaaaccgggctaagaaacgtctttgccacactgaatcggtgccccaagaggttgctcaccgctgaatcaactgccctttatacaaccttcgatcagattctggctaaacatttgaatgacgggaaaattaatcaactgcccctgttcttaggagagcctgcgatggaatttctgtgggatttcctcaatcaccaggaggggccgcgaatccgcgatcacttaagtcacggggagatcaacctacacgaattctccaaggagacaactaatcaattgctagccttctcacttgttctgctgctacgttttgtggatgattgtctcctgtcagtgttcaaggagaagtcagccgtcgaactgttaattagcctcgcagaaggatatagttccagatgtcatcctgttttccagctgaaaaaacaagtgctatcttgtgaagaatcaatcagagtttgggcattgttgccttttcctgaagagctcactcgacaagccgtgcgcttagaagacaattctgaaaccaatgcgtgccacagtctcattaccaagatgacagacgaactctaccaccacatgccagaaaatagatgtgtgctgaaagatctggaccgcttacccactgagacgtggccccaattgctgcgagagttatgttcaacacccgtgcccaccctgttttgcccgcgtatcgtgctcgaagtgttagtggtgcttcgcagcatctcagaacagtgtcggagagtctcgtcccaggtgaccgttgcttctgaactcaggcaccgccagtgggtggaacggaccctaaggagccggcaacgccagaattacctcaggatgtggtcctcaatcaggctcttatcacccgtcctgtctctgatcctattactgatcgcattggagctcgtgaacatccatgcagtttgcggaaaaaatgcacatgaatatcaacagtatctcaaattcgtcaagtcaatcctccagtataccgagaacctggtggcctatacttcctacgagaagaacaagtggaatgagacaatcaatttaacccacaccgctctcttgaagatgtggacattcagcgagaagaaacagatgctcattcacctcgccaaaaagtcaaccagcaaggttctgctctag

SEQ ID NO: 197950 - DNA, 2037 bp, Artificial Sequence
  derived and/or modified sequence
atggaggtgctgattggagaccccatcaccacctgcctgagccccagcgtgtatgacatcatctgcaacctgggcttccagctgcgggagaactgtgacatcaacagcatcgtgacccagaatggagaggtgtgctggaagaccatcacagactgtgtgtcctacacagagagcgagcagggcctggactactggggctctgtgcggctgctgggccctgtgtgtgaggccgtgcacagccacttcctgagcctgaccaagggccagtttgagatccgctatgccccctggttccagtggaccagcttccctgagctgtttcctgagatctttgatgccctggagagcctgcagagccctgccatcagcctgagcctgatgaagctgaccagctgcctggagcgggccctgggagatgtgttcctgctgattggcaaggaatgtcccttcctgctgcgggacctgctgagcagcgaggagctggcccaggtgttcagccagagcgtgatgaatgtgctgaaggtgtttgtgggcagcccctgtggcctgaacctgagaaatgtgctgtggcacggctttgccagccctgaggagatcccccccaagtactgcagcatgatgatcctgctgacagctggcctgggccagctgctgaagagctacctgcagaacaccaagctgaccctggcccaccgctccttcatcagcctgaccaacctggaggacctgattgtgtttcctgatgtgacctatgaggtgctgtctgtgctggaggaggtgatgatgaagagcgccttcatcctgaagatcatgctgccctactgggaggtggccctggtgaagttcaagagccacagatttgctgactgtgccatcctgctgctgacccagctggagaccggcctgagaaatgtgtttgccaccctgaaccgctgccccaagaggctgctgacagctgagagcacagccctgtacaccacctttgaccagatcctggccaagcacctgaatgatggcaagatcaaccagctgcccctcttcctgggggagcccgccatggagttcctgtgggacttcctgaaccaccaggagggcccccgcatccgggaccacctgagccacggggagatcaacctgcacgagttcagcaaggagaccaccaaccagctgctggccttcagcctggtgctgctgctgcgctttgtggatgactgcctgctgagcgtcttcaaggagaagtctgctgtggagctgctgatcagcctggccgagggctacagcagccgctgccaccctgtgttccagctgaagaagcaggtgctgagctgtgaggagagcatccgggtgtgggccctgctgcccttccctgaggagctgacccggcaggccgtgcggctggaggacaacagcgagaccaatgcctgccacagcctcatcaccaagatgacagatgagctgtaccaccacatgcctgagaacagatgtgtgctgaaggacctggaccggctgcccacagagacctggccccagctgctgcgggagctgtgcagcacccctgtgcccaccctcttctgcccccgcatcgtgctggaggtgctggtggtgctgcggagcatcagcgagcagtgccggcgggtgagcagccaggtgacagtggccagcgagctgcggcaccggcagtgggtggagaggaccctgcggagccggcagaggcagaactacctgaggatgtggagcagcatccggctgctgagccctgtgctgagcctcatcctgctgctgattgccctggagctggtgaacatccatgctgtgtgtgggaagaatgcccacgagtaccagcagtacctgaagtttgtgaagagcatcctgcagtacacagagaacctggtggcctacaccagctatgagaagaacaagtggaatgagaccatcaacctgacccacacagccctgctgaagatgtggaccttcagcgagaagaagcagatgctgatccacctggccaagaagagcaccagcaaggtgctgctgtag

SEQ ID NO: 197951 - DNA, 2037 bp, Artificial Sequence
  derived and/or modified sequence
atggaggtgctgatcggcgaccccatcaccacctgcctgagccccagcgtctacgatataatctgcaacctggggttccagctacgggagaactgcgatatcaattctattgtcacgcaaaatggcgaggtctgttggaagaccatcaccgattgcgtcagctataccgaaagtgagcaggggctcgactattggggcagcgtgcggctgctcggcccagtatgcgaagcagtgcattctcatttcttgtctctgacaaaaggccaatttgaaatccggtacgctccttggtttcagtggaccagctttcctgaactgttccccgagatcttcgatgctcttgaatccctgcaatcacctgcaatttcactgtctctcatgaagctgacttcatgtctggagcgagcgctgggcgacgtgttcttgttaattggtaaagagtgtccattccttctgcgcgatttgctcagtagcgaagagcttgctcaggtgttcagccagtccgtgatgaatgtactcaaggtgtttgtggggtctccctgtggcttaaacctgcggaacgttttatggcacgggttcgcttcccccgaggagatccctcccaagtactgctcaatgatgattctgctcaccgcaggactggggcagctgctcaagtcctaccttcagaacaccaagcttactctagcacatagaagtttcatatctctcaccaacctggaagatctgattgtcttcccagacgtaacatatgaagttctgtctgtccttgaggaggtgatgatgaagagtgcctttattctgaaaatcatgttaccttactgggaagtcgctcttgtaaagttcaagtcccatcgatttgccgactgcgccatccttctgctgacccagctggagactggactaaggaatgtctttgctactttaaatcgctgccccaaacgcctgctgaccgctgaatccaccgccctgtatactacattcgaccagattctcgccaaacacctgaatgatggcaaaatcaatcagctaccactctttttgggagagcccgctatggaattcctgtgggacttccttaatcaccaggaaggacctcgcatccgtgaccatctttcccacggcgaaatcaacctccatgaattcagtaaggagacaacaaaccaactcctcgccttcagtttggtgctccttcttcgattcgtggacgattgcctgctatcagtgttcaaggagaagagtgcagtagagttgctgatcagtctagcggaaggctactcgtcacgatgccatcccgtgtttcagcttaaaaagcaagtgctgtcctgtgaagaaagtattcgtgtgtgggcactgctgcctttccctgaggaactgacccgtcaggctgtgcggttggaagacaactcggagaccaatgcatgccacagccttattacaaagatgacagacgaattatatcaccacatgcctgaaaaccgctgtgtcctgaaggaccttgacagactgccaactgaaacttggcctcaactccttcgggagttgtgctcaaccccggtgccaacactcttctgccctcggatagtactggaagtgctcgtagttctccggagtatcagtgagcagtgtcgccgcgttagctcccaggttaccgtagccagcgaacttcgccaccggcagtgggtcgaacgcacgctgaggtcccgccagcgacagaactatctccgcatgtggtcctcgatccgactgctcagtcccgtcctttctttgattctactcctgattgcattggagttggtcaatatccacgccgtttgcgggaagaatgcccacgaataccagcagtacctgaaattcgtcaagagtatcctgcagtacactgaaaatctggtcgcctacacctcatacgagaaaaacaaatggaatgaaacaattaatcttacgcacacagccctgctgaagatgtggacgttttccgaaaaaaagcagatgctcatccatctggccaagaagtcaacatccaaagtcttactctag

SEQ ID NO: 197952 - DNA, 2037 bp, Artificial Sequence
  derived and/or modified sequence
atggaggtcctgatcggggacccaattacaacctgtctgtcaccttccgtatatgacatcatctgcaatcttggcttccagttgagagaaaactgcgacattaactcaattgttactcaaaacggagaggtctgctggaaaacaattaccgactgtgtctcatatactgagtccgaacaggggctggactattggggctccgtgcggttgcttggcccagtgtgtgaggcagtgcacagccactttctcagtttgacaaagggacagttcgagatcagatacgcaccttggttccagtggacctcctttcccgaactgttccctgagatcttcgacgcacttgagtccctccagtcccccgctatttcgctgagcctgatgaaactgacaagctgcttagagcgggctctaggagacgtgtttctgctgatcggcaaagaatgcccgttcctactgcgcgacctactgtcctccgaggaacttgctcaggtgttttcacagagcgtaatgaacgtcctgaaagtgttcgtggggagcccatgcggattgaatctccggaacgtgctgtggcatggctttgcaagtcccgaggagatcccacccaagtattgttctatgatgatattgttgaccgctggcttaggacaactcctgaagtcatatttgcagaacacaaaactgactctagcccacagatcttttatttcattgactaacctcgaggatttgatcgtctttcctgacgtcacttatgaggttctgagcgtcctggaagaggtcatgatgaaaagcgctttcattctcaaaattatgctgccatattgggaggttgccctcgtaaaattcaagtcacaccggttcgccgactgcgccatccttctcctcacccagctcgagactgggttgcgaaacgtgttcgcaaccctgaatagatgcccgaagaggctactcactgccgagtctactgccttgtacaccacctttgaccagatccttgctaaacacctgaacgacgggaagatcaaccaactgcctctgtttctaggtgagcctgccatggaattcctctgggactttctcaaccaccaggaaggacccaggataagagatcacctgagccatggagagatcaatctgcacgaattttccaaagagacaactaaccagctgctggcatttagtcttgtcctccttctccgtttcgtcgatgactgtctgctgtctgttttcaaagaaaagtccgctgtggagctattgataagcctggcggaggggtatagtagtagatgtcatcccgtgttccagctaaagaaacaggtgttgtcttgtgaggagagtattagggtgtgggcgcttttgccctttcctgaggagctgacccggcaagccgtaagactggaagacaactctgaaaccaacgcatgtcacagcttaatcacaaagatgacagacgaattgtaccatcatatgcccgagaaccggtgcgtgttaaaggaccttgatcgactgcctaccgaaacatggcctcagttgctccgggaactgtgttcgaccccagtcccaacccttttttgcccccgaatagtgttggaggtgctggtggtgctaagaagtatttcagaacagtgtaggagagtcagcagccaggtaaccgtggcttcagagctgagacaccgccagtgggttgaaagaacactgaggtcacgccagcgtcagaactatctgaggatgtggtctagtatccgtttactctccccagtgttgtcactgatcctactgctgatcgccttggaacttgtcaacattcacgcggtctgcgggaagaacgctcacgaataccagcagtacctcaaatttgtcaagtctatactacagtatactgaaaacctcgtagcctacaccagctatgaaaaaaacaagtggaacgaaactatcaatctgacccatacagctttgttaaagatgtggacattcagtgagaaaaagcagatgctcatccatctagccaagaagtctacctcaaaagtgctcttgtag

SEQ ID NO: 197953 - DNA, 87 bp, Artificial Sequence
  derived and/or modified sequence
atggacctcgctagcgagatcacctcagccactcagacatcttcactatgctcaagcgggcgaggccacgccggctaccccgcctag

SEQ ID NO: 197954 - protein, 552 aa, Artificial Sequence
  derived and/or modified sequence
MGKVNVAKLRYMSRDDFRVLTAVEMGMKNHEIVPGSLIASIASLKHGGCNKVLRELVKHKLIAWERTKTVQGYRLTNAGYDYLALKTLSSRQVVESVGNQMGVGKESDIYIVANEEGQQFALKLHRLGRTSFRNLKNKRDYHKHRHNVSWLYLSRLSAMKEFAYMKALYERKFPVPKPIDYNRHAVVMELINGYPLCQIHHVEDPASVYDEAMELIVKLANHGLIHGDFNEFNLILDESDHITMIDFPQMVSTSHPNAEWYFDRDVKCIKDFFMKRFSYESELFPTFKDIRREDTLDVEVSASGYTKEMQADDELLHPLGPDDKNIETKEGSEFSFSDGEVAEKAEVYGSENESERNCLEESEGCYCRSSGDPEQIKEDSLSEESADARSFEMTEFNQALEEIKGQVVENNSVTEFSEEKNRTENYNRQDGQRVQGGVPAGSDEYEDECPHLIALSSLNREFRPFRDEENVGAMNQYRTRTLSITSSGSAVSCSTIPPELVKQKVKRQLTKQQKSAVRRRLQKGEANIFTKQRRENMQNIKSSLEAASFWGE

SEQ ID NO: 197955 - DNA, 1659 bp, Artificial Sequence
  derived and/or modified sequence
atgggcaaggtgaacgtggccaagctgagatacatgagcagagacgacttcagagtgctgaccgccgtggagatgggcatgaagaaccacgagatcgtgcccggcagcctgatcgccagcatcgccagcctgaagcacggcggctgcaacaaggtgctgagagagctggtgaagcacaagctgatcgcctgggagagaaccaagaccgtgcagggctacagactgaccaacgccggctacgactacctggccctgaagaccctgagcagcagacaggtggtggagagcgtgggcaaccagatgggcgtgggcaaggagagcgacatctacatcgtggccaacgaggagggccagcagttcgccctgaagctgcacagactgggcagaaccagcttcagaaacctgaagaacaagagagactaccacaagcacagacacaacgtgagctggctgtacctgagcagactgagcgccatgaaggagttcgcctacatgaaggccctgtacgagagaaagttccccgtgcccaagcccatcgactacaacagacacgccgtggtgatggagctgatcaacggctaccccctgtgccagatccaccacgtggaggaccccgccagcgtgtacgacgaggccatggagctgatcgtgaagctggccaaccacggcctgatccacggcgacttcaacgagttcaacctgatcctggacgagagcgaccacatcaccatgatcgacttcccccagatggtgagcaccagccaccccaacgccgagtggtacttcgacagagacgtgaagtgcatcaaggacttcttcatgaagagattcagctacgagagcgagctgttccccaccttcaaggacatcagaagagaggacaccctggacgtggaggtgagcgccagcggctacaccaaggagatgcaggccgacgacgagctgctgcaccccctgggccccgacgacaagaacatcgagaccaaggagggcagcgagttcagcttcagcgacggcgaggtggccgagaaggccgaggtgtacggcagcgagaacgagagcgagagaaactgcctggaggagagcgagggctgctactgcagaagcagcggcgaccccgagcagatcaaggaggacagcctgagcgaggagagcgccgacgccagaagcttcgagatgaccgagttcaaccaggccctggaggagatcaagggccaggtggtggagaacaacagcgtgaccgagttcagcgaggagaagaacagaaccgagaactacaacagacaggacggccagagagtgcagggcggcgtgcccgccggcagcgacgagtacgaggacgagtgcccccacctgatcgccctgagcagcctgaacagagagttcagacccttcagagacgaggagaacgtgggcgccatgaaccagtacagaaccagaaccctgagcatcaccagcagcggcagcgccgtgagctgcagcaccatcccccccgagctggtgaagcagaaggtgaagagacagctgaccaagcagcagaagagcgccgtgagaagaagactgcagaagggcgaggccaacatcttcaccaagcagagaagagagaacatgcagaacatcaagagcagcctggaggccgccagcttctggggcgagtag

SEQ ID NO: 197956 - DNA, 1659 bp, Artificial Sequence
  derived and/or modified sequence
atgggcaaggtaaacgtggcaaaacttagatatatgtctcgcgacgactttcgcgtgttgactgcagtagaaatggggatgaaaaaccatgagattgtccccggctcactaatagcctccatcgcttcactgaagcatggtggctgtaacaaggttctccgcgaactagttaagcataagctcattgcttgggaacgcactaagacagtgcaagggtaccgtctgacaaatgccggctacgattacttagcgctcaagactctgagtagccggcaagtagtggaatccgtgggtaaccagatgggggtggggaaggagtctgatatctacatcgtggccaacgaggaaggtcaacagtttgctcttaagcttcaccggctgggccgaacaagctttcgcaatctgaagaacaaacgcgattatcataagcatcgccacaacgtgtcctggttgtacctaagcagactgagcgcaatgaaggagtttgcctacatgaaagccctctatgaaagaaagtttcccgtgcctaaacctattgattataatagacatgctgtggtgatggagctgatcaacgggtacccgctctgccagatccaccacgtggaggatccagcctctgtttatgatgaggccatggaactgattgtaaaactcgcaaaccacggcctcatacacggcgacttcaatgaatttaacctgattctggacgagtcagatcacattactatgatcgacttcccccagatggtctcgacttcacaccccaatgcagagtggtattttgatagggacgttaaatgtattaaagactttttcatgaaacggttctcgtacgagagcgagctgttccctacattcaaagatattcggagagaggacaccctggacgtcgaggtgtccgcctcaggctataccaaagaaatgcaggctgacgacgagctgttgcacccactcggccctgatgacaaaaacatcgaaacaaaagagggaagcgaatttagcttttctgatggggaggtggccgaaaaggccgaggtttatggcagtgaaaacgagagcgagcgaaactgcctagaggaatcagaaggttgctactgccgcagcagtggagacccagagcagatcaaggaagactcattgtctgaagagagtgctgatgcccgttctttcgagatgacagagtttaatcaagcgctggaggagattaaaggtcaggtggtcgagaacaattccgttactgagttcagtgaggaaaagaatcgcaccgagaattacaaccggcaggacggacagcgagtccagggcggagtccccgccggctctgacgaatacgaagacgaatgcccccacctgatcgcattaagtagtctgaatagagagttcagaccatttagagacgaagaaaatgtgggcgcgatgaaccaatatcggacgagaacgctctcaatcacaagcagtggcagtgctgtctcatgctcaaccattccacccgagcttgtgaagcagaaggtgaagagacaattgactaagcagcaaaagagcgcggttagaagacgcctgcaaaagggggaagccaatatcttcaccaaacagagaagggagaacatgcaaaacatcaagagcagtctcgaggccgcatctttctggggcgagtag

SEQ ID NO: 197957 - DNA, 1659 bp, Artificial Sequence
  derived and/or modified sequence
atgggcaaggtgaatgtggccaagctgcgctacatgagcagagatgacttccgggtgctgacagctgtggagatgggcatgaagaaccacgagatcgtgcccggcagcctcatcgccagcatcgccagcctgaagcacggcggctgcaacaaggtgctgcgggagctggtgaagcacaagctgattgcctgggagaggaccaagacagtgcagggctaccgcctgaccaatgccggctatgactacctggccctgaagaccctgagcagccggcaggtggtggagagcgtgggcaaccagatgggcgtgggcaaggagagtgacatctacatcgtggccaatgaggagggccagcagtttgccctgaagctgcaccggctgggccgcaccagcttcaggaacctgaagaacaagagggactaccacaagcaccgccacaacgtgtcctggctgtacctgagccggctgagcgccatgaaggagtttgcctacatgaaggccctgtatgaaaggaagtttcctgtgcccaagcccatcgactacaacagacatgctgtggtgatggagctgatcaatggctaccccctgtgccagatccaccacgtggaggaccctgcctctgtgtatgatgaggccatggagctgattgtgaagctggccaaccacggcctcatccacggggacttcaatgagttcaacctgatcctggatgaaagtgaccacatcaccatgattgacttcccccagatggtgtccaccagccaccccaatgctgagtggtactttgacagagatgtgaagtgcatcaaggacttcttcatgaagcgcttctcctatgaaagtgagctgttccccaccttcaaggacatcagaagagaggacaccctggatgtggaggtgtctgccagcggctacaccaaggagatgcaggctgatgatgagctgctgcaccccctgggcccagatgacaagaacatcgagaccaaggagggcagcgagttctccttcagtgatggagaggtggccgagaaggccgaggtgtatggctctgaaaatgaaagtgagaggaactgcctggaggagagcgagggctgctactgccgcagcagcggggaccctgagcagatcaaggaggacagcctgtctgaggagagcgcagatgcccggagctttgagatgacagagttcaaccaggccctggaggagatcaagggccaggtggtggagaacaacagcgtgacagagttcagcgaggagaagaacagaacagagaactacaaccggcaggacggccagagggtgcagggcggcgtgcctgctggcagtgatgaatatgaagatgagtgcccccacctgattgccctgagcagcctgaaccgggagttccggcccttcagagatgaagaaaatgtgggcgccatgaaccagtaccgcaccaggaccctgagcatcaccagcagcggcagcgctgtgtcctgcagcaccatccccccagagctggtgaagcagaaggtgaagaggcagctgaccaagcagcagaagtctgctgtgagaagaaggctgcagaagggggaggccaacatcttcaccaagcagaggcgggagaacatgcagaacatcaagagcagcctggaggccgccagcttctggggcgagtag

SEQ ID NO: 197958 - DNA, 1659 bp, Artificial Sequence
  derived and/or modified sequence
atgggcaaggtgaacgtggccaagctgcggtacatgagccgggacgatttccgtgtgctgaccgctgtggagatggggatgaaaaaccacgaaatagttcctggcagcctgattgcatctatcgctagcttgaaacatgggggatgcaacaaggtcctgcgagaattggtgaagcacaagctgatcgcatgggagaggactaaaaccgtgcagggatatcgccttaccaatgcagggtacgattatctggccctgaagaccctgtcgtcaagacaggtggtagagtccgtcggaaaccagatgggtgtgggaaaagagagtgatatctatattgtcgcaaacgaggaaggacagcaatttgccctgaaactgcatcgactgggccgtaccagtttcagaaatctcaaaaataagcgtgattatcacaaacaccgccataacgttagctggctgtacctgtcacgtctctcagccatgaaagagtttgcatacatgaaggcactctatgaacggaagtttcccgtccctaagcccatcgactataatcggcacgctgtggttatggagttgatcaacgggtaccctctttgtcagatccaccatgtggaggatccagcaagtgtgtatgacgaagcaatggagcttatagtgaagcttgccaatcatgggctaatacacggagatttcaatgagttcaacctgatcctcgacgagtccgatcacatcaccatgatcgatttcccccagatggttagcacctcgcatcctaacgcggaatggtactttgatcgcgatgtgaagtgcatcaaagacttttttatgaaacggttctcctacgagagcgagctcttccccacatttaaggacattaggagagaggacactctggatgtagaggttagtgctagtggttacacaaaggagatgcaggctgacgacgaattacttcaccccctgggacctgatgataagaacatcgaaacaaaagagggaagcgagtttagcttcagcgacggagaggtggctgaaaaagctgaagtctatggttctgagaacgagagcgagcgcaactgtcttgaggaaagcgagggttgttattgtcgatccagtggggatccagagcagatcaaggaggattccttgtccgaggaatccgcggatgctcgcagcttcgagatgactgagttcaaccaggcgctcgaagagatcaagggccaagttgttgagaacaatagcgtcactgagttttctgaagagaagaaccgaaccgaaaactacaacaggcaggacggccagagggtccaaggaggcgtgcccgccggaagcgatgaatacgaggatgaatgcccacacctgatcgccctgtcgagcctcaaccgcgagtttaggcctttcagggacgaggagaacgtaggcgccatgaaccaatatagaacccgaacgctctctataacatcatcagggagcgcagtgtcgtgctctacaattcctcccgaactggtaaaacagaaggtaaaaaggcagctgacaaagcagcaaaagtctgcagtacggcgacgtcttcaaaagggcgaggccaacatcttcaccaagcagcgccgggagaatatgcagaatattaaatctagccttgaagccgcctctttttggggggagtag

SEQ ID NO: 197959 - DNA, 1659 bp, Artificial Sequence
  derived and/or modified sequence
atgggaaaggtgaacgtggccaagttacgctacatgtcccgcgacgattttcgtgttctgaccgcagtcgaaatgggaatgaaaaaccacgaaattgtgccaggcagtctgatcgcctcgattgccagcctcaaacatggaggatgtaacaaggtgctgagagaactcgttaagcacaaattgatcgcttgggagaggaccaagacagtacagggctatcgactgaccaatgccggatacgactacctggcactcaagacgttgagcagtcgtcaagtggtagaaagcgtgggcaatcagatgggggtgggcaaggagagcgacatctacatcgtagccaacgaggaaggtcagcaattcgccttgaagctgcatagacttggacgaacatccttcaggaatctaaaaaacaagcgagattaccacaagcaccggcacaacgtttcatggctctacctttcccgcctcagcgctatgaaggaattcgcctacatgaaggccttatatgagcggaaatttcctgtgccgaagcctattgattataatcgtcatgccgtagtcatggagctgatcaatggttaccccctctgccagattcaccatgtggaggatcccgcaagtgtctacgacgaggccatggagctgattgtgaagctggccaatcatgggttgatccacggggacttcaacgagttcaaccttatccttgatgagagcgaccatatcaccatgattgacttcccacagatggtgtccacttcacacccgaacgcagaatggtactttgacagagacgttaaatgcataaaagacttcttcatgaagagatttagttatgagtccgagctgtttcccacattcaaggacatcagaagggaggatactttagacgtggaagtcagcgccagtgggtacaccaaggagatgcaggcggatgacgaattgttgcacccattgggccctgacgataagaacatagagaccaaagagggctctgaattcagtttttccgacggagaggtcgcagagaaggctgaagtgtacggctcagaaaacgagagtgagaggaattgcctcgaggagagcgagggttgctactgccgctcttcaggtgatcccgagcaaattaaggaggactcattgtcagaggagtcggcagacgcccgttcgttcgaaatgacagagtttaatcaggccctggaagagataaaaggccaggtcgtggaaaataattcagtgactgagttctcagaagagaaaaatagaaccgaaaattacaacagacaggatggccaaagggttcagggtggggtacctgccggttctgacgaatacgaggatgaatgtccccatctgatagccctgtcatccctgaatagggagttccgccctttccgtgacgaagagaacgtaggggcaatgaaccagtatcggactagaacattgtctattacttcatctggcagcgccgtttcctgctcaaccataccccctgagctggtgaagcagaaggtgaagcgccagctgaccaagcagcagaagtccgccgtgaggcggagattgcagaagggagaggccaacatttttactaagcagagaagagagaatatgcagaatatcaaaagctctttggaggccgctagcttctggggggagtag

SEQ ID NO: 197960 - DNA, 3922 bp, Artificial Sequence
  derived and/or modified sequence
ggaataacgacctgccttacgctttgcggctgtcgtcggagaggcatctgggttcggactggggccgccatggggaaagtgaatgtggccaagttgcgttacatgagccgagatgacttcagggtcttgaccgcggttgaaatgggcatgaagaaccatgaaattgttcccggcagtttgattgcttctatagccagccttaaacatggtggctgtaataaagttttaagagaattagtgaaacataaactcatagcttgggagcgtaccaaaactgtccagggctatcggttgacaaatgcaggatatgattacctagctttgaaaacactttcttctaggcaagtagttgagtctgttggaaaccagatgggtgttggcaaagaatcagatatttacattgttgcaaatgaagaaggacaacaatttgcattaaagcttcacagactaggaagaacctcgtttcgaaatttgaaaaacaaacgcgattatcataaacataggcacaatgtgtcatggctatatttatctcgtctctctgccatgaaggaatttgcctatatgaaggcattgtatgagaggaaatttccagttccaaagccaattgattacaatcgtcatgcagtggtcatggaactcataaatggttatccactatgtcagatacaccatgttgaagatcctgcatcagtatatgatgaagctatggaactaattgtcaaacttgcaaatcatgggctgattcatggagattttaatgaatttaatctcattttggatgaaagtgaccatatcaccatgattgattttccacagatggtttcaacttctcatcccaatgctgagtggtattttgacagagatgttaaatgcattaaagatttctttatgaaacgtttcagctacgaaagtgagctttttccaacttttaaggatatcaggagagaagacactcttgatgtggaggtttctgccagtggctacacaaaggaaatgcaggcagatgatgaactgcttcatccattaggtccagatgataaaaatattgaaacaaaagagggatctgaattctcattttcagatggagaagtggcagaaaaagcagaggtttacgggtcagaaaatgaaagtgaacggaactgtctagaagaatcagagggctgctattgcagatcatctggagaccctgaacaaataaaggaagacagtttatcagaagagagtgctgatgcacggagttttgaaatgactgaattcaatcaagctttagaagaaataaaagggcaggttgttgaaaacaactctgtaactgaattttctgaggagaaaaacagaactgaaaattacaacaggcaagatggtcagagagttcaaggaggagtccctgctggctctgacgagtatgaagatgaatgccctcatctaattgccttgtcgtcattaaatagagaattcaggcctttcagagatgaagaaaatgtgggagctatgaatcagtatagaacaagaactctgagtatcacttcttcaggcagtgctgtaagctgttcaacaattcctccagaactggtgaaacagaaggtgaaacgtcagttgacaaaacagcaaaaatcagctgtcagacgtcgattgcagaaaggagaagcaaatatatttaccaagcaacgtagggaaaacatgcaaaatatcaaatcaagtttggaagcagccagcttttggggagaataatatatttaggatcttggatatgtttaatatattttttaaagttactgtaattcctttttgagccctcatttgtcttttttgagccaaggctatcatatattaataaataaaccctctttcatctataaatttggtcattcagtatgtgtcttgcaaagaataattacctgccaaagcagtccatttttttcaaagtaatttgggtaactacagttacgtaactttattagagacatttgcatatttttaaaaatctaaataacatttttgttgttttctgtttgttgaggatgatatgctacaatgcacataaagcaattagaacaatgtttagcacattcttaagcattcaataaaacatggctattagaatcataatgattctgaaattctgctgacaatttggttgcattttatttggcaactggaggacttcactgtcttatttttctttagaagtaaagataagcctttggaagtaaagataagccagtgatgcacaatttgcttaattaattgattaataatctgttttgtgccacttacattggtaatgtggtcatgagaatggaaacttacttgagatagtctaccacaatttttacagttggcagcttgtaagcaggcctgagtagcagaagagttaggggttggggaaggtggagtagaatgaggaatgaaatgttctttctcatatgcttattatataagtgggtccggaacatgttctcacctcaaggttaacaaatacctaatgcaggaaagaaaatacatagccatggtcccttcctcaaggactttataattcagtgagatgtaaagatgagtgcttaagtgtatgcacctgattattgtctcttcattgccgcataagtcggaaaaggggatcacttgcagcgaaaaatggccactagatggcaatatcaccccatagtcaccaaacaggattacttgcatccctaattatgttctaccagagggaatatagtacagacttttccaagattgataaagacagcagattccctttcacctttgccaaattaactctactagctatttgcaagacctgtaattatctaataaattggcttaaatatatagaagctagaaaatgccaattcctcttccctcaaaagttacctgacattcaaatatttaaatacccttgctttgcattttagatatatctttgaattcaggtattcattttgtataatctctcaacttttaagcatttttataatgtaaagttgaaaacagcttaatagaaccacagaatgtttattttggagtcattttcttatattcagagctatgaaagcaaattgggaataaagccttatcctgctcagctttacctagttgactcagttgacttttgagtatctactacataaaaagcccattactattaagaaactcaagacaaacatgatttttacctttaatagcctaagatttcttgtgggccaaggaattaattattccaatcagaaatggaggccttacctcatttgggcaaagattagtgctagttattgaagatttactaataaatgatctgttaaggaatttagttttttttggatatgttgttttggttgttgaaaactaaggtataattataatagttattttttgaagatatgtttggctagccatcaattagaagttagagagtttgtcctaacagataagctataaccctcacattttaaaacatgcatagtgaacaatgaacaaaaacaaattcaaaattttactaatgtaaagctgtatattgtgattgttaaaacacttttttttgcctaggagttccagatttaaatcctggttctacacttcccaaacctcaggtaccttctgtggcctctctaacctcaatttttttacttgtaaaatggggacatttaatagtatacctcagtgtcgtgaagactaaatgaagtaccacttgtaaagagtttattacagtgcctgacatatactgtatggttagtactgctaaaatgacttcttaaggttaccaaaaggaaaattccacaagctgaccacctttcctattgtgatggtcactggtatttcagctatgatcctttgttgtgtatttatccagactgaaagatgtttttctagtaaccatcttgcatcgtcttagtctccccattaaataaacttttcctacaaacta

SEQ ID NO: 197961 - protein, 475 aa, Artificial Sequence
  derived and/or modified sequence
MAVVSEDDFQHSSNSTYRTTSSSLRADQEALLEKLLDRPPPGLQRPEDRFCGTYIIFFSLGIGSLLPWNFFITAKEYWMFKLRNSSSPATGEDPEGSDILNYFESYLAVASTVPSMLCLVANFLLVNRVAVHIRVLASLTVILAIFMVITALVKVDTSSWTRGFFAVTIVCMVILSGASTVFSSSIYGMTGSFPMRNSQALISGGAMGGTVSAVASLVDLAASSDVRNSALAFFLTATVFLVLCMGLYLLLSRLEYARYYMRPVLAAHVFSGEEELPQDSLSAPSVASRFIDSHTPPLRPILKKTASLGFCVTYVFFITSLIYPAICTNIESLNKGSGSLWTTKFFIPLTTFLLYNFADLCGRQLTAWIQVPGPNSKALPGFVLLRTCLIPLFVLCNYQPRVHLKTVVFQSDVYPALLSSLLGLSNGYLSTLALLYGPKIVPRELAEATGVVMSFYVCLGLTLGSACSTLLVHLI

SEQ ID NO: 197962 - DNA, 1428 bp, Artificial Sequence
  derived and/or modified sequence
atggctgtcgtatccgaggacgacttccagcacagcagtaacagtacttatcgaacgacctcctcgtcacttagagctgatcaggaggccctacttgagaagttgctggaccgccccccccctggtctccagcgaccagaagatagattctgcggcacctatataatctttttctcgctgggaatcggctccctcctcccatggaattttttcattacggccaaagagtactggatgttcaagttaaggaactccagctccccagcaactggtgaggatcctgagggtagtgacatcctaaactactttgagtcatatttggcggttgcttccaccgtgccatcgatgctttgcctcgtggctaatttccttctggtcaatcgcgttgctgtccatatccgagtgttagcctcgttgacagttatcctcgccatttttatggtaatcaccgcgctcgtgaaagtggacacctcctcgtggaccagaggcttttttgccgtgacaattgtgtgtatggtcattctctccggcgcgagtaccgtcttttcctccagtatctacgggatgaccggtagcttccccatgcgcaattcccaggcactgatttcaggaggagcgatggggggcacagtgtcagctgttgcttccctcgttgaccttgctgcatcctccgatgtcagaaattcggctttagcattctttctgaccgccacagtgttcctagtattgtgcatggggctttatctgttattgagtagactggaatacgccaggtactatatgcgaccagtgctcgctgcccatgtgttttcaggcgaggaagagctgccacaagatagtttgtccgccccatccgtcgcttcgcggtttatcgactcgcacaccccacctcttcggcctatcctaaaaaaaacagcttcccttggcttctgcgtgacttatgtgttttttatcacttccctcatctatcctgcgatctgcacaaatatcgaatcactgaacaaaggcagcgggagcctgtggacaaccaaattctttattccgttaacaaccttcctgttgtacaacttcgccgatctgtgtgggaggcagttgaccgcttggatccaggtgccaggacctaatagcaaggccttgccaggatttgttctgctgcgcacgtgcctaatcccactgttcgtgctgtgtaattatcagccccgagttcacctgaaaacagttgtttttcagagtgacgtttaccccgcgctattgagtagtcttctaggtttaagtaacggatacctgtctactctcgctttgttgtatggacctaagattgttccacgggagctggccgaggctactggcgtcgtgatgagcttctatgtgtgtttagggctgaccctagggtccgcatgcagcactcttctggtccacctcatttag

SEQ ID NO: 197963 - DNA, 1428 bp, Artificial Sequence
  derived and/or modified sequence
atggctgtggtgtctgaagatgacttccagcacagcagcaacagcacctaccgcaccaccagcagcagcctgcgggctgaccaggaggccctgctggagaagctgctggacaggcctcctcctggcctgcagaggccagaagatcgcttctgtggcacctacatcatcttcttcagcctgggcatcggcagcctgctgccctggaacttcttcatcacagccaaggagtactggatgttcaagctgaggaacagcagcagccctgccaccggggaggaccctgagggcagtgacatcctgaactactttgagagctacctggccgtggccagcacagtgcccagcatgctgtgcctggtggccaacttcctgctggtgaacagagtggccgtgcacatccgggtgctggccagcctgaccgtcatcctggccatcttcatggtgatcacagccctggtgaaggtggacaccagctcctggacccggggcttctttgctgtgaccatcgtgtgcatggtgatcctgagcggggccagcaccgtcttcagcagcagcatctacggcatgacaggcagcttccccatgaggaacagccaggccctgatctctggaggagccatgggcggcaccgtgtctgctgtggccagcctggtggacctggccgccagcagtgatgtgagaaattctgccctggccttcttcctgacagccaccgtcttcctggtgctgtgcatgggcctgtacctgctgctgagccggctggagtatgcccgctactacatgaggcctgtgctggccgcccacgtgttttctggagaggaggagctgccccaggacagcctgagcgcccccagcgtggccagccgcttcatcgacagccacaccccacccctgcggcccatcctgaagaagacagccagcctgggcttctgtgtgacctacgtgttcttcatcaccagcctcatctacccagccatctgcaccaacatcgagagcctgaacaagggcagcggcagcctgtggaccaccaagttcttcatccccctgaccaccttcctgctgtacaactttgctgacctgtgtggccggcagctgacagcctggatccaggtgcccggccccaacagcaaggccctgcccggctttgtgctgctgcggacctgcctgatccccctgtttgtgctgtgcaactaccagccccgggtgcacctgaagacagtggtgttccagagtgatgtgtacccagccctgctgagcagcctgctgggcctgagcaatggctacctgagcaccctggccctgctgtatggccccaagatcgtgccccgggagctggccgaggccactggagtggtgatgtccttctacgtgtgcctgggcctgaccctgggcagcgcctgcagcaccctgctggtgcacctgatctag

SEQ ID NO: 197964 - DNA, 1428 bp, Artificial Sequence
  derived and/or modified sequence
atggccgtggtgagcgaggacgacttccagcacagcagcaacagcacatatcgcaccacctcctctagccttcgggccgatcaggaggccctgctcgagaaactcctggatcggccacctcccggtctgcagagaccggaggacaggttctgtggcacatatatcattttcttctctctgggtatcggtagtttgctgccatggaatttctttattactgctaaggaatattggatgttcaaactcaggaattccagcagccctgcgacaggcgaagaccctgagggtagtgacatactcaattacttcgagagctacctagccgtcgcctccaccgttccatccatgctttgcttggttgcaaactttctgctggtgaatcgggtcgcagtgcatattagggtgctggcgtccctgaccgtaatccttgccatattcatggtcatcacagcgctggttaaagtagacacttctagctggaccaggggatttttcgcagtcactatcgtctgtatggttattctgtcaggagctagtacagtgttcagctcatccatatatgggatgactggaagtttccccatgcggaacagtcaggctcttatttcgggtggtgcaatgggaggcacagtctctgccgtggcctcactggtagatctggccgctagtagcgatgtgcggaactcggctttggcattcttcttaacggctacagtcttcctggtgctctgtatggggctgtacctactgcttagccgactggaatacgcccggtactacatgagacctgttttagccgcacacgttttctccggggaagaggagctgccacaggacagcttgagtgcgcccagcgtggccagcagattcatcgattcccacacacctcctcttaggcccatactcaagaaaaccgcctcattggggttttgtgtgacatacgtattctttattacttcactcatttatccagccatttgcacgaatatagagtctctcaataaaggatcagggtccctgtggactacgaagttcttcattcctctcaccacattcctcctgtataatttcgccgatctctgcgggagacagttgactgcttggattcaggtgcccgggccaaatagtaaggccctgccgggcttcgtcctcttgcgcacctgtctcataccgctgtttgtgctttgtaactatcagcctcgcgttcacttgaagaccgtcgtcttccaaagcgacgtgtatcctgccctgctctcaagtcttctggggctcagcaacgggtacctctctactctggcactcctgtatggccccaaaatagtccctagggaactggccgaagccacgggagtcgtgatgtccttttacgtgtgcctcggtctaactctggggtcagcctgttctaccctgctggtgcatttgatctag

SEQ ID NO: 197965 - DNA, 1428 bp, Artificial Sequence
  derived and/or modified sequence
atggctgtggtaagcgaagatgacttccagcattcgtccaattctacttatcgaaccacgtcaagctcccttcgcgctgatcaggaggcactgcttgagaagctcctggacagaccaccccctggcctgcagcgacctgaagaccggttttgtgggacctatatcattttcttctcgctcggcatcgggtccctgctgccatggaatttctttatcactgccaaagaatactggatgtttaaacttcgcaactccagttcacccgcaacaggagaggaccccgagggcagcgacattctgaattactttgaatcgtatctggcagtggctagcactgtcccatctatgctttgcctagttgccaacttcctgttagtgaatcgagtcgctgtacatatacgggttctggcctctctgactgtgatactggctattttcatggtaattactgccttagtaaaagttgatacgtcttcatggacacgtggcttttttgcggtgactatcgtgtgtatggttattctgtccggtgcaagcacagtgttctcttctagcatatacgggatgacagggtcgtttcccatgcgcaactcccaggcccttatttccggcggagctatgggaggtacagtttccgcggtggccagccttgtggaccttgctgcgagctctgacgtccgcaattctgccttggccttcttcttaacggctaccgtgttcttagttctatgcatgggcctgtatctcttgttaagcagactagagtatgcccgatattatatgagacccgtgctcgcggctcatgtgttcagcggggaggaggagttgccccaggatagcctctctgctcccagcgtagcaagtcgctttatcgacagtcatacaccaccactaaggcccattctgaagaagactgcttcgttgggcttctgtgtaacctacgtgttcttcattactagtctcatttatccagccatttgtaccaatatagagtcgctgaataagggctccggaagcctgtggacgacaaagttcttcatccccctgaccacctttctcctgtataattttgcagacctttgtggccgtcagctgacagcatggatacaagtgccaggccctaacagcaaggcattacctggcttcgttctactgagaacttgcttaatacccctgtttgtgctatgcaactatcaacccagagttcatcttaagactgtggtgttccaatccgacgtgtatcctgcccttttgagctctctccttggattatccaatggatatctgagcaccctggcgctcctgtatggccctaaaatcgtcccccgtgagctcgccgaagcaactggagtggttatgtctttctatgtctgtctgggactgactctcggctccgcttgtagcacgctgttagttcatctgatatag

SEQ ID NO: 197966 - DNA, 2257 bp, Artificial Sequence
  derived and/or modified sequence
cagtggtcctggccgtgcgccggaggcagcggcggcgtggcgcagcggcgacatggccgttgtctcagaggacgactttcagcacagttcaaactccacctacagaaccacaagcagcagtctccgagctgaccaggaggcactgcttgagaagctgctggaccgcccgccccctggcctgcagaggcccgaggaccgcttctgtggcacatacatcatcttcttcagcctgggcattggcagtctactgccatggaacttctttatcactgccaaggagtactggatgttcaaactccgcaactcctccagcccagccaccggggaggaccctgagggctcagacatcctgaactactttgagagctaccttgccgttgcctccaccgtgccctccatgctgtgcctggtggccaacttcctgcttgtcaacagggttgcagtccacatccgtgtcctggcctcactgacggtcatcctggccatcttcatggtgataactgcactggtgaaggtggacacttcctcctggacccgtggcttttttgcggtcaccattgtctgcatggtgatcctcagcggtgcctccactgtcttcagcagcagcatctacggcatgaccggctcctttcctatgaggaactcccaggcactgatatcaggaggagccatgggcgggacggtcagcgccgtggcctcattggtggacttggctgcatccagtgatgtgaggaacagcgccctggccttcttcctgacggccactgtcttcctcgtgctctgcatgggactctacctgctgctgtccaggctggagtatgccaggtactacatgaggcctgttcttgcggcccatgtgttttctggtgaagaggagcttccccaggactccctcagtgccccttcggtggcctccagattcattgattcccacacaccccctctccgccccatcctgaagaagacggccagcctgggcttctgtgtcacctacgtcttcttcatcaccagcctcatctaccccgccatctgcaccaacatcgagtccctcaacaagggttcgggctcactgtggaccaccaagtttttcatccccctcactaccttcctcctgtacaactttgctgacctatgtggccggcagctcaccgcctggatccaggtgccagggcccaatagcaaggcgctcccagggttcgtgctcctccggacctgcctcatccccctcttcgtgctctgtaactaccagccccgcgtccacctgaagactgtggtcttccagtccgatgtgtaccccgcactcctcagctccctgctggggctcagcaacggctacctcagcaccctggccctcctctacgggcctaagattgtgcccagggagctggctgaggccacgggagtggtgatgtccttttatgtgtgcttgggcttaacactgggctcagcctgctctaccctcctggtgcacctcatctagaagggaggacacaaggacattggtgcttcagagcctttgaagatgagaagagagtgcaggagggctgggggccatggaggaaaggcctaaagtttcacttggggacagagagcagagcacactcgggcctcatccctcccaagatgccagtgagccacgtccatgcccattccgtgcaaggcagatattccagtcatattaacagaacactcctgagacagttgaagaagaaatagcacaaatcaggggtactcccttcacagctgatggttaacattccaccttctttctagcccttcaaagatgctgccagtgttcgccctagagttattacaaagccagtgccaaaacccagccatgggctctttgcaacctcccagctgcgctcattccagctgacagcgagatgcaagcaaatgctcagctctccttaccctgaaggggtctccctggaatggaagtcccctggcatggtcagtcctcaggcccaagactcaagtgtgcacagacccctgtgttctgtgggtgaacaactgcccactaaccagactggaaaacccagaaagatgggccttccatgaatgcttcattccagagggaccagagggcctccctgtgcaagggatcaagcatgtctggcctgggttttcaaaaaaagagggatcctcatgacctggtggtctatggcctgggtcaagatgagggtctttcagtgttcctgtttacaacatgtcaaagccattggttcaagggcgtaataaatacttgcgtattcaa

SEQ ID NO: 197967 - DNA, 1428 bp, Artificial Sequence
  derived and/or modified sequence
atggccgtggtgagcgaggacgacttccagcacagcagcaacagcacctacagaaccaccagcagcagcctgagagccgaccaggaggccctgctggagaagctgctggacagacccccccccggcctgcagagacccgaggacagattctgcggcacctacatcatcttcttcagcctgggcatcggcagcctgctgccctggaacttcttcatcaccgccaaggagtactggatgttcaagctgagaaacagcagcagccccgccaccggcgaggaccccgagggcagcgacatcctgaactacttcgagagctacctggccgtggccagcaccgtgcccagcatgctgtgcctggtggccaacttcctgctggtgaacagagtggccgtgcacatcagagtgctggccagcctgaccgtgatcctggccatcttcatggtgatcaccgccctggtgaaggtggacaccagcagctggaccagaggcttcttcgccgtgaccatcgtgtgcatggtgatcctgagcggcgccagcaccgtgttcagcagcagcatctacggcatgaccggcagcttccccatgagaaacagccaggccctgatcagcggcggcgccatgggcggcaccgtgagcgccgtggccagcctggtggacctggccgccagcagcgacgtgagaaacagcgccctggccttcttcctgaccgccaccgtgttcctggtgctgtgcatgggcctgtacctgctgctgagcagactggagtacgccagatactacatgagacccgtgctggccgcccacgtgttcagcggcgaggaggagctgccccaggacagcctgagcgcccccagcgtggccagcagattcatcgacagccacaccccccccctgagacccatcctgaagaagaccgccagcctgggcttctgcgtgacctacgtgttcttcatcaccagcctgatctaccccgccatctgcaccaacatcgagagcctgaacaagggcagcggcagcctgtggaccaccaagttcttcatccccctgaccaccttcctgctgtacaacttcgccgacctgtgcggcagacagctgaccgcctggatccaggtgcccggccccaacagcaaggccctgcccggcttcgtgctgctgagaacctgcctgatccccctgttcgtgctgtgcaactaccagcccagagtgcacctgaagaccgtggtgttccagagcgacgtgtaccccgccctgctgagcagcctgctgggcctgagcaacggctacctgagcaccctggccctgctgtacggccccaagatcgtgcccagagagctggccgaggccaccggcgtggtgatgagcttctacgtgtgcctgggcctgaccctgggcagcgcctgcagcaccctgctggtgcacctgatctag

SEQ ID NO: 197968 - protein, 770 aa, Artificial Sequence
  derived and/or modified sequence
MSKCRKTPVQQLASPASFSPDILADIFELFAKNFSYGKPLNNEWQLPDPSEIFTCDHTELNAFLDLKNSLNEVKNLLSDKKLDEWHEHTAFTNKAGKIISHVRKSVNAELCTQAWCKFHEILCSFPLIPQEAFQNGKLNSLHLCEAPGAFIASLNHYLKSHRFPCHWSWVANTLNPYHEANDDLMMIMDDRLIANTLHWWYFGPDNTGDIMTLKFLTGLQNFISSMATVHLVTADGSFDCQGNPGEQEALVSSLHYCEVVTALTTLGNGGSFVLKMFTMFEHCSINLMYLLNCCFDQVHVFKPATSKAGNSEVYVVCLHYKGREAIHPLLSKMTLNFGTEMKRKALFPHHVIPDSFLKRHEECCVFFHKYQLETISENIRLFECMGKAEQEKLNNLRDCAIQYFMQKFQLKHLSRNNWLVKKSSIGCSTNTKWFGQRNKYFKTYNERKMLEALSWKDKVAKGYFNSWAEEHGVYHPGQSSILEGTASNLECHLWHILEGKKLPKVKCSPFCNGEILKTLNEAIEKSLGGAFNLDSKFRPKQQYSCSCHVFSEELIFSELCSLTECLQDEQVVVPSNQIKCLLVGFSTLRNIKMHIPLEVRLLESAELTTFSCSLLHDGDPTYQRLFLDCLLHSLRELHTGDVMILPVLSCFTRFMAGLIFVLHSCFRFITFVCPTSSDPLRTCAVLLCVGYQDLPNPVFRYLQSVNELLSTLLNSDSPQQVLQFVPMEVLLKGALLDFLWDLNAAIAKRHLHFIIQREREEIINSLQLQN

SEQ ID NO: 197969 - DNA, 2313 bp, Artificial Sequence
  derived and/or modified sequence
atgagcaagtgcagaaagacccccgtgcagcagctggccagccccgccagcttcagccccgacatcctggccgacatcttcgagctgttcgccaagaacttcagctacggcaagcccctgaacaacgagtggcagctgcccgaccccagcgagatcttcacctgcgaccacaccgagctgaacgccttcctggacctgaagaacagcctgaacgaggtgaagaacctgctgagcgacaagaagctggacgagtggcacgagcacaccgccttcaccaacaaggccggcaagatcatcagccacgtgagaaagagcgtgaacgccgagctgtgcacccaggcctggtgcaagttccacgagatcctgtgcagcttccccctgatcccccaggaggccttccagaacggcaagctgaacagcctgcacctgtgcgaggcccccggcgccttcatcgccagcctgaaccactacctgaagagccacagattcccctgccactggagctgggtggccaacaccctgaacccctaccacgaggccaacgacgacctgatgatgatcatggacgacagactgatcgccaacaccctgcactggtggtacttcggccccgacaacaccggcgacatcatgaccctgaagttcctgaccggcctgcagaacttcatcagcagcatggccaccgtgcacctggtgaccgccgacggcagcttcgactgccagggcaaccccggcgagcaggaggccctggtgagcagcctgcactactgcgaggtggtgaccgccctgaccaccctgggcaacggcggcagcttcgtgctgaagatgttcaccatgttcgagcactgcagcatcaacctgatgtacctgctgaactgctgcttcgaccaggtgcacgtgttcaagcccgccaccagcaaggccggcaacagcgaggtgtacgtggtgtgcctgcactacaagggcagagaggccatccaccccctgctgagcaagatgaccctgaacttcggcaccgagatgaagagaaaggccctgttcccccaccacgtgatccccgacagcttcctgaagagacacgaggagtgctgcgtgttcttccacaagtaccagctggagaccatcagcgagaacatcagactgttcgagtgcatgggcaaggccgagcaggagaagctgaacaacctgagagactgcgccatccagtacttcatgcagaagttccagctgaagcacctgagcagaaacaactggctggtgaagaagagcagcatcggctgcagcaccaacaccaagtggttcggccagagaaacaagtacttcaagacctacaacgagagaaagatgctggaggccctgagctggaaggacaaggtggccaagggctacttcaacagctgggccgaggagcacggcgtgtaccaccccggccagagcagcatcctggagggcaccgccagcaacctggagtgccacctgtggcacatcctggagggcaagaagctgcccaaggtgaagtgcagccccttctgcaacggcgagatcctgaagaccctgaacgaggccatcgagaagagcctgggcggcgccttcaacctggacagcaagttcagacccaagcagcagtacagctgcagctgccacgtgttcagcgaggagctgatcttcagcgagctgtgcagcctgaccgagtgcctgcaggacgagcaggtggtggtgcccagcaaccagatcaagtgcctgctggtgggcttcagcaccctgagaaacatcaagatgcacatccccctggaggtgagactgctggagagcgccgagctgaccaccttcagctgcagcctgctgcacgacggcgaccccacctaccagagactgttcctggactgcctgctgcacagcctgagagagctgcacaccggcgacgtgatgatcctgcccgtgctgagctgcttcaccagattcatggccggcctgatcttcgtgctgcacagctgcttcagattcatcaccttcgtgtgccccaccagcagcgaccccctgagaacctgcgccgtgctgctgtgcgtgggctaccaggacctgcccaaccccgtgttcagatacctgcagagcgtgaacgagctgctgagcaccctgctgaacagcgacagcccccagcaggtgctgcagttcgtgcccatggaggtgctgctgaagggcgccctgctggacttcctgtgggacctgaacgccgccatcgccaagagacacctgcacttcatcatccagagagagagagaggagatcatcaacagcctgcagctgcagaactag

SEQ ID NO: 197970 - DNA, 3958 bp, Artificial Sequence
  derived and/or modified sequence
ggacggagccaaagaatgctccgcctgcgcgcgccgcttccgttgccatagtggccgggggcgggaggctggcgcctcccagcttctgtactccgcgaagcaaaacctagggagctgaggcctaggcgaggcgagagtcgccggcgtgcgtaacgttggcgcacgtgactccggcccggcctacagggcgcgtgcgcagtgggacttgagtgcctcctggtccctgtctgccggcattcgcggctgcggggcccggagttgctggtaggaggagttggcggaagcacttggaactcctttataagtgtcagctgtgagattttaatttgatttgaaaatgagtaagtgcagaaagacaccagttcagcagctagcaagtcccgcgtcattcagcccagatattcttgctgacatttttgaactctttgccaagaacttttcttatggcaagccacttaataatgagtggcagttaccagatcccagtgagattttcacctgtgaccacactgaacttaatgcatttcttgatttgaagaactccctaaatgaagtaaaaaacctactgagtgataagaaactggatgagtggcatgagcacactgctttcactaataaagcggggaaaatcatttctcatgttagaaaatctgtgaatgctgaactttgtactcaagcatggtgtaagttccatgagattttgtgcagctttccacttattccacaggaagcttttcagaatggaaaactgaattctctacacctttgtgaagctccaggagcttttatagctagtctcaaccactacttaaaatcccatcggtttccttgtcattggagttgggtagcgaatactctgaatccataccatgaagcaaatgacgacctcatgatgattatggatgaccggcttattgcaaataccttgcactggtggtactttggtccagataacactggtgatatcatgaccctgaaattcttgactggacttcagaatttcataagcagcatggctactgttcacttggtcactgcagatgggagttttgattgccaaggaaacccaggtgaacaagaagctttagtttcttctttgcattactgtgaagttgtcactgctctgaccactcttggaaacggtggctcttttgttctaaagatgtttactatgtttgaacattgttccataaacttgatgtacctgctaaactgttgttttgaccaagtccatgttttcaaacctgctactagcaaggcaggaaactccgaagtctatgtggtttgcctccactataaggggagagaggccatccatcctctgttatctaagatgaccttgaattttgggactgaaatgaaaaggaaagccctttttccccatcatgtgattcctgattcttttcttaagagacatgaagaatgttgtgtgttctttcataaatatcagctagagactatttctgaaaacattcgtctatttgagtgcatgggaaaggcggaacaagaaaagctgaataatttaagggattgtgctatacaatattttatgcaaaaatttcaactgaaacatctttccagaaataattggctagtaaaaaaatctagtattggttgtagtacaaatacaaaatggtttgggcagaggaacaaatattttaaaacttataatgaaaggaagatgctagaagccctttcatggaaagataaagtagccaaaggatactttaatagttgggctgaagaacatggtgtatatcatcctgggcagagttctattttagaaggaacagcttccaatcttgagtgtcacttatggcatattttggagggaaagaaactgccaaaggtaaaatgttctcctttttgcaatggtgaaattttaaaaactcttaatgaagcaattgaaaagtcattaggaggagcttttaatttggattccaagtttaggccaaaacagcagtattcttgttcttgtcatgttttttctgaagaactgatattttccgagttgtgtagccttactgagtgccttcaggatgagcaggttgtagtacccagcaatcaaataaagtgcctgctggtgggcttttcgactctccgtaatatcaaaatgcatataccgttggaagttcgactcctagaatcagctgaactcacaacttttagctgttcattgcttcatgatggagatccaacttaccagcgtttatttttggactgccttctacattcattgcgggagcttcatacaggagatgttatgattttgcctgtactttcttgcttcacaagatttatggctggtttgatctttgtactccacagttgttttagattcatcacttttgtttgtcccacatcctctgatcccctgaggacctgcgcagtcctgctatgtgttggttatcaggaccttccaaatccagttttccgatatttgcagagtgtgaatgaattgttgagcactttgctcaactctgactcaccccagcaggttttacagtttgtgccaatggaggtactccttaagggggccctgcttgattttttgtgggatttgaatgctgccattgctaaaaggcatttgcatttcattattcaaagagagagagaagaaattatcaacagccttcagttacaaaactgaacatatgctttctgagattcaactttatgatttcttataatttgcccagtatttgcatcctgttgctctattaatttaaaaaccttttattttggggaaaggccaacatttgcatcattcaaagtctcattaattctggaaaaccatccattctgatctctagggtatatacacccacaggcatagagctcttccacgtggtggaatctatgcaatgatagatattcacactctaaatatgaggtgtgtgtatgtgtatgggtggccacagccatgcttacctatgccatttagttggtcttacttaatctgcttaagatttgcatctgtgtacctttgttcagattagttttttttttccagccgatttcctcttagtggctaatgctgttagtgaattttccaactaatttcctctcattggttaatgttgttaatgaattgagagaggtaattgaggaaaggaaatgagtaaatcactgttcagcaacactgatttccgttaacacatcagttatgaatttcagggaattcatctcgccagattcttgataacatgccattcattgcccttaggtgattgaccctattttcttacatggctcaaataaaactagtatgctgttgtatgaatcttttactgaccacaccatccaactataaaaatataacgggacagctttaaaccaaagatcatgtttagaacaatgaaaaattatttgttgtatctaatacacgcctgtattgtgaaaagcttcatttagcaatgatgtaataatttttaacttccaggaaataatctgtgaatggaaagattttttaagattttgagatagtgtttagtctcatgttgggaacacatgaatgtgatgaacatagtgaatactaaagaaaacgcttcagactttcagaatgatggttcagaatttaaaatttttaatcttttctaatttctttttttcagtgtgaaaatagcactttaccaaaagattagccatgaaatggttattttgccagttacatttgatttcttttgtatctgcaatgtaatgagttattttatttcttctgtatttgcagtgtaatgagtttttgtggcaaagtgtattaagcaatttttcattatcttgaagttccacaaagtggagaatatttatattctcacatgcattttaggcacttttgatatgtgaaaatagatgtattttctgatgcatttggttaataaatattaatctgaacattttcatgttctttgctattttgaattccattatagattcatgaataaagtcattactagagaga

SEQ ID NO: 197971 - DNA, 4168 bp, Artificial Sequence
  derived and/or modified sequence
cggagccaaagaatgctccgcctgcgcgcgccgcttccgttgccatagtggccgggggcgggaggctggcgcctcccagcttctgtactccgcgaagcaaaacctagggagctgaggcctaggcgaggcgagagtcgccggcgtgcgtaacgttggcgcacgtgactccggcccggcctacagggcgcgtgcgcagtgggacttgagtgcctcctggtccctgtctgccggcattcgcggctgcggggcccggaggtgggactggcttcccggtgccgcgagggcgggtccggacagccttccccccagtccggcgcaccatctccctgccttgtggctggaggcgccgcggacccaaagggagggaccatcccgggaagcagccccgagagcggaagtgcagaatggcttcctcgagagagtaaagtgcagcctctccagacactggggccccagtgggcgtgggcgaagttgctggtaggaggagttggcggaagcacttggaactcctttataagtgtcagctgtgagattttaatttgatttgaaaatgagtaagtgcagaaagacaccagttcagcagctagcaagtcccgcgtcattcagcccagatattcttgctgacatttttgaactctttgccaagaacttttcttatggcaagccacttaataatgagtggcagttaccagatcccagtgagattttcacctgtgaccacactgaacttaatgcatttcttgatttgaagaactccctaaatgaagtaaaaaacctactgagtgataagaaactggatgagtggcatgagcacactgctttcactaataaagcggggaaaatcatttctcatgttagaaaatctgtgaatgctgaactttgtactcaagcatggtgtaagttccatgagattttgtgcagctttccacttattccacaggaagcttttcagaatggaaaactgaattctctacacctttgtgaagctccaggagcttttatagctagtctcaaccactacttaaaatcccatcggtttccttgtcattggagttgggtagcgaatactctgaatccataccatgaagcaaatgacgacctcatgatgattatggatgaccggcttattgcaaataccttgcactggtggtactttggtccagataacactggtgatatcatgaccctgaaattcttgactggacttcagaatttcataagcagcatggctactgttcacttggtcactgcagatgggagttttgattgccaaggaaacccaggtgaacaagaagctttagtttcttctttgcattactgtgaagttgtcactgctctgaccactcttggaaacggtggctcttttgttctaaagatgtttactatgtttgaacattgttccataaacttgatgtacctgctaaactgttgttttgaccaagtccatgttttcaaacctgctactagcaaggcaggaaactccgaagtctatgtggtttgcctccactataaggggagagaggccatccatcctctgttatctaagatgaccttgaattttgggactgaaatgaaaaggaaagccctttttccccatcatgtgattcctgattcttttcttaagagacatgaagaatgttgtgtgttctttcataaatatcagctagagactatttctgaaaacattcgtctatttgagtgcatgggaaaggcggaacaagaaaagctgaataatttaagggattgtgctatacaatattttatgcaaaaatttcaactgaaacatctttccagaaataattggctagtaaaaaaatctagtattggttgtagtacaaatacaaaatggtttgggcagaggaacaaatattttaaaacttataatgaaaggaagatgctagaagccctttcatggaaagataaagtagccaaaggatactttaatagttgggctgaagaacatggtgtatatcatcctgggcagagttctattttagaaggaacagcttccaatcttgagtgtcacttatggcatattttggagggaaagaaactgccaaaggtaaaatgttctcctttttgcaatggtgaaattttaaaaactcttaatgaagcaattgaaaagtcattaggaggagcttttaatttggattccaagtttaggccaaaacagcagtattcttgttcttgtcatgttttttctgaagaactgatattttccgagttgtgtagccttactgagtgccttcaggatgagcaggttgtagtacccagcaatcaaataaagtgcctgctggtgggcttttcgactctccgtaatatcaaaatgcatataccgttggaagttcgactcctagaatcagctgaactcacaacttttagctgttcattgcttcatgatggagatccaacttaccagcgtttatttttggactgccttctacattcattgcgggagcttcatacaggagatgttatgattttgcctgtactttcttgcttcacaagatttatggctggtttgatctttgtactccacagttgttttagattcatcacttttgtttgtcccacatcctctgatcccctgaggacctgcgcagtcctgctatgtgttggttatcaggaccttccaaatccagttttccgatatttgcagagtgtgaatgaattgttgagcactttgctcaactctgactcaccccagcaggttttacagtttgtgccaatggaggtactccttaagggggccctgcttgattttttgtgggatttgaatgctgccattgctaaaaggcatttgcatttcattattcaaagagagagagaagaaattatcaacagccttcagttacaaaactgaacatatgctttctgagattcaactttatgatttcttataatttgcccagtatttgcatcctgttgctctattaatttaaaaaccttttattttggggaaaggccaacatttgcatcattcaaagtctcattaattctggaaaaccatccattctgatctctagggtatatacacccacaggcatagagctcttccacgtggtggaatctatgcaatgatagatattcacactctaaatatgaggtgtgtgtatgtgtatgggtggccacagccatgcttacctatgccatttagttggtcttacttaatctgcttaagatttgcatctgtgtacctttgttcagattagttttttttttccagccgatttcctcttagtggctaatgctgttagtgaattttccaactaatttcctctcattggttaatgttgttaatgaattgagagaggtaattgaggaaaggaaatgagtaaatcactgttcagcaacactgatttccgttaacacatcagttatgaatttcagggaattcatctcgccagattcttgataacatgccattcattgcccttaggtgattgaccctattttcttacatggctcaaataaaactagtatgctgttgtatgaatcttttactgaccacaccatccaactataaaaatataacgggacagctttaaaccaaagatcatgtttagaacaatgaaaaattatttgttgtatctaatacacgcctgtattgtgaaaagcttcatttagcaatgatgtaataatttttaacttccaggaaataatctgtgaatggaaagattttttaagattttgagatagtgtttagtctcatgttgggaacacatgaatgtgatgaacatagtgaatactaaagaaaacgcttcagactttcagaatgatggttcagaatttaaaatttttaatcttttctaatttctttttttcagtgtgaaaatagcactttaccaaaagattagccatgaaatggttattttgccagttacatttgatttcttttgtatctgcaatgtaatgagttattttatttcttctgtatttgcagtgtaatgagtttttgtggcaaagtgtattaagcaatttttcattatcttgaagttccacaaagtggagaatatttatattctcacatgcattttaggcacttttgatatgtgaaaatagatgtattttctgatgcatttggttaataaatattaatctgaacattttcatgttctttgctattttgaattccattatagattcatgaataaagtcattactagag

SEQ ID NO: 197972 - DNA, 2313 bp, Artificial Sequence
  derived and/or modified sequence
atgagtaaatgcaggaaaacacctgtgcagcagctggctagccccgcatctttttccccggatattttagcagatattttcgaactgtttgcaaagaatttcagctacggaaagccactgaataacgagtggcaactacccgacccgagtgagatcttcacatgtgatcacacggagctgaatgcgttcctggatcttaagaatagcctgaacgaggtgaagaacttactaagtgataagaagttggacgaatggcacgaacacacagccttcaccaataaggctggcaagatcatcagccatgtaagaaaatcagttaacgccgagctgtgcacgcaagcctggtgtaagttccatgaaattctgtgtagttttccactcattccacaggaggcatttcagaacgggaagctgaactccttgcacctttgtgaggcgccaggcgctttcatcgcatctctgaatcactacctcaaatcccaccggttcccttgtcattggtcttgggtcgcgaacacacttaacccctatcatgaggctaatgacgacctcatgatgattatggatgatcggctaattgctaatactctgcactggtggtacttcggacctgacaatacgggagatattatgacacttaagtttctgacagggctccagaattttataagttccatggccaccgttcatttagttacagctgacgggtcctttgactgtcaaggcaacccaggggagcaggaggcgctagtaagctccctgcattattgcgaggtggtaactgctctgaccaccctgggaaacgggggctcctttgtgctcaaaatgttcaccatgttcgaacactgtagtattaacctaatgtaccttctgaattgttgcttcgatcaggtccatgtgtttaagccagccacctcaaaggctggaaactcagaggtctatgtggtctgcctccactacaaagggagagaagcaatacacccacttttgtccaaaatgaccctaaactttggcacagagatgaagagaaaggcgctgttcccccatcatgttattccagactcttttctgaaaagacacgaagaatgctgtgtcttcttccataaatatcagctggagactatcagtgagaacattcgcctattcgagtgcatgggcaaggctgagcaggaaaaactaaacaatctccgtgattgcgcaatccagtatttcatgcagaagttccagctgaagcacctgtctcgtaacaactggctggtgaagaagagtagcattgggtgttccaccaataccaagtggtttggacaacgcaacaagtacttcaaaacctataatgaaaggaagatgctcgaagcactcagctggaaagacaaagtcgcgaaaggctactttaatagttgggctgaggagcatggtgtctaccatcctggacaatctagtattctggaggggaccgcgagcaacctggagtgccacctctggcatatactcgagggaaagaagctgccaaaggtgaagtgctcacccttttgtaacggggaaattctgaaaactctgaatgaggctatcgagaaaagcctgggtggagcttttaatctggattccaaatttcggccaaaacagcagtatagttgcagttgtcacgtttttagtgaggaattaattttttctgaactctgttcactgaccgaatgtcttcaagacgagcaagtggtggtaccgagcaaccaaataaagtgtctcctggtaggattttccaccctgagaaacatcaagatgcacattcccctagaagtccggcttctagaatccgcagagcttaccacattctcttgctccctgttgcacgacggcgacccaacctatcagcggctgtttctggactgcctgctgcactcccttagggagctccacactggcgacgtcatgatcttaccagtcttgagttgctttacccggtttatggctggactgattttcgtgctgcattcatgctttagattcattaccttcgtttgcccaaccagctctgatcctctgcgtacatgtgctgtgctcttgtgtgttggctatcaggatcttccaaacccagtcttcaggtatctgcaatccgtcaacgagttattgtctacattgcttaattccgatagcccccagcaggtgttgcagttcgttcctatggaggtgctccttaaaggcgcactcctggactttctctgggatctgaatgcagctatagctaagcggcacttacacttcattatccaacgcgaaagggaagaaattattaatagcctgcaacttcagaattag

SEQ ID NO: 197973 - DNA, 2313 bp, Artificial Sequence
  derived and/or modified sequence
atgtctaaatgccggaaaaccccagtacagcagctcgctagccctgcttcattttcacccgatatcctggccgacattttcgaactgtttgcgaaaaactttagttacggtaaacctctgaacaacgagtggcaactccccgatcctagcgagatctttacctgcgaccacactgaattaaacgcatttctggatcttaagaacagcctgaacgaagtcaaaaatctgttgtccgacaagaagttagatgaatggcacgagcacactgccttcaccaacaaggccgggaagataatcagtcatgtgaggaagtcagtcaatgccgagttatgtacccaagcgtggtgcaagttccacgagatcctgtgttccttcccacttatccctcaagaggcctttcagaacggtaagctgaacagtttacatctttgcgaggccccgggggcatttatcgccagcctgaaccattatctgaaaagtcatcgctttccttgtcactggagttgggttgccaatacactgaacccatatcacgaggcgaatgatgatctgatgatgatcatggacgatagactgatcgccaatacgcttcattggtggtactttggtcccgacaacacaggtgatatcatgacgctgaagtttcttacgggcctgcaaaacttcatcagctcaatggctaccgtccatctggtaaccgccgacggctcatttgactgccaggggaaccctggggaacaggaggcactggtgagctctttgcactactgtgaggtcgtgaccgctctgaccacgctcggtaacggcggcagctttgtcttgaagatgtttaccatgtttgaacattgttcaattaatctgatgtacctattgaattgctgcttcgaccaggtgcatgtattcaaacctgccaccagtaaggcaggaaattctgaggtatacgtcgtctgtctgcactataagggacgcgaggcaatccaccccttattgtcaaagatgacgctgaactttggtaccgaaatgaagagaaaggcactgttcccacatcatgtcattcctgatagttttctcaaacggcacgaggagtgctgtgtgttcttccacaagtatcagctagaaacaataagcgaaaatattcgtctatttgagtgcatgggaaaggccgaacaggaaaagctgaacaatcttagagattgtgccatacagtacttcatgcagaaattccagttaaaacacctctccagaaacaattggctggtgaagaaaagttcaattggttgctcaaccaatacaaaatggtttgggcagcgtaacaagtacttcaagacctacaatgaaagaaagatgttggaggccctctcatggaaggacaaggtggctaagggctattttaactcctgggcagaggagcatggtgtgtatcaccccggacaatcatctatacttgagggaacagcgtccaatctggagtgccacctgtggcatattctggaggggaagaaattgcctaaggtcaagtgctccccgttttgcaatggcgagattctcaagactttaaacgaagcaatagaaaagtctctgggaggggccttcaatttagattccaaatttaggcccaagcagcagtacagttgctcttgtcacgtcttttccgaggagcttattttttctgaactgtgcagtctcaccgagtgccttcaggatgagcaggtggtggttcctagtaaccagattaaatgtcttctggttggtttcagcacgctccgtaacattaaaatgcacatccctctggaagtgcgcctgttggagagtgccgaactcactacctttagttgctccctcctgcacgacggcgaccctacttaccaaagattattcctggattgcctactccacagccttagggaactccacacaggcgacgtgatgatcctgcccgtccttagctgctttactagattcatggctgggctcatttttgtgctacacagttgttttcgctttataacattcgtttgcccaacctcatcagacccgttgcgcacttgtgctgtgttattgtgtgtcggataccaggacttacccaatccagtgttccgctaccttcagagcgtgaacgagttgctctctacacttcttaactcagatagtcctcaacaggtactgcagtttgtcccaatggaagttctcctcaaaggcgcactgctcgacttcctgtgggaccttaatgctgcgattgctaagcggcaccttcacttcataattcaacgagagcgagaagagataattaactctttgcaactgcagaattag

SEQ ID NO: 197974 - DNA, 2313 bp, Artificial Sequence
  derived and/or modified sequence
atgagcaaatgtaggaagacccctgtgcagcagctggccagccctgccagcttctccccagacatcctggccgacatctttgagctgtttgccaagaacttctcctatggcaagcccctgaacaatgagtggcagctgcctgaccccagcgagatcttcacctgtgaccacacagagctgaatgccttcctggacctgaagaacagcctgaatgaggtgaagaacctgctgagtgacaagaagctggatgagtggcatgagcacacagccttcaccaacaaggccggcaagatcatcagccacgtgaggaagtctgtgaatgctgagctgtgcacccaggcctggtgcaagttccacgagatcctgtgcagcttccccctcatcccccaggaggccttccagaatggcaagctgaacagcctgcacctgtgtgaggcccctggggccttcatcgccagcctgaaccactacctgaagagccaccgcttcccctgccactggagctgggtggccaacaccctgaacccctaccacgaggccaatgatgacctgatgatgatcatggatgaccggctgattgccaacaccctgcactggtggtacttcggccctgacaacacaggagacatcatgaccctgaagttcctgaccggcctgcagaacttcatcagctccatggccaccgtgcacctggtgacagcagatggcagctttgactgccagggcaaccctggagagcaggaggccctggtgagcagcctgcactactgtgaggtggtgacagccctgaccaccctgggcaatggaggcagctttgtgctgaagatgttcaccatgtttgagcactgcagcatcaacctgatgtacctgctgaactgctgctttgaccaggtgcacgtgttcaagccagccaccagcaaggccggcaacagcgaggtgtatgtggtgtgcctgcactacaagggccgggaggccatccaccccctgctgagcaagatgaccctgaactttggaacagagatgaagaggaaggccctcttcccccaccacgtgatcccagacagcttcctgaagagacatgaggagtgctgcgtgttcttccacaagtaccagctggagaccatcagcgagaacatccggctgtttgagtgcatgggcaaggccgagcaggagaagctgaacaacctgcgggactgtgccatccagtacttcatgcagaagttccagctgaagcacctgagcaggaacaactggctggtgaagaagagcagcatcggctgcagcaccaacaccaagtggtttggccagaggaacaagtacttcaagacctacaatgaaaggaagatgctggaggccctgtcctggaaggacaaggtggccaagggctacttcaacagctgggccgaggagcacggcgtgtaccaccctggccagagcagcatcctggagggcacagccagcaacctggagtgccacctgtggcacatcctggagggcaagaagctgcccaaggtgaagtgcagccccttctgcaatggagagatcctgaagaccctgaatgaggccatcgagaagagcctgggcggggccttcaacctggacagcaagttccggcccaagcagcagtacagctgcagctgccacgtgttttctgaggagctgatcttcagcgagctgtgcagcctgacagagtgcctgcaggatgagcaggtggtggtgcccagcaaccagatcaagtgcctgctggtgggcttcagcaccctgaggaacatcaagatgcacatccccctggaggtgcggctgctggagagcgctgagctgaccaccttcagctgcagcctgctgcatgatggagaccccacctaccagaggctcttcctggactgcctgctgcacagcctgcgggagctgcacactggagatgtgatgatcctgcctgtgctgagctgcttcacccgcttcatggccggcctcatctttgtgctgcacagctgcttccgcttcatcacctttgtgtgccccaccagcagtgaccccctgcggacctgtgctgtgctgctgtgtgtgggctaccaggacctgcccaaccctgtgttccgctacctgcagagcgtgaatgagctgctgagcaccctgctgaacagcgacagcccccagcaggtgctgcagtttgtgcccatggaggtgctgctgaagggggccctgctggacttcctgtgggacctgaatgctgccatcgccaagaggcacctgcacttcatcatccagcgggagcgggaggagatcatcaacagcctgcagctgcagaactag

SEQ ID NO: 197975 - DNA, 2313 bp, Artificial Sequence
  derived and/or modified sequence
atgagcaagtgccggaagacccccgtgcagcagctggccagccccgcatctttcagcccggatatcctggccgacatctttgagttgttcgctaaaaatttctcatacggcaagcctttaaataatgagtggcagctgcccgacccttctgaaatatttacatgtgatcatacagaattgaacgctttcctcgatcttaaaaactcgctgaacgaagtgaagaatcttctgagtgacaaaaagctggacgaatggcacgaacatactgcttttactaacaaagccggaaaaatcatatcgcacgtgcggaagtctgtaaacgctgagctctgtacccaggcctggtgcaaattccacgaaattctgtgttcctttccgctaataccacaagaagcttttcagaacgggaaactgaatagcctccatctatgtgaagcccctggcgcattcattgcctccttgaatcattacctgaagtctcacaggttcccctgccactggtcctgggtcgccaatacactgaacccataccacgaggcgaacgacgacttaatgatgattatggatgataggctgatcgctaacacactgcattggtggtatttcgggccagacaacacgggggatatcatgaccctcaaatttctgacggggctccagaatttcatctcctctatggccactgtacatctagtgactgccgatggcagcttcgattgccaggggaacccgggcgagcaagaagccctggtttctagccttcactattgtgaggtagtgaccgcgctcaccacattaggaaatgggggatccttcgtgttaaaaatgtttactatgtttgagcactgtagtattaacctgatgtacctgttgaattgttgctttgaccaagttcacgtctttaaacccgccacatcgaaggctggaaattctgaagtgtatgtagtctgcttgcactataaagggagggaagctatacatccactcctaagtaagatgaccctgaattttgggacggagatgaaaagaaaggctctgttcccacaccacgtgatcccagactccttcctgaagcgacacgaggagtgctgcgtgtttttccataagtatcagctagaaactatttccgaaaacatccgactttttgaatgcatggggaaggccgagcaggagaagctgaacaacctacgggattgcgcaatccagtactttatgcagaaatttcaactcaaacacttgagtaggaataactggctagtgaaaaaaagttccataggttgctctactaatacaaagtggtttggccagcggaataagtattttaaaacctataacgagaggaaaatgctagaagccctgtcatggaaggacaaggtggccaaaggatattttaattcttgggctgaagaacatggcgtgtatcatcctggacagtcatcaatattagaggggaccgcctcaaatctagagtgtcatttatggcacattctcgaaggcaagaagctgcccaaggttaagtgttctccgttttgcaatggagagatcctcaaaactctaaacgaagccatcgagaagtccctcggaggtgcgtttaacctagattccaagttccgcccgaagcagcagtacagctgttcttgtcacgttttttctgaagagctcatcttttcagaactgtgttcattgacagagtgcctgcaagacgagcaggtggtggtgccctctaatcagattaaatgtttgctcgtcggtttttccaccctgaggaatattaaaatgcatatacccctcgaggttagattattggagagtgccgagcttacaacattctcttgctcgctgctgcatgacggcgatcccacataccagagactcttcctggattgtctgctgcactcactgcgtgagctgcacactggggatgtgatgatcctgccagtactcagctgttttactcgatttatggcagggttgatattcgtcctccacagctgcttccgtttcatcacatttgtctgtcccaccagctctgatcctttgagaacctgcgccgtgctgctgtgcgtgggatatcaggacttgccaaatcccgttttccggtacctgcagagtgtaaatgagttactctctaccctgcttaacagcgattctcctcagcaggttctccagttcgtgccaatggaggtgttgctgaagggagccctcctggacttcctgtgggatctgaatgctgcaatcgcaaaaagacatttgcactttattatccagcgtgagcgagaagaaatcatcaattccctacagctgcagaattag

SEQ ID NO: 197976 - DNA, 2313 bp, Artificial Sequence
  derived and/or modified sequence
atgagcaagtgccggaagacccccgtgcagcagctggccagccccgcatccttttcacctgacatactcgctgacatctttgaattgttcgccaaaaatttctcctatggaaaaccactgaacaatgagtggcagctgcccgaccctagcgagatctttacatgcgatcatacggagctgaatgcttttttagacctcaaaaactctttaaacgaggttaagaacctgttgtccgataaaaagctcgacgaatggcatgagcacactgcctttacaaacaaggccgggaagatcatcagccacgtaagaaagagcgtcaatgcagaactctgtacccaagcttggtgtaagtttcacgagatcttatgtagctttccactgattcctcaggaagcgtttcagaatgggaagttaaatagtctgcacctgtgcgaggctcctggtgcctttatagccagcttaaaccattacctgaaatcccaccgattcccctgtcattggagttgggtcgctaacactctcaatccttaccacgaggctaacgatgatcttatgatgatcatggacgacagactgatagctaatactctccattggtggtacttcggccctgacaatacaggagatataatgacactgaagttcttgaccgggttacagaattttattagctctatggccacagtgcacctcgtcactgccgacggctctttcgactgtcagggtaaccctggagagcaggaggcactcgtgtcttcgctgcactactgtgaagtggtcacggccctgaccacgcttggcaacggaggttctttcgtattgaagatgtttaccatgttcgaacattgttctattaacctgatgtatctgctgaactgctgtttcgatcaggtgcacgtgttcaagcccgcaacctctaaggctggcaactcggaggtgtatgtcgtgtgtctgcattacaagggtagagaggccattcacccccttttgagtaaaatgacgctgaacttcgggactgagatgaaacgtaaggccctctttcctcaccacgtgattcctgacagcttcctgaagaggcatgaagaatgctgtgtatttttccataaatatcaactggagaccatcagcgaaaatatccgtcttttcgaatgtatggggaaggcagaacaggaaaagctgaacaatctccgggactgcgccattcagtatttcatgcagaaattccagttgaaacatctctcaagaaataactggctggtgaagaaaagcagtatcgggtgctcaacaaatactaagtggttcggtcagagaaacaaatactttaaaacttataatgaacgcaagatgctcgaggctctgtcttggaaggacaaggttgcgaagggctactttaattcgtgggccgaagaacatggagtgtatcatcccggacagagctccatactggagggtacggctagcaatctggagtgtcatctatggcacattctggagggaaagaagctgcctaaagtgaagtgctcaccattctgcaacggagaaatattaaaaactctgaatgaagctatcgagaagtccctggggggcgcctttaatctggatagcaaattcaggccaaagcagcagtactcatgttcatgtcacgtgttctctgaagaattaatattctcagaactctgctcgcttactgagtgcctacaagatgaacaggtcgtggtcccatcaaatcagatcaaatgtctactcgtcggtttttcaactctgcgaaatattaaaatgcacataccgttagaagtaagactgctcgagagcgccgagctcacaacctttagctgtagcctgcttcacgacggtgatcccacctaccagcggttgttccttgattgtctcctgcattcactacgggagcttcatacaggcgatgtgatgattcttccagtattatcgtgttttacccgcttcatggcgggcctgattttcgtgctgcattcatgcttcagatttataacatttgtttgtcccacctccagtgatccactaagaacttgcgctgtgctgttgtgtgtggggtaccaggacctgccgaatcctgtgttccgctacttacagtcagtaaatgaactcttatccaccctcctcaatagtgactccccccagcaggtgttacaattcgttccaatggaggttctattaaaaggggccttgctggacttcctctgggatcttaatgccgcgattgccaagcgacacttacattttattattcaacgggagcgagaagagatcataaattccctgcagctgcagaattag

SEQ ID NO: 197977 - DNA, 2313 bp, Artificial Sequence
  derived and/or modified sequence
atgtccaagtgccggaagaccccagtgcagcaacttgctagtcctgctagctttagcccggacatattggccgacatcttcgagctgttcgctaagaatttttcttacggcaaaccactcaataacgaatggcagcttcctgatcccagtgagatctttacttgcgaccacacagaattaaacgcctttctggaccttaaaaattctctgaacgaagtcaaaaatttgttatctgacaagaagctggacgagtggcatgaacacacagcgttcaccaacaaagctgggaaaatcatctcgcatgtccggaagagtgttaacgccgagctgtgcacacaagcctggtgcaaattccacgagattctctgctcattcccactgatcccacaggaggcttttcagaacggcaagctcaacagtctccacttatgcgaagcaccaggggcatttatcgcctcacttaatcattacctcaagagtcaccggtttccatgtcactggtcctgggtcgctaacaccctgaacccataccacgaagccaatgacgatttaatgatgattatggacgaccggctgatagccaacaccctgcattggtggtattttgggcctgataacacaggggatattatgaccctaaagtttctgaccggactgcagaacttcatcagctcaatggcaaccgtgcatttggtcaccgcggacggtagcttcgattgtcaggggaaccctggcgagcaggaggccttggtgtcaagcctccactattgcgaagtagtgacagctctcacgacacttggcaatggcggtagcttcgtcctcaaaatgttcacaatgtttgaacattgctctatcaacctgatgtatctattaaattgctgtttcgatcaggtacacgtgttcaaaccagccacttcaaaggccggtaatagcgaggtttatgtggtatgtttgcactacaagggacgtgaagcaattcaccctcttctttcgaagatgacactgaactttggaacggaaatgaaacgaaaagccctcttcccacatcacgtaatcccggactctttcctgaagaggcatgaagagtgctgcgtgtttttccacaagtatcaactggaaaccatcagtgaaaatattaggctcttcgaatgtatgggaaaggccgaacaggaaaagctgaacaacctgcgtgactgcgccattcaatacttcatgcagaagtttcagttaaaacatctgtccagaaataattggctcgttaaaaaatccagcattggttgcagtactaataccaaatggttcggccagagaaataagtatttcaagacttacaatgagaggaaaatgttggaagcgctgagctggaaagacaaggtcgcaaaaggatactttaattcttgggctgaagagcatggcgtttatcacccaggtcagtcttccatcttggaaggcacagcgtccaacctggagtgccacctgtggcacatcctcgaaggaaaaaaactgccgaaagtcaagtgctctcctttctgtaacggggagattctgaagactttgaacgaagctatagaaaagtccctgggaggtgcttttaatctcgactccaaattccggccaaaacagcaatactcttgctcatgtcacgtgttttctgaagagttaatcttttccgaactatgttctcttacagaatgcctccaagatgagcaggtggtggtgcccagtaaccaaatcaaatgcctgctggtcggattttcaaccctacgaaacatcaaaatgcacatcccgttagaggttcgtctgttagaatcagccgaactcacaacgttcagttgtagtctgctgcacgacggcgatcctacctaccagagattatttctggattgtctgctccattctctgagggagttgcatacaggggacgtaatgattttgccagtcctctcttgctttactcggttcatggctggactgatttttgtcctccattcttgtttccggttcatcacatttgtttgcccaacaagctcggaccctctccgcacatgtgccgttcttttgtgcgtggggtaccaagatctgcctaatccagtgtttcgctatttacagtcagttaatgagctactcagcaccctcttgaactcggactctcctcaacaagtactccaatttgttccaatggaggtgctccttaaaggtgcactgctggacttcctgtgggacctcaacgccgcaattgctaaaaggcacctccatttcattattcaacgggaacgcgaagagatcattaactctctccaactgcagaactag

SEQ ID NO: 197978 - DNA, 2313 bp, Artificial Sequence
  derived and/or modified sequence
atgagcaaatgccgtaaaaccccagttcaacagctggcctctcctgcctccttttcaccagacatacttgctgacatcttcgagctgtttgcaaaaaacttctcatatggtaaacccctgaacaacgagtggcagctgcccgatccatcagaaatcttcacatgcgaccacaccgaactgaatgccttcctcgatctgaagaattctcttaacgaggtcaaaaatctgctctctgataaaaaacttgacgaatggcacgagcacactgcgttcactaacaaggccggtaagattataagccacgttcgaaagtcagttaacgccgagctctgcacccaggcatggtgcaagttccacgagattctgtgctccttcccactcatcccacaggaagcattccaaaatggcaaactaaattctctacacctgtgtgaggccccaggggcttttatcgcttcattaaaccattacttaaaatcccatcgcttcccttgtcactggtcctgggtggccaacacgcttaacccatatcacgaggcaaatgatgatctcatgatgattatggacgacaggctaatcgctaatactctgcactggtggtattttgggccagataatactggtgatattatgaccctcaagttcctcactggactacagaacttcatcagctcgatggctaccgttcacctcgtgaccgcggacggatctttcgattgccaaggcaatccaggagagcaggaggcactcgtgtccagtctacactactgtgaagttgttaccgctctaacaaccctcggaaatgggggatcctttgttttgaagatgtttaccatgtttgagcattgcagcattaatctgatgtacctcctgaactgctgttttgatcaggtgcacgttttcaaacccgcaacctccaaagccggaaatagtgaggtctacgtggtgtgtcttcactataaggggcgagaggccatacaccccctcctctctaagatgaccctgaactttggaactgaaatgaaacgcaaagcattattccctcaccacgtgatccctgattctttccttaaaaggcatgaggaatgttgtgttttttttcacaagtaccagctggagaccataagtgaaaacatccgcctctttgagtgtatggggaaggctgaacaagagaaactcaacaacctgcgtgactgtgccattcagtatttcatgcagaagttccagctcaaacacctgtctaggaataactggctggtgaaaaagtcttcaatcggttgctctaccaacacaaaatggttcgggcagcggaataagtactttaaaacctacaatgagaggaagatgctcgaggccttatcgtggaaagataaggtcgcaaagggatactttaattcatgggctgaggagcatggcgtatatcatccagggcagagcagcattctggaaggaactgcaagtaacctggaatgccacctgtggcatatcctcgaaggcaaaaagctgcccaaggtgaagtgttctcccttttgtaacggggagatactgaagactcttaacgaagcaatcgaaaaaagcttgggtggtgcattcaatctcgactcaaagtttagacccaaacagcaatatagctgttcatgccacgtgtttagcgaggagctgatctttagtgaactatgttccttaacggagtgcctccaggacgagcaagtggtggtcccatcaaatcagattaagtgtctgctggtcggttttagcaccttgcggaacataaagatgcatattccacttgaggttcggctgcttgagagcgccgagttaactacgtttagctgctctctgcttcacgacggagaccccacataccaaagactgtttctcgactgtctcctccactccctcagagaactacacaccggcgacgttatgatcctgcccgtgctgtcttgttttacaaggttcatggccggtctgatattcgtcctgcattcttgctttaggtttatcactttcgtatgccccaccagttccgacccactgcgaacctgtgccgtcctactatgcgtgggctatcaggacctgccaaatccagtttttcggtatctacagagcgtgaatgaattattgtcaaccctcttaaactctgattctccgcagcaggtgctccaattcgttcctatggaagttctgttgaagggtgcactgttggactttctctgggatctgaatgcagccattgcgaagcgacacttacatttcataatccagagagagagagaagaaattattaactccctgcaattgcaaaattag

SEQ ID NO: 197979 - protein, 878 aa, Artificial Sequence
  derived and/or modified sequence
MDLDKPSVWGSLKQRTRPLLINLSKKKVKKNPSKPPDLRARHHLDRRLSLSVPDLLEAEALAPEGRPYSGPQSSYTSVPSSLSTAGIFPKSSSSSLKQSEEELDWSQEEASHLHVVETDSEEAYASPAERRRVSSNGIFDLQKTSLGGDAPEEPEKLCGSSDLNASMTSQHFEEQSVPGEASDGLSNLPSPFAYLLTIHLKEGRNLVVRDRCGTSDPYVKFKLNGKTLYKSKVIYKNLNPVWDEIVVLPIQSLDQKLRVKVYDRDLTTSDFMGSAFVILSDLELNRTTEHILKLEDPNSLEDDMGVIVLNLNLVVKQGDFKRHRWSNRKRLSASKSSLIRNLRLSESLKKNQLWNGIISITLLEGKNVSGGSMTEMFVQLKLGDQRYKSKTLCKSANPQWQEQFDFHYFSDRMGILDIEVWGKDNKKHEERLGTCKVDISALPLKQANCLELPLDSCLGALLMLVTLTPCAGVSVSDLCVCPLADLSERKQITQRYCLQNSLKDVKDVGILQVKVLKAADLLAADFSGKSDPFCLLELGNDRLQTHTVYKNLNPEWNKVFTFPIKDIHDVLEVTVFDEDGDKPPDFLGKVAIPLLSIRDGQPNCYVLKNKDLEQAFKGVIYLEMDLIYNPVKASIRTFTPREKRFVEDSRKLSKKILSRDVDRVKRITMAIWNTMQFLKSCFQWESTLRSTIAFAVFLITVWNFELYMIPLALLLIFVYNFIRPVKGKVSSIQDSQESTDIDDEEDEDDKESEKKGLIERIYMVQDIVSTVQNVLEEIASFGERIKNTFNWTVPFLSSLACLILAAATIILYFIPLRYIILIWGINKFTKKLRNPYSIDNNELLDFLSRVPSDVQKVQYAELKLCSSHSPLRKKRSAL

SEQ ID NO: 197980 - DNA, 2637 bp, Artificial Sequence
  derived and/or modified sequence
atggacctggacaagcccagcgtgtggggcagcctgaagcagagaaccagacccctgctgatcaacctgagcaagaagaaggtgaagaagaaccccagcaagccccccgacctgagagccagacaccacctggacagaagactgagcctgagcgtgcccgacctgctggaggccgaggccctggcccccgagggcagaccctacagcggcccccagagcagctacaccagcgtgcccagcagcctgagcaccgccggcatcttccccaagagcagcagcagcagcctgaagcagagcgaggaggagctggactggagccaggaggaggccagccacctgcacgtggtggagaccgacagcgaggaggcctacgccagccccgccgagagaagaagagtgagcagcaacggcatcttcgacctgcagaagaccagcctgggcggcgacgcccccgaggagcccgagaagctgtgcggcagcagcgacctgaacgccagcatgaccagccagcacttcgaggagcagagcgtgcccggcgaggccagcgacggcctgagcaacctgcccagccccttcgcctacctgctgaccatccacctgaaggagggcagaaacctggtggtgagagacagatgcggcaccagcgacccctacgtgaagttcaagctgaacggcaagaccctgtacaagagcaaggtgatctacaagaacctgaaccccgtgtgggacgagatcgtggtgctgcccatccagagcctggaccagaagctgagagtgaaggtgtacgacagagacctgaccaccagcgacttcatgggcagcgccttcgtgatcctgagcgacctggagctgaacagaaccaccgagcacatcctgaagctggaggaccccaacagcctggaggacgacatgggcgtgatcgtgctgaacctgaacctggtggtgaagcagggcgacttcaagagacacagatggagcaacagaaagagactgagcgccagcaagagcagcctgatcagaaacctgagactgagcgagagcctgaagaagaaccagctgtggaacggcatcatcagcatcaccctgctggagggcaagaacgtgagcggcggcagcatgaccgagatgttcgtgcagctgaagctgggcgaccagagatacaagagcaagaccctgtgcaagagcgccaacccccagtggcaggagcagttcgacttccactacttcagcgacagaatgggcatcctggacatcgaggtgtggggcaaggacaacaagaagcacgaggagagactgggcacctgcaaggtggacatcagcgccctgcccctgaagcaggccaactgcctggagctgcccctggacagctgcctgggcgccctgctgatgctggtgaccctgaccccctgcgccggcgtgagcgtgagcgacctgtgcgtgtgccccctggccgacctgagcgagagaaagcagatcacccagagatactgcctgcagaacagcctgaaggacgtgaaggacgtgggcatcctgcaggtgaaggtgctgaaggccgccgacctgctggccgccgacttcagcggcaagagcgaccccttctgcctgctggagctgggcaacgacagactgcagacccacaccgtgtacaagaacctgaaccccgagtggaacaaggtgttcaccttccccatcaaggacatccacgacgtgctggaggtgaccgtgttcgacgaggacggcgacaagccccccgacttcctgggcaaggtggccatccccctgctgagcatcagagacggccagcccaactgctacgtgctgaagaacaaggacctggagcaggccttcaagggcgtgatctacctggagatggacctgatctacaaccccgtgaaggccagcatcagaaccttcacccccagagagaagagattcgtggaggacagcagaaagctgagcaagaagatcctgagcagagacgtggacagagtgaagagaatcaccatggccatctggaacaccatgcagttcctgaagagctgcttccagtgggagagcaccctgagaagcaccatcgccttcgccgtgttcctgatcaccgtgtggaacttcgagctgtacatgatccccctggccctgctgctgatcttcgtgtacaacttcatcagacccgtgaagggcaaggtgagcagcatccaggacagccaggagagcaccgacatcgacgacgaggaggacgaggacgacaaggagagcgagaagaagggcctgatcgagagaatctacatggtgcaggacatcgtgagcaccgtgcagaacgtgctggaggagatcgccagcttcggcgagagaatcaagaacaccttcaactggaccgtgcccttcctgagcagcctggcctgcctgatcctggccgccgccaccatcatcctgtacttcatccccctgagatacatcatcctgatctggggcatcaacaagttcaccaagaagctgagaaacccctacagcatcgacaacaacgagctgctggacttcctgagcagagtgcccagcgacgtgcagaaggtgcagtacgccgagctgaagctgtgcagcagccacagccccctgagaaagaagagaagcgccctgtag

SEQ ID NO: 197981 - DNA, 2637 bp, Artificial Sequence
  derived and/or modified sequence
atggatctggataagccatccgtgtggggttcacttaaacaacgcactcgccccttactgatcaatctctcgaagaagaaggtgaagaaaaatcccagcaaaccaccggacctgcgagcccgtcaccatctggatcgcagattgtctttatctgtgccagacctgctggaggccgaagcgctcgcacccgaaggtcggccctactcaggcccacaatcctcatataccagcgtcccatcctcactctccacagccggaatctttccaaaaagcagcagcagctctttaaagcagagtgaggaggagttggattggagtcaggaggaggcctcacacttacatgtcgttgaaacggacagcgaagaagcttatgcctcacctgcggaaagacggagagttagcagcaacggcatctttgatctccaaaaaacatctcttggtggtgatgcccccgaggaacccgagaaactgtgtggcagctcagatctaaatgcatcgatgaccagccagcacttcgaggagcaatcagtgccaggggaggccagtgatggactctctaacttgccttccccctttgcatatttacttactattcaccttaaggagggccggaatcttgtagtcagggatcggtgtggaacgagtgacccctacgtcaaatttaagctgaacgggaaaaccttatacaagtccaaggttatctacaaaaatctgaacccagtgtgggacgagatcgtggttttgcctattcagtcgctcgatcaaaagctcagggttaaagtttacgatagagacctgaccacgagcgattttatggggtctgcattcgtcattctgagcgatcttgaattaaaccgtactaccgagcacatcttaaagctggaagacccgaatagtctcgaagatgacatgggagtgattgtgttaaatttgaatctggtggtgaagcagggcgacttcaagcgacaccgttggtccaatcgaaagcgcctgagtgcgagcaaatcctctctgattagaaaccttcgcttgtcagagtcacttaagaagaaccagctgtggaacgggatcatctcaataactctacttgaagggaagaatgtgtctggaggctcgatgacggagatgttcgtgcaactcaagctgggagaccagagatacaaatccaagaccctctgcaaaagcgcaaatccacagtggcaggaacagttcgattttcactacttttcagaccggatgggtatcttggatatagaagtgtggggaaaagacaacaagaaacacgaggagagactcggaacctgtaaggtcgacatctcagctttgcccctgaaacaggcaaactgtctggagttgccactcgattcctgtctaggggccctactaatgctcgtgactctcaccccctgcgcaggggtgtccgtctccgatctgtgcgtttgtcctttggccgacctgagcgagagaaagcagatcactcagagatattgtctgcagaactctctcaaggatgtaaaagacgtgggcattctgcaggtgaaggtgttaaaagcagccgatctgttggccgcagatttctccggcaaatccgaccccttctgcttgctggagttgggaaatgatcggttacagacacacaccgtgtataagaatttgaatccagagtggaataaggtctttactttccctattaaggacatccatgacgtgctcgaggtgacagtctttgatgaggatggcgacaagccaccggatttcttgggaaaagtggcaatcccactgctgagcataagggatggccagcccaattgctacgttcttaagaataaggatctggagcaagcgtttaagggagtgatctatctggagatggatctcatctacaatccggtgaaagcctcaattcgcaccttcaccccaagagagaagcgcttcgtggaagacagtcggaaactgagcaagaagatcctctccagggacgtcgaccgagtgaagagaataaccatggctatttggaacaccatgcagttcctgaaatcatgttttcagtgggagtcgacattgcggtctactatagcattcgccgttttcctgatcacggtgtggaacttcgaattgtatatgattccactcgccctccttctgattttcgtgtacaactttatccgccccgtgaagggtaaggtctcatccattcaggatagccaagaatccacagacattgacgatgaggaagatgaggatgataaagaaagcgagaagaagggactgatcgaacgcatttacatggtgcaggatattgttagtacagttcagaacgtgctggaagaaatagcgtccttcggtgagcggatcaagaacacattcaactggaccgtgccatttctctcatccctggcatgcttgatcctcgcagccgctaccataatactgtattttataccattgcggtatatcattctgatttgggggattaacaaattcaccaagaagctgaggaacccttactccatagataacaatgagctgctcgatttcctcagccgggttcctagcgatgttcagaaggtacaatatgctgaactgaagctctgttccagtcattctccactgcggaagaaacggtcggcactgtag

SEQ ID NO: 197982 - DNA, 2637 bp, Artificial Sequence
  derived and/or modified sequence
atggacctggacaagcccagcgtgtggggcagcctgaagcagaggacccggcccctgctgatcaacctgagcaagaagaaggtgaagaagaaccccagcaagcccccagacctgcgggcccggcaccacctggaccggcggctgagcctgtctgtgcctgacctgctggaggccgaggccctggcccctgagggccggccctacagcggcccccagagcagctacacctctgtgcccagcagcctgagcacagctggcatcttccccaagagcagcagcagcagcctgaagcagagcgaggaggagctggactggagccaggaggaggccagccacctgcacgtggtggagacagacagcgaggaggcctatgccagccctgctgagaggagaagagtgagcagcaatggcatctttgacctgcagaagaccagcctgggcggagatgcccctgaggagcctgagaagctgtgtggcagcagtgacctgaatgcctccatgaccagccagcactttgaggagcagagcgtgcctggagaggccagtgatggcctgagcaacctgcccagcccctttgcctacctgctgaccatccacctgaaggagggcaggaacctggtggtgcgggacagatgtggcaccagtgacccctacgtgaagttcaagctgaatggcaagaccctgtacaagagcaaggtgatctacaagaacctgaaccctgtgtgggatgaaattgtggtgctgcccatccagagcctggaccagaagctgcgggtgaaggtgtatgaccgggacctgaccaccagtgacttcatgggcagcgccttcgtcatcctgagtgacctggagctgaacagaaccacagagcacatcctgaagctggaggaccccaacagcctggaggatgacatgggcgtgattgtgctgaacctgaacctggtggtgaagcagggcgacttcaagaggcaccgctggagcaacaggaagaggctgagcgccagcaagagcagcctcatccggaacctgcggctgtctgagagcctgaagaagaaccagctgtggaatggcatcatcagcatcaccctgctggagggcaagaatgtgtctgggggctccatgacagagatgtttgtgcagctgaagctgggggaccagcgctacaagagcaagaccctgtgcaagagcgccaacccccagtggcaggagcagtttgacttccactacttcagtgacaggatgggcatcctggacatcgaggtgtggggcaaggacaacaagaagcatgaggagcggctgggcacctgcaaggtggacatcagcgccctgcccctgaagcaggccaactgcctggagctgcccctggacagctgcctgggcgccctgctgatgctggtgaccctgaccccctgtgccggcgtgtctgtgtctgacctgtgtgtgtgccccctggccgacctgtctgagaggaagcagatcacccagcgctactgcctgcagaacagcctgaaggatgtgaaggatgtgggcatcctgcaggtgaaggtgctgaaggctgctgacctgctggccgctgacttcagcggcaagagtgaccccttctgcctgctggagctgggcaatgaccggctgcagacccacacagtgtacaagaacctgaaccctgagtggaacaaggtgttcaccttccccatcaaggacatccatgatgtgctggaggtgacagtgtttgatgaagatggagacaagcccccagacttcctgggcaaggtggccatccccctgctgagcatcagagatggccagcccaactgctacgtgctgaagaacaaggacctggagcaggccttcaagggcgtcatctacctggagatggacctgatctacaaccctgtgaaggccagcatccgcaccttcaccccccgggagaagagatttgtggaggacagcaggaagctgagcaagaagatcctgagcagagatgtggacagagtgaagaggatcaccatggccatctggaacaccatgcagttcctgaagagctgcttccagtgggagagcaccctgcggagcaccatcgcctttgctgtgttcctgatcaccgtgtggaactttgagctgtacatgatccccctggccctgctgctgatctttgtgtacaacttcatccggcctgtgaagggcaaggtgagcagcatccaggacagccaggagagcacagacattgatgatgaagaagatgaagatgacaaggagagcgagaagaagggcctcatcgagcgcatctacatggtgcaggacatcgtgtccacagtgcagaatgtgctggaggagatcgccagctttggagagcgcatcaagaacaccttcaactggacagtgcccttcctgagcagcctggcctgcctgatcctggccgccgccaccatcatcctgtacttcatccccctgcgctacatcatcctgatctggggcatcaacaagttcaccaagaagctgaggaacccctacagcattgacaacaatgagctgctggacttcctgagccgggtgcccagtgatgtgcagaaggtgcagtatgcagagctgaagctgtgcagcagccacagccccctgaggaagaagaggtctgccctgtag

SEQ ID NO: 197983 - DNA, 3965 bp, Artificial Sequence
  derived and/or modified sequence
atggatctggataaaccatctgtttggggctcattaaaacagcggaccaggccattgttgatcaacttgagcaagaagaaggtgaaaaagaacccaagtaagcccccagatctacgggcaaggcatcacttggaccgccgtctcagcctctctgtgcctgatctcctggaggctgaggccttggccccagagggccggccttactccgggccacagtcttcctacacctcggtgcccagcagtctgtccactgcagggatctttcccaagagcagcagtagctccttgaaacagtctgaagaagaattggattggagccaggaagaagccagtcacctccatgtggtggaaacagactcagaggaggcctatgcctctcctgctgagcggagacgggtgtccagcaacggcatctttgatcttcagaaaacttcccttggaggggatgcaccagaagagccagagaagctatgtggaagcagtgacctgaatgcttctatgacatctcaacattttgaagaacaatctgtaccgggggaagccagtgatggcttgagtaacctccccagcccttttgcgtacctcctcaccatacacctgaaggaaggccggaacctggttgtccgagatcgctgtggcacaagtgatccttatgtgaaatttaagctgaatgggaagacgctgtacaaaagtaaagtcatatataagaacttgaacccagtatgggatgagatagttgtattgccaatccaaagccttgatcaaaagctacgtgtgaaggtatatgatcgagatttaaccacatctgatttcatgggttctgcatttgtcattctcagtgatcttgagcttaacagaacaactgaacatattttaaaactggaagatccaaacagtttagaagatgacatgggagtgatcgtgttaaatttgaacctagtggtaaaacagggtgatttcaagagacaccgttggtcaaatcggaagcgattaagtgccagcaagtcctctttgatacgcaacctacggctctctgagtccttgaaaaagaaccaactctggaacgggattataagtataactttgttggaagggaagaatgtctcaggaggaagcatgacagagatgtttgtccagttaaaactgggagatcagaggtataaaagtaagacactgtgtaagagtgcaaatccgcagtggcaggaacagtttgactttcactacttctctgacaggatgggcattttggacattgaagtgtggggaaaggacaacaaaaagcatgaggaacgtctgggcacgtgtaaagtggatatctcggcactccctctgaagcaagccaactgcctggagctgccactggacagctgtctgggggctctccttatgttggtcacacttacaccctgtgcgggggtctccgtctctgatctgtgtgtctgccccttagcagacctcagcgaaagaaagcagattacccagcgatattgcttacagaactccctgaaagatgtgaaagacgtcggcattctacaagtgaaggttttaaaggcagcagatctcttagcggcagatttctcagggaagagtgacccattttgcttgttggagttaggcaatgaccgacttcagacgcataccgtctacaaaaacctcaaccctgaatggaacaaagtttttacatttcccattaaagatatccatgatgttttggaagtgacagtgtttgatgaagatggagataaacccccagattttcttggaaaagttgccattcccttgctgtccattagagatggacaaccgaattgttatgtactaaagaataaagatttagaacaagcttttaaaggagttatttacttagagatggaccttatatataatccggtgaaagcaagtattaggacttttactccccgggaaaagcgctttgttgaagacagccgcaagctgtccaaaaagatcttatcaagagatgtggaccgtgtgaaaagaatcactatggcaatatggaatacaatgcagttccttaaaagctgcttccagtgggaatccacattaagaagtacaatagcattcgcggtatttttgatcactgtctggaattttgaactatatatgatccccttggcattgttgctgatctttgtctacaatttcatcagacctgtgaaaggcaaggtcagcagcatccaggacagccaggagagcacagacatagatgacgaggaggatgaagatgacaaggaatctgagaaaaaggggttgattgaaagaatctatatggtacaggatattgtttcaactgttcaaaacgtcttggaggaaatagcttcttttggagaaaggattaagaacacatttaactggacggtccccttcctttcatctctggcctgtttgattctggcagcagccaccatcattttgtatttcattccactgcggtacatcattttaatctggggcataaataaatttactaagaagcttcgaaatccctattccatcgacaataatgagctactagacttcctctctagggtaccgtctgatgttcaaaaggtgcagtatgcagaattgaaactctgcagcagccacagccccctgcggaagaagcgcagcgctctctagggcacacaccgactttggacagcagcacccaatattgtgtttggttgagtagaccaatgttatggctgtttcagtggtacccaaggtgtccttctgaaatgcatgccctgtggcaccctctgtatacttcctcctccttcacgtgcacagacatacacacatgtgcacacaccctcatgcatgggtgtcctagttgcgtagagggtcagcccagcgaaaagcaacaaccccaagactgtgaaagactaacatccattctgaaataggagataacaaggctgccatggatctgaacaccaccttccttgagaacagccaggagcccacttggattcaagagtgactttgaacttgttttcacacctccaacagactctcattaagattcagttatttccgctccccagccccacactcctttcagattatcgttcatgggcgtaagtctcttctcagagttaacaagtctttggtagtcatcctctgtccaaatattgtatattattaaaaggcatttttaataattaccagaattagctcaaacctttagggatctttcagccatgattattaaggatatgtatgtgaatttttgggaaacctctcggtgctggatgccagcctacagcagggtccattgctggcaatggatggcccaggaaggtccctagagatcactcacttgaaaaatgagggtcccatgaaagtatttggttgccttctgatgccacttcttctcactttactttttgcttattttcaaaatattataaaatgtcaacatataatttcagaaaggcaggtgggggtaggggagaaatgaatgaataaattctctaggtatttagaaagataagaaactgaagaccgagagactaataaggctgcttacctaattattataatcatttcatttgcctgaatgttttaagcaggaagtagaaatactttggctgcccaaatgtatcttttgttcctcttagaagtaaaataagctacatacaataaaaatttatttcagaaccccatttctagaaaataccaccccagagtcctcatttgatagcatctgtctcctgcagacctcatcattccacagtatttccctgccatgtaaaaatcctgactttgtgcgtatataaaatgtatgcaattaagtctgtttaaatgatatttaagttttaaagactgtattttgttgacacatactttgtgcagtttttatgtatgtatgtattataaaaaaagttaaggttaaaaagatctcatttaatagtgagttcactatttttttttttttgtctctgggttgtaatttaataatcttc

SEQ ID NO: 197984 - DNA, 2637 bp, Artificial Sequence
  derived and/or modified sequence
atggacctggacaagcccagcgtgtggggcagcctgaagcagcggactcgtccactgctcatcaatctgagtaagaagaaagtcaagaagaacccgagtaaaccacccgacctcagggctaggcatcaccttgacagaagactctctctgtccgtgcctgatctcttggaggccgaagcactggcccctgaaggccgcccctattcaggcccgcagtcatcctatacctctgttcctagctccctctccacagcaggtattttccccaagtccagctcttcctccctaaagcaatccgaagaagagctagactggagtcaggaagaggccagccacctacatgtagtagagacagactccgaagaggcatatgccagcccagccgaaagacgccgagtctcaagtaatggtatcttcgatctgcagaaaacctctctaggaggggatgcccccgaggaaccggaaaagctatgtgggagttcagatctaaatgcttctatgacctcacaacatttcgaagaacaatcagtccctggtgaggcatccgacggcctgtcaaacctgccctcccctttcgcctatctcttgacgatccacttaaaggaagggcgcaatctggttgtccgggatcggtgtggtaccagtgatccttacgtgaaattcaagctcaatgggaaaaccctctataaatccaaggtgatctataagaacttgaatccagtgtgggatgagatcgtggtcttgcccatacaatccctggatcagaaacttagagtgaaggtgtacgatagggacctcactacctccgacttcatgggaagcgcattcgtgatactgtctgatctcgaactgaacagaacaaccgagcatattctaaagcttgaagaccctaactctctggaggacgatatgggggtcatagtgctcaatttaaacctcgtcgtgaagcaaggagacttcaaacggcatcgctggagtaatagaaaaagactgtccgcgtctaaatcaagtctgataaggaacttgcgactgtctgaaagcttaaaaaaaaatcagctttggaacggaataattagtattacactgctcgaggggaagaacgtatccggtggaagcatgaccgagatgttcgtgcagctcaaactgggagaccaacgctataagagcaagactctctgcaagagcgccaacccacagtggcaggagcagttcgacttccactacttttccgaccgcatggggatcctcgatatcgaggtgtggggcaaagacaataagaagcatgaagaacgactcggtacttgcaaagtggatatttccgcgctcccacttaagcaggcaaactgtctggagctgccattggactcatgcctaggtgctctcttgatgctggtaacactcactccctgcgccggagtttctgtctcagatctatgcgtctgtcccctcgctgatctctcagagcgaaagcagatcacacagcgctattgcctgcagaactcattgaaagacgttaaggacgtcggcatcctgcaggtgaaggtgctcaaagctgccgatctcctggctgctgacttttctggaaagtctgaccctttttgcctcttggagttgggtaatgaccggcttcagactcacacggtctacaaaaacctgaaccccgaatggaacaaggtgttcacatttccaatcaaagatattcacgatgtcctggaagtgaccgtgtttgatgaagatggcgacaagcccccggactttctgggcaaggtggcgattcccctgctctcaatacgagacggccagccgaactgctacgtcctgaaaaacaaggacctggagcaggccttcaaaggcgttatctatctggaaatggatttgatctataatcctgtgaaagcatcgattagaacattcacaccccgggagaaaagatttgtggaggattcaaggaaactgagtaaaaagattctgtctagagacgtggatcgggtgaaaagaattaccatggcaatatggaacactatgcagttcctcaaatcctgtttccagtgggaatcaacccttcggagtaccattgccttcgctgtgttcctgatcacagtatggaacttcgaactatacatgatacccctggccttattattgattttcgtctacaatttcattcggccagtcaagggaaaggtgagctccatccaggactctcaggagtccaccgatatagacgacgaggaggatgaggacgataaggaatccgagaaaaaggggctcatcgaaagaatttacatggtccaggatattgtaagtacggtgcaaaatgtcctggaggaaatagcatcctttggggaacgtattaagaatacatttaattggactgttccatttctctctagcttagcttgcctaattttggctgccgccacaattatcctatattttattccactacgatacatcatactgatctggggtatcaataaattcactaagaagctgcggaacccctacagcattgataataatgagctgctggattttctgtccagagtccctagtgacgtgcagaaagtgcagtatgcagaactgaaactctgctcctcacactctcccctgcggaaaaagcggagtgcgctgtag

SEQ ID NO: 197985 - DNA, 2637 bp, Artificial Sequence
  derived and/or modified sequence
atggatctggacaaaccctctgtctgggggagcctcaaacagcggacccgcccactgttaatcaatctgagcaagaagaaagtcaagaagaatcccagcaaacctcccgacctgagagcccgacatcacctggataggaggctctccctgagcgtgccagatctgctggaagcagaagccctcgctcccgaaggacggccatattctggccctcagtctagctacacatcggtgccctctagcctgtcaacagctggcatttttccgaaatcgagttcttccagcctgaaacagtctgaggaagagctagactggtcccaggaggaggcttctcacctccatgtcgtagaaacggattctgaggaagcgtacgcctcacccgctgagcgcagacgcgtgtctagcaatggaatttttgaccttcagaagacatccctaggcggtgacgctcccgaagagcccgagaagctgtgtgggtcatcggacctgaacgcaagcatgacctctcaacacttcgaggaacaatcagtccccggtgaagcctccgatggcctgagcaacctgccctccccatttgcctatttgctgacaattcacctgaaggaggggcgaaacctggtggtgcgggatcggtgtgggacatcagatccctacgtgaaattcaagctcaacggcaaaacgctctacaaatccaaagtgatctataaaaatctgaaccctgtgtgggacgaaattgttgtgctgccaatccagtccttagaccaaaagttgcgagtcaaggtttatgaccgcgatctgactacatctgacttcatggggtccgcctttgtaattttgtctgacctcgagctgaatcgcaccaccgagcacatcttgaaactggaagatccgaatagccttgaagacgacatgggcgtgatcgtgctgaatctgaatcttgtggtaaaacagggggatttcaagaggcaccggtggtcaaaccggaagaggcttagcgcctctaagagttccctgataaggaacctgcgcctatcagaatcgcttaaaaagaatcaactctggaatggcatcatttcaatcacactgctggagggaaaaaatgtgtcaggagggagtatgacggagatgtttgtgcagttaaagctgggcgatcaaaggtacaaatccaagaccctctgtaagtctgcaaaccctcaatggcaagagcaatttgacttccactacttttctgaccggatgggaatactggacatcgaagtatggggtaaggacaacaagaagcacgaggagagactcggaacatgtaaagtagatatttccgctttgccgctcaagcaggctaactgcctcgagctgcccctggacagctgtcttggcgctctcctgatgctggtgaccttgaccccatgtgccggagtgagcgtttcagatctgtgcgtctgtcccctggccgacttgtccgaacgtaagcagatcacacaacggtattgtctgcagaactctttgaaagacgtaaaagatgtaggtattcttcaggttaaggtgttgaaggccgctgacttgctcgcagccgacttcagtgggaaatccgacccattctgcctgcttgaactgggtaacgatcggctgcagacccacactgtttataaaaacctgaatcctgagtggaacaaggtattcacatttcccattaaggacatacacgatgttctggaggtcactgtgttcgacgaagacggagacaaaccaccagatttcctgggaaaagtggcgattccgcttctgtctatcagagacggccagccgaactgttatgttctgaagaataaagatctggagcaggcctttaagggtgttatttaccttgaaatggatttaatctataaccccgtgaaggcttctatccggactttcactccgagggaaaagcgcttcgtcgaggactccaggaagctgagcaagaagatcctctctcgggacgtggatcgagtgaaacgcatcacgatggccatttggaacacaatgcagttcctgaagtcctgtttccagtgggagagcacgctgcgctctacaatcgcatttgctgtcttcctcataactgtgtggaatttcgagctgtacatgatccccctcgcgctgctgctgatctttgtttataactttatcagaccagtgaagggaaaggtctccagtattcaggattcacaggagagcactgatatcgacgatgaagaagatgaggatgacaaagagtctgaaaagaagggactgatcgagaggatttatatggttcaggatatcgtgagcacagtccagaatgtcctcgaagagatcgcctcattcggtgagagaataaaaaatacgtttaattggaccgttccttttctgtccagccttgcttgtcttattttggctgccgctacgattatactgtactttatcccattgcggtacatcatccttatttgggggatcaacaagtttaccaagaaattaaggaacccctacagtatcgataataatgagttgttggactttctgtcgcgcgttccttctgacgtccagaaagttcaatacgcagagctcaagttgtgctcatctcacagtcccctccgaaaaaagcgctccgcactctag

SEQ ID NO: 197986 - protein, 1430 aa, Artificial Sequence
  derived and/or modified sequence
MTSAAEIKKPPVAPKPKFVVANNKPAPPPIAPKPDIVISSVPQSTKKMKPAIAPKPKVLKTSPVREIGQSPSRKIMLNLEGHKQELAESTDNFNCKYEGNQSNDYISPMCSCSSECIHKLGHRENLCVKQLVLEPLEMNENLENSKIDETLTIKTRSKCDLYGEKAKNQGGVVLKASVLEEELKDALIHQMPPFISAQKHRPTDSPEMNGGCNSNGQFRIEFADLSPSPSSFEKVPDHHSCHLQLPSDECEHFETCQDDSEKSNNCFQSSELEALENGKRSTLISSDGVSKKSEVKDLGPLEIHLVPYTPKFPTPKPRKTRTARLLRQKCVDTPSESTEEPGNSDSSSSCLTENSLKINKISVLHQNVLCKQEQVDKMKLGNKSELNMESNSDAQDLVNSQKAMCNETTSFEKMAPSFDKDSNLSSDSTTVDGSSMSLAVDEGTGFIRCTVSMSLPKQLKLTCNEHLQSGRNLGVSAPQMQKESVIKEENSLRIVPKKPQRHSLPATGVLKKAASEELLEKSSYPSSEEKSSEKSLERNHLQHLCAQNRGVSSSFDMPKRASEKPVWKLPHPILPFSGNPEFLKSVTVSSNSEPSTALTKPRAKSLSAMDVEKCTKPCKDSTKKNSFKKLLSMKLSICFMKSDFQKFWSKSSQLGDTTTGHLSSGEQKGIESDWQGLLVGEEKRSKPIKAYSTENYSLESQKKRKKSRGQTSAANGLRAESLDDQMLSRESSSQAPYKSVTSLCAPEYENIRHYEEIPEYENLPFIMAIRKTQELEWQNSSSMEDADANVYEVEEPYEAPDGQLQLGPRHQHSSSGASQEEQNDLGLGDLPSDEEEIINSSDEDDVSSESSKGEPDPLEDKQDEDNGMKSKVHHIAKEIMSSEKVFVDVLKLLHIDFRDAVAHASRQLGKPVIEDRILNQILYYLPQLYELNRDLLKELEERMLHWTEQQRIADIFVKKGPYLKMYSTYIKEFDKNIALLDEQCKKNPGFAAVVREFEMSPRCANLALKHYLLKPVQRIPQYRLLLTDYLKNLIEDAGDYRDTQDALAVVIEVANHANDTMKQGDNFQKLMQIQYSLNGHHEIVQPGRVFLKEGILMKLSRKVMQPRMFFLFNDALLYTTPVQSGMYKLNNMLSLAGMKVRKPTQEAYQNELKIESVERSFILSASSATERDEWLEAISRAIEEYAKKRITFCPSRSLDEADSENKEEVSPLGSKAPIWIPDTRATMCMICTSEFTLTWRRHHCRACGKIVCQACSSNKYGLDYLKNQPARVCEHCFQELQKLDHQHSPRIGSPGNHKSPSSALSSVLHSIPSGRKQKKIPAALKEVSANTEDSSMSGYLYRSKGNKKPWKHFWFVIKNKVLYTYAASEDVAALESQPLLGFTVIQVKDENSESKVFQLLHKNMLFYVFKAEDAHSAQKWIEAFQEGTIL

SEQ ID NO: 197987 - protein, 1374 aa, Artificial Sequence
  derived and/or modified sequence
MTSAAEIKKPPVAPKPKFVVANNKPAPPPIAPKPDIVISSVPQSTKKMKPAIAPKPKVLKTSPVREIGQSPSRKIMLNLEGHKQELAESTDNFNCKYEGNQSNDYISPMCSCSSECIHKLGHRENLCVKQLVLEPLEMNENLENSKIDETLTIKTRSKCDLYGEKAKNQGGVVLKASVLEEELKDALIHQMPPFISAQKHRPTDSPEMNGGCNSNGQFRIEFADLSPSPSSFEKVPDHHSCHLQLPSDECEHFETCQDDSEKSNNCFQSSELEALENGKRSTLISSDGVSKKSEVKDLGPLEIHLVPYTPKFPTPKPRKTRTARLLRQKCVDTPSESTEEPGNSDSSSSCLTENSLKINKISVLHQNVLCKQEQVDKMKLGNKSELNMESNSDAQDLVNSQKAMCNETTSFEKMAPSFDKDSNLSSDSTTVDGSSMSLAVDEGTGFIRCTVSMSLPKQLKLTCNEHLQSGRNLGVSAPQMQKESVIKEENSLRIVPKKPQRHSLPATGVLKKAASEELLEKSSYPSSEEKSSEKSLERNHLQHLCAQNRGVSSSFDMPKRASEKPVWKLPHPILPFSGNPEFLKSVTVSSNSEPSTALTKPRAKSLSAMDVEKCTKPCKDSTKKNSFKKLLSMKLSICFMKSDFQKFWSKSSQLGDTTTGHLSSGEQKGIESDWQGLLVGEEKRSKPIKAYSTENYSLESQKKRKKSRGQTSAANGLRAESLDDQMLSRESSSQAPYKSVTSLCAPEYENIRHYEEIPEYENLPFIMAIRKTQELEWQNSSSMEDADANVYEVEEPYEAPDGQLQLGPRHQHSSSGASQEEQNDLGLGDLPSDEEEIINSSDEDDVSSESSKGEPDPLEDKQDEDNGMKSKVHHIAKEIMSSEKVFVDVLKLLHIDFRDAVAHASRQLGKPVIEDRILNQILYYLPQLYELNRDLLKELEERMLHWTEQQRIADIFVKKGPYLKMYSTYIKEFDKNIALLDEQCKKNPGFAAVVREFEMSPRCANLALKHYLLKPVQRIPQYRLLLTDYLKNLIEDAGDYRDTQDALAVVIEVANHANDTMKQGDNFQKLMQIQYSLNGHHEIVQPGRVFLKEGILMKLSRKVMQPRMFFLFNDALLYTTPVQSGMYKLNNMLSLAGMKVRKPTQEAYQNELKIESVERSFILSASSATERDEWLEAISRAIEEYAKKRITFCPSRSLDEADSENKEEVSPLGSKAPIWIPDTRATMCMICTSEFTLTWRRHHCRACGKIVCQACSSNKYGLDYLKNQPARVCEHCFQELQKLDHQHSPRIGSPGNHKSPSSALSSVLHSIPSGRKQKKIPAALKEVSANTEDSSMSGYLYRSKGNKKPWKHFWFVIKNKVLYTYAASEVRSEI

SEQ ID NO: 197988 - protein, 1206 aa, Artificial Sequence
  derived and/or modified sequence
MTSAAEIKKPPVAPKPKFVVANNKPAPPPIAPKPDIVISSVPQSTKKMKPAIAPKPKVLKTSPVREIGQSPSRKIMLNLEGHKQELAESTDNFNCKYEGNQSNDYISPMCSCSSECIHKLGHRENLCVKQLVLEPLEMNENLENSKIDETLTIKTRSKCDLYGEKAKNQGGVVLKASVLEEELKDALIHQMPPFISAQKHRPTDSPEMNGGCNSNGQFRIEFADLSPSPSSFEKVPDHHSCHLQLPSDECEHFETCQDDSEKSNNCFQSSELEALENGKRSTLISSDGVSKKSEVKDLGPLEIHLVPYTPKFPTPKPRKTRTARLLRQKCVDTPSESTEEPGNSDSSSSCLTENSLKINKISVLHQNVLCKQEQVDKMKLGNKSELNMESNSDAQDLVNSQKAMCNETTSFEKMAPSFDKDSNLSSDSTTVDGSSMSLAVDEGTGFIRCTVSMSLPKQLKLTCNEHLQSGRNLGVSAPQMQKESVIKEENSLRIVPKKPQRHSLPATGVLKKAASEELLEKSSYPSSEEKSSEKSLERNHLQHLCAQNRGVSSSFDMPKRASEKPVWKLPHPILPFSGNPEFLKSVTVSSNSEPSTALTKPRAKSLSAMDVEKCTKPCKDSTKKNSFKKLLSMKLSICFMKSDFQKFWSKSSQLGDTTTGHLSSGEQKGIESDWQGLLVGEEKRSKPIKAYSTENYSLESQKKRKKSRGQTSAANGLRAESLDDQMLSRESSSQAPYKSVTSLCAPEYENIRHYEEIPEYENLPFIMAIRKTQELEWQNSSSMEDADANVYEVEEPYEAPDGQLQLGPRHQHSSSGASQEEQNDLGLGDLPSDEEEIINSSDEDDVSSESSKGEPDPLEDKQDEDNGMKSKVHHIAKEIMSSEKVFVDVLKLLHIDFRDAVAHASRQLGKPVIEDRILNQILYYLPQLYELNRDLLKELEERMLHWTEQQRIADIFVKKGPYLKMYSTYIKEFDKNIALLDEQCKKNPGFAAVVREFEMSPRCANLALKHYLLKPVQRIPQYRLLLTDYLKNLIEDAGDYRDTQDALAVVIEVANHANDTMKQGDNFQKLMQIQYSLNGHHEIVQPGRVFLKEGILMKLSRKVMQPRMFFLFNDALLYTTPVQSGMYKLNNMLSLAGMKVRKPTQEAYQNELKIESVERSFILSASSATERDEWLEAISRAIEEYAKKRITFCPSRSLDEADSENK

SEQ ID NO: 197989 - DNA, 4293 bp, Artificial Sequence
  derived and/or modified sequence
atgaccagcgccgccgagatcaagaagccccccgtggcccccaagcccaagttcgtggtggccaacaacaagcccgcccccccccccatcgcccccaagcccgacatcgtgatcagcagcgtgccccagagcaccaagaagatgaagcccgccatcgcccccaagcccaaggtgctgaagaccagccccgtgagagagatcggccagagccccagcagaaagatcatgctgaacctggagggccacaagcaggagctggccgagagcaccgacaacttcaactgcaagtacgagggcaaccagagcaacgactacatcagccccatgtgcagctgcagcagcgagtgcatccacaagctgggccacagagagaacctgtgcgtgaagcagctggtgctggagcccctggagatgaacgagaacctggagaacagcaagatcgacgagaccctgaccatcaagaccagaagcaagtgcgacctgtacggcgagaaggccaagaaccagggcggcgtggtgctgaaggccagcgtgctggaggaggagctgaaggacgccctgatccaccagatgccccccttcatcagcgcccagaagcacagacccaccgacagccccgagatgaacggcggctgcaacagcaacggccagttcagaatcgagttcgccgacctgagccccagccccagcagcttcgagaaggtgcccgaccaccacagctgccacctgcagctgcccagcgacgagtgcgagcacttcgagacctgccaggacgacagcgagaagagcaacaactgcttccagagcagcgagctggaggccctggagaacggcaagagaagcaccctgatcagcagcgacggcgtgagcaagaagagcgaggtgaaggacctgggccccctggagatccacctggtgccctacacccccaagttccccacccccaagcccagaaagaccagaaccgccagactgctgagacagaagtgcgtggacacccccagcgagagcaccgaggagcccggcaacagcgacagcagcagcagctgcctgaccgagaacagcctgaagatcaacaagatcagcgtgctgcaccagaacgtgctgtgcaagcaggagcaggtggacaagatgaagctgggcaacaagagcgagctgaacatggagagcaacagcgacgcccaggacctggtgaacagccagaaggccatgtgcaacgagaccaccagcttcgagaagatggcccccagcttcgacaaggacagcaacctgagcagcgacagcaccaccgtggacggcagcagcatgagcctggccgtggacgagggcaccggcttcatcagatgcaccgtgagcatgagcctgcccaagcagctgaagctgacctgcaacgagcacctgcagagcggcagaaacctgggcgtgagcgccccccagatgcagaaggagagcgtgatcaaggaggagaacagcctgagaatcgtgcccaagaagccccagagacacagcctgcccgccaccggcgtgctgaagaaggccgccagcgaggagctgctggagaagagcagctaccccagcagcgaggagaagagcagcgagaagagcctggagagaaaccacctgcagcacctgtgcgcccagaacagaggcgtgagcagcagcttcgacatgcccaagagagccagcgagaagcccgtgtggaagctgccccaccccatcctgcccttcagcggcaaccccgagttcctgaagagcgtgaccgtgagcagcaacagcgagcccagcaccgccctgaccaagcccagagccaagagcctgagcgccatggacgtggagaagtgcaccaagccctgcaaggacagcaccaagaagaacagcttcaagaagctgctgagcatgaagctgagcatctgcttcatgaagagcgacttccagaagttctggagcaagagcagccagctgggcgacaccaccaccggccacctgagcagcggcgagcagaagggcatcgagagcgactggcagggcctgctggtgggcgaggagaagagaagcaagcccatcaaggcctacagcaccgagaactacagcctggagagccagaagaagagaaagaagagcagaggccagaccagcgccgccaacggcctgagagccgagagcctggacgaccagatgctgagcagagagagcagcagccaggccccctacaagagcgtgaccagcctgtgcgcccccgagtacgagaacatcagacactacgaggagatccccgagtacgagaacctgcccttcatcatggccatcagaaagacccaggagctggagtggcagaacagcagcagcatggaggacgccgacgccaacgtgtacgaggtggaggagccctacgaggcccccgacggccagctgcagctgggccccagacaccagcacagcagcagcggcgccagccaggaggagcagaacgacctgggcctgggcgacctgcccagcgacgaggaggagatcatcaacagcagcgacgaggacgacgtgagcagcgagagcagcaagggcgagcccgaccccctggaggacaagcaggacgaggacaacggcatgaagagcaaggtgcaccacatcgccaaggagatcatgagcagcgagaaggtgttcgtggacgtgctgaagctgctgcacatcgacttcagagacgccgtggcccacgccagcagacagctgggcaagcccgtgatcgaggacagaatcctgaaccagatcctgtactacctgccccagctgtacgagctgaacagagacctgctgaaggagctggaggagagaatgctgcactggaccgagcagcagagaatcgccgacatcttcgtgaagaagggcccctacctgaagatgtacagcacctacatcaaggagttcgacaagaacatcgccctgctggacgagcagtgcaagaagaaccccggcttcgccgccgtggtgagagagttcgagatgagccccagatgcgccaacctggccctgaagcactacctgctgaagcccgtgcagagaatcccccagtacagactgctgctgaccgactacctgaagaacctgatcgaggacgccggcgactacagagacacccaggacgccctggccgtggtgatcgaggtggccaaccacgccaacgacaccatgaagcagggcgacaacttccagaagctgatgcagatccagtacagcctgaacggccaccacgagatcgtgcagcccggcagagtgttcctgaaggagggcatcctgatgaagctgagcagaaaggtgatgcagcccagaatgttcttcctgttcaacgacgccctgctgtacaccacccccgtgcagagcggcatgtacaagctgaacaacatgctgagcctggccggcatgaaggtgagaaagcccacccaggaggcctaccagaacgagctgaagatcgagagcgtggagagaagcttcatcctgagcgccagcagcgccaccgagagagacgagtggctggaggccatcagcagagccatcgaggagtacgccaagaagagaatcaccttctgccccagcagaagcctggacgaggccgacagcgagaacaaggaggaggtgagccccctgggcagcaaggcccccatctggatccccgacaccagagccaccatgtgcatgatctgcaccagcgagttcaccctgacctggagaagacaccactgcagagcctgcggcaagatcgtgtgccaggcctgcagcagcaacaagtacggcctggactacctgaagaaccagcccgccagagtgtgcgagcactgcttccaggagctgcagaagctggaccaccagcacagccccagaatcggcagccccggcaaccacaagagccccagcagcgccctgagcagcgtgctgcacagcatccccagcggcagaaagcagaagaagatccccgccgccctgaaggaggtgagcgccaacaccgaggacagcagcatgagcggctacctgtacagaagcaagggcaacaagaagccctggaagcacttctggttcgtgatcaagaacaaggtgctgtacacctacgccgccagcgaggacgtggccgccctggagagccagcccctgctgggcttcaccgtgatccaggtgaaggacgagaacagcgagagcaaggtgttccagctgctgcacaagaacatgctgttctacgtgttcaaggccgaggacgcccacagcgcccagaagtggatcgaggccttccaggagggcaccatcctgtag

SEQ ID NO: 197990 - DNA, 9288 bp, Artificial Sequence
  derived and/or modified sequence
agtgctcgcccgcccgaccccggcggctcgcgcccgggagcgccgcagggtcgctagagtcggccgcgtcctttgtgtggcgctcaggctgcgccgcggggcggcgggacggaatgtgggcgctgcgggggcttttctctcctacccgaactgtgggaacaatggactgaaaggggaagatggattgaggggccgagcggggaagcgagctgcaccggggaatcatgacttctgcagccgagataaagaagccaccagtggcccccaagcccaagtttgttgtggcaaataataagccagccccacctcctattgcacctaaacccgacattgtgatttctagtgttccacagtcgacaaagaaaatgaaaccagcaatagccccaaaaccaaaagtcctgaagacctcacctgttcgagagattgggcagtcgccatcaaggaaaatcatgttgaacctggaagggcataaacaggaattagctgaaagcactgacaactttaattgtaaatatgaaggcaatcagagcaatgattatatttcaccaatgtgttcctgcagttctgagtgtatccataagctgggccatagagagaatttgtgtgtaaagcagcttgttttagagcccctggaaatgaatgaaaatttagaaaacagtaaaattgatgagactttgactataaaaactaggagtaaatgtgatttgtatggtgaaaaagccaagaaccagggtggggttgttttaaaggcaagcgttttagaagaggagctcaaagatgccttaatacaccaaatgccaccttttatttctgcacagaagcacaggcccacagacagcccagaaatgaatggtggctgtaattcaaatggacaattcagaattgaatttgcggatttgtcaccttccccatccagctttgaaaaagttcctgatcatcacagttgccacttacagcttcctagtgatgaatgtgaacattttgaaacttgccaggatgacagtgaaaaaagcaataattgctttcagtcatctgaactagaggctctggaaaatgggaaaaggagtactttaatatcttcagatggagttagtaagaaatcagaagtcaaagaccttggtcccttagaaattcatttagtaccatataccccaaaatttccaactcccaagcccagaaagacacgaactgctcgtctgttacgccaaaagtgtgtagatactcctagtgaaagcactgaagaaccggggaattcagacagtagctcttcctgtcttactgaaaatagtttgaaaatcaataaaatcagtgttctgcatcagaatgttttgtgtaagcaggaacaggtggataaaatgaagctaggaaataaaagtgaattgaatatggaatccaacagtgatgcacaggacttagtcaattcacagaaagccatgtgtaatgaaacaacttcctttgaaaaaatggcaccttcttttgataaagactctaatttgagttctgacagcacaactgtagatggttctagtatgtcgcttgctgtggacgaagggaccggttttataagatgtactgtatctatgagcctgcctaagcagctcaaattaacttgcaatgaacatttgcaatctgggagaaacctgggagtttctgcccctcaaatgcaaaaggaatctgttataaaagaggaaaattctctacgaattgtccccaaaaaacctcaaagacatagcttgcctgctacaggagtgcttaaaaaggctgcctccgaggagcttttggaaaaaagttcttatccttcaagtgaagaaaaaagttcagagaagagtctagaaagaaatcaccttcagcatttgtgtgcccaaaaccgtggtgtgtcatcctcctttgatatgcctaaacgggcttcagaaaagccagtgtggaagttacctcatcctattttacccttttcagggaacccagaattcttaaagtctgtcaccgtatcgtcaaacagtgagccttcaacagccctaaccaagcccagagcaaaatcgttatctgctatggatgtggaaaagtgcactaagccttgcaaagactctacaaagaaaaactcttttaaaaagttgctcagcatgaaactgtccatctgtttcatgaagagtgactttcaaaaattttggtccaagagtagccaactcggagacaccaccacaggccacctctccagtggggagcagaaggggattgaaagtgattggcaaggcttgttggtaggagaggagaagagaagtaaacccatcaaggcatattccacagaaaactatagcctggaatctcaaaagaagaggaagaagtctcggggccagaccagtgcagctaatggtctgagagctgagtctttggatgaccaaatgctctcccgggagtcatcatctcaggcaccttacaagtctgttacaagcctctgtgcaccggagtatgaaaatatacgccattatgaggaaataccagagtacgagaacttgccatttattatggctatacggaaaactcaagagttggaatggcagaattccagcagcatggaggacgctgatgcaaatgtgtatgaggtagaagagccgtatgaagctccagatggccagctgcagcttggacccagacatcagcattccagttcaggagcatcccaggaggaacagaatgatcttggtcttggtgaccttccctctgatgaggaggaaatcatcaacagttctgatgaagatgatgtcagctctgagtcaagtaaaggagagcctgacccactggaagataaacaggatgaagataatggaatgaaaagtaaagttcatcatattgccaaggagatcatgagctcagagaaagtgtttgtggatgtgttaaaacttttgcatattgatttccgggatgcagtagctcatgcttccaggcaacttgggaaaccagtgattgaggaccggattctaaatcagatcctatactacttgcctcagctgtatgagctcaaccgggatctcttgaaggaactggaggaaagaatgttgcactggactgaacaacaaagaattgctgatatctttgtaaagaagggaccatatctaaaaatgtattccacatacatcaaagaatttgataagaatatagccttgctggatgaacagtgcaagaaaaatccaggttttgctgctgttgttagagaatttgagatgagccctcgctgtgctaatctggccctcaagcactacctgctcaagccggttcagaggatcccccagtacaggctgttgctgacagattatttgaagaatctcatagaagatgctggagattacagagacactcaagatgcccttgctgttgttatagaggtagccaaccacgccaatgacaccatgaagcaaggagacaactttcagaaacttatgcaaattcagtacagcttaaatggacaccatgaaattgtgcagcctggtcgggtttttctcaaagaaggaattctgatgaagctgtctcggaaagtgatgcaacctcgaatgtttttcctgtttaatgatgccctgctgtatacaacaccagtgcagtctgggatgtataaactgaacaacatgctctcactggctggaatgaaggtcagaaaacctacccaagaagcctatcagaatgaattaaagattgaaagtgtagaacgttccttcattctctcagccagttctgccacagaaagggatgaatggctagaagcgatttccagggcaatagaagagtatgccaagaaaagaatcaccttctgtcctagtaggagtcttgatgaggcagactcagaaaataaagaagaagttagtcctcttggatcgaaggctcccatctggattcctgataccagagccacaatgtgtatgatctgcacaagcgaattcactctcacctggagacgacaccactgccgggcctgtggaaagattgtatgccaagcttgttcgtctaataagtatggcttagattacctgaaaaatcaaccagcaagagtatgtgaacattgtttccaagaactgcagaaattagatcaccagcactcccctaggattggatctcctggaaatcacaaatctccttcaagtgccttatcatcagtcttacatagcattccatcagggaggaaacagaaaaaaatcccagctgctctcaaagaagtatcagcaaacacagaggattcttctatgagtggctacttgtacagatcaaagggcaataaaaaaccctggaaacacttttggtttgtcataaaaaataaagtactatatacatatgctgcaagtgaggacgtggccgctttggagagtcagcctttattaggattcactgttattcaagttaaagatgagaattccgagtctaaagtatttcagttactgcacaaaaacatgttattttatgtattcaaagcagaggatgctcattcggctcagaagtggatagaagcatttcaggaaggcacaatattgtagcagtattggtttcatctcttctgtgattccaaagaggtggaatttcatcagaatggagtaaatgcaattcaaaaattgtataaaaatgaacactgccaagataaagccaaccagacccttcatcaaagaaattgttttgttaggtataagcaatttttaaaaggtgtttgttttttcatttatgttatttattaaaattttgatgtttacttaatggtcagaattatttctgagacacactgaattctaaagtaccatttctttagagaccagaaaaactatcttaatactgtatactgtattaactattcgtgacatagttcacactgttttcttaccttacattgtaacaatcttactggtggaaagtctttgtaaggaaaaaacacatagcaaggagcaaatttccacaaagtgcttggtttaggaattgtgattattataaaactgctgatgaaaaaaatgcatgtctttgaatcaataaacttgggtgaatatttgtatcttttagtggaaaaacatggccagcttctacctcagtaactgtgaactgaaatttcagtaaattatctaaagtatttctgttgttaggtacctctttggcaggagttaatattacatcatcaaagaattatagcaaagagatagaatctgaattttttaaaactgtgagtaggaatgaagatgtttttatttgcagaataccacaaataaccaactcttccggcttttaagtccaatcttttaaaaaatctaccacttcgaaacaaacataaatgtatcattttttaaaatagcaaaatatagcaagcattatgtcacataatattccctgctattataagagttctgagcccaagtcaatgatgatatttgtatctataagtaatgttacatttccaaaaatattgtgcattacaaatggaactggaattactatatcagaaaagcataattataagccagtaataactgaaattctatagtattcattttcaaaaggtctttttctgccagtttgtgatatcctccctcctaattaaaaaaaaaaacaacaaatcctttctctataagcagctatcagcacacctccttaggaaagatttagattcataattctggtgcacttactgtttaacatatgaactaccttgcacatacaattgttgattagcagaagaaaatgaaataacactgtgataaaagccatccctgatgttcacaatacacaatttattaactaagtttaaactataaattatcttaactgccatgagcggtggctcacacctacaatctcagcattttgggaggccgaggccgttggaccacctgaggtcaggagatcgagaccagcctggccaatatggtgaaaccccatctctattaaaaatacaagaattagccggtcgtggtggtacatggctgtagtcctagctattcagcaggctgaggcaggagcatcgcttgaacccaggaggcagaggttgcagtgagccgagatggtgccactgcactccagcctgggatgacagagcgagactccatctcaaaaaaaaaaaaaaaaaaaaaattgaacagcaaggttatccatataatatttctttaaagggtacaagaattttcctttctgcctctaaataaaggatttcctaattcagtgtgatccttaacagcaaccatgaggattactgagtgcctttctggggccttttgaatgctgtttggtacagcaccagagtccctactagatctagagttggctgctatagttttttgtggcgattttttgccatggagtcatttgaacctcatacacaatcctaacatgccatcccctttctgtcatagcaggtacactaaaatttctttgtagctcaattttatataatcaagatcacataaataaggcttccatgttagaatcgttgcagtttttagtgtattcctttttggaggctaaagttgtaccttataaactgtttctgcgtctggcatttagcaagacaagttatttgggttttctttccctcctcttgagctctcagccttctgactacaaggtttggcttaagccttataatctaaaaaatatcagccaggctattctatcttctaagacctggctgaatcatgagccagttctaaatctaaagagagtgagagagggaagaaatctggcacaaacttacagtctctttaattacatgtaaaatgcatgtgactgtattacctattggcttagccccatggagggtttagaaaaatgtgtagtctttgtggaagctatccaattatccttctcccaaaaagatgttttaaatgtggaatagtattacattcccctgcccctttatgagtccttcataacttactaaagctgaccaattgttatttatgtaacctggctcattcattgtcaactaagaacctaattatatgcaatttattgtaaaaaaagctataaaaatatattttgctagtattttagaggaaaaatgatattgggcacagtctataaatggggagaaaagttaagtagtatctagattccaaggatactatatttattatacagatatgtgtgcctgtgcttccatcaaaccctttttcaggtatctccttttaattcataaggaggaaagagtagggcatttataaagctaagctaaaaatgatgctaagcataacgtagatgagacgccaggctgaaccaggggaaggctggcattgttagtgtccccaactagcagtccacctttatctgtggcagctataaatgtacaggacccatcagagtcctaagaaaatgagagtaattatctctggcatcatccacatttccgactctttccaatctcttttccctttttctgtaatgtacccagcatccccctattgtattttggttgcccaagattcttgattctttgagtgtgtagtagcatttcttaaaatgagatcatcagaccaacccttgattcacatgaaagctgtaatgacacaacaaagagaaggcgacagttttaaagtataattgtcagccaaatgtgtattttatatttggttcatagaatatatctagatgtggggaaagtctcctatttggtaatttagttaaaatgtaaatgttatatcacagcatatgttggtatgttttggagtgtgcttccattgtgctcagcttttgaaaagtttgaaatccactttagtcaaatgtagtcaatgggatttccagagatacatattgtttttcttagtgtaccacacactccttgaaggcagatactgtacttaatatatcactgtcttccataatactgccctaggtctttttagtttttaagagaccgggtctcgctatgtttcccatgctgaactcaaatgcctgggcttaagcaatcctcccacctcagcctctggagtagctgggactacaggggcatgcaccaccaggcctggcttcctaggagggtctttaaagagaaaatatttgttcaattgaaaacaggattcttgtcatctacaactccaacacagcctgaaaatatccacattataacctggaccttagacctactttctccactatcctgcaaagctacatctgtaactacctattggctatctatatgagtcctcaagcatctcagactttacatgaataaaactcaacttccttcccattcaaatctgtttattttcttctgtaagagaaagataccatttgagactccagaatctgcctctaactctcaacaagactctgcaattactcaagtatcctttccatcctcattgccctgctgttattacataggccctggttcaagtccttgttacttgttcccattattgcaataacttctaattccaatgccgttgtgtgatcccattttaaacacggccagagcagtcttccaacaacatagctctaatctagtttcatccccacttttacatgcctcagtggctttcccagtgacttggcatggaacacgtcctcagttgccatacattccagctaactcttacccaacctttctttgttcacacagtttccttttccttcctcattgacccatccgcatctctgtttatccaagacttctctgtgatagctgacccttagtctttctctcccctattcctccagactagatcctgtctccttcctgcagccccgacacagccttcagttcatatcttttgcatgatgcttagcaccttctatccctaaggacaacttactcatttgagatttctggcagggtaccttgcatgcagtggacactcagtatttgctgaattaaattccttcctatggatcccttctgattttttttaagtgcctctaatacacatatcattctagggctcatgccacttttaatgtcattttctaaaggaaaatcttatctatgatattttcccttataagagatagttgttttgagtagggttttttaaaagataaaggtagtaggaaattttttaaagcctaaatatcaaattcctttccctttggagttgggggaaggaatgaagggggagcaacttgctctttcatatgagttggtcatagcatgtaagaaccaatcttgaaatatcgttttttttttaatggcttataatgtatttctagaaatactttgtacttaaaatgataacagtttgtatctttttgtccatatatactttataaataaaaaaattagcattgtaaataatgttaatatgtatttatacaaaataaatttactataatata

SEQ ID NO: 197991 - DNA, 4125 bp, Artificial Sequence
  derived and/or modified sequence
atgaccagcgccgccgagatcaagaagccccccgtggcccccaagcccaagttcgtggtggccaacaacaagcccgcccccccccccatcgcccccaagcccgacatcgtgatcagcagcgtgccccagagcaccaagaagatgaagcccgccatcgcccccaagcccaaggtgctgaagaccagccccgtgagagagatcggccagagccccagcagaaagatcatgctgaacctggagggccacaagcaggagctggccgagagcaccgacaacttcaactgcaagtacgagggcaaccagagcaacgactacatcagccccatgtgcagctgcagcagcgagtgcatccacaagctgggccacagagagaacctgtgcgtgaagcagctggtgctggagcccctggagatgaacgagaacctggagaacagcaagatcgacgagaccctgaccatcaagaccagaagcaagtgcgacctgtacggcgagaaggccaagaaccagggcggcgtggtgctgaaggccagcgtgctggaggaggagctgaaggacgccctgatccaccagatgccccccttcatcagcgcccagaagcacagacccaccgacagccccgagatgaacggcggctgcaacagcaacggccagttcagaatcgagttcgccgacctgagccccagccccagcagcttcgagaaggtgcccgaccaccacagctgccacctgcagctgcccagcgacgagtgcgagcacttcgagacctgccaggacgacagcgagaagagcaacaactgcttccagagcagcgagctggaggccctggagaacggcaagagaagcaccctgatcagcagcgacggcgtgagcaagaagagcgaggtgaaggacctgggccccctggagatccacctggtgccctacacccccaagttccccacccccaagcccagaaagaccagaaccgccagactgctgagacagaagtgcgtggacacccccagcgagagcaccgaggagcccggcaacagcgacagcagcagcagctgcctgaccgagaacagcctgaagatcaacaagatcagcgtgctgcaccagaacgtgctgtgcaagcaggagcaggtggacaagatgaagctgggcaacaagagcgagctgaacatggagagcaacagcgacgcccaggacctggtgaacagccagaaggccatgtgcaacgagaccaccagcttcgagaagatggcccccagcttcgacaaggacagcaacctgagcagcgacagcaccaccgtggacggcagcagcatgagcctggccgtggacgagggcaccggcttcatcagatgcaccgtgagcatgagcctgcccaagcagctgaagctgacctgcaacgagcacctgcagagcggcagaaacctgggcgtgagcgccccccagatgcagaaggagagcgtgatcaaggaggagaacagcctgagaatcgtgcccaagaagccccagagacacagcctgcccgccaccggcgtgctgaagaaggccgccagcgaggagctgctggagaagagcagctaccccagcagcgaggagaagagcagcgagaagagcctggagagaaaccacctgcagcacctgtgcgcccagaacagaggcgtgagcagcagcttcgacatgcccaagagagccagcgagaagcccgtgtggaagctgccccaccccatcctgcccttcagcggcaaccccgagttcctgaagagcgtgaccgtgagcagcaacagcgagcccagcaccgccctgaccaagcccagagccaagagcctgagcgccatggacgtggagaagtgcaccaagccctgcaaggacagcaccaagaagaacagcttcaagaagctgctgagcatgaagctgagcatctgcttcatgaagagcgacttccagaagttctggagcaagagcagccagctgggcgacaccaccaccggccacctgagcagcggcgagcagaagggcatcgagagcgactggcagggcctgctggtgggcgaggagaagagaagcaagcccatcaaggcctacagcaccgagaactacagcctggagagccagaagaagagaaagaagagcagaggccagaccagcgccgccaacggcctgagagccgagagcctggacgaccagatgctgagcagagagagcagcagccaggccccctacaagagcgtgaccagcctgtgcgcccccgagtacgagaacatcagacactacgaggagatccccgagtacgagaacctgcccttcatcatggccatcagaaagacccaggagctggagtggcagaacagcagcagcatggaggacgccgacgccaacgtgtacgaggtggaggagccctacgaggcccccgacggccagctgcagctgggccccagacaccagcacagcagcagcggcgccagccaggaggagcagaacgacctgggcctgggcgacctgcccagcgacgaggaggagatcatcaacagcagcgacgaggacgacgtgagcagcgagagcagcaagggcgagcccgaccccctggaggacaagcaggacgaggacaacggcatgaagagcaaggtgcaccacatcgccaaggagatcatgagcagcgagaaggtgttcgtggacgtgctgaagctgctgcacatcgacttcagagacgccgtggcccacgccagcagacagctgggcaagcccgtgatcgaggacagaatcctgaaccagatcctgtactacctgccccagctgtacgagctgaacagagacctgctgaaggagctggaggagagaatgctgcactggaccgagcagcagagaatcgccgacatcttcgtgaagaagggcccctacctgaagatgtacagcacctacatcaaggagttcgacaagaacatcgccctgctggacgagcagtgcaagaagaaccccggcttcgccgccgtggtgagagagttcgagatgagccccagatgcgccaacctggccctgaagcactacctgctgaagcccgtgcagagaatcccccagtacagactgctgctgaccgactacctgaagaacctgatcgaggacgccggcgactacagagacacccaggacgccctggccgtggtgatcgaggtggccaaccacgccaacgacaccatgaagcagggcgacaacttccagaagctgatgcagatccagtacagcctgaacggccaccacgagatcgtgcagcccggcagagtgttcctgaaggagggcatcctgatgaagctgagcagaaaggtgatgcagcccagaatgttcttcctgttcaacgacgccctgctgtacaccacccccgtgcagagcggcatgtacaagctgaacaacatgctgagcctggccggcatgaaggtgagaaagcccacccaggaggcctaccagaacgagctgaagatcgagagcgtggagagaagcttcatcctgagcgccagcagcgccaccgagagagacgagtggctggaggccatcagcagagccatcgaggagtacgccaagaagagaatcaccttctgccccagcagaagcctggacgaggccgacagcgagaacaaggaggaggtgagccccctgggcagcaaggcccccatctggatccccgacaccagagccaccatgtgcatgatctgcaccagcgagttcaccctgacctggagaagacaccactgcagagcctgcggcaagatcgtgtgccaggcctgcagcagcaacaagtacggcctggactacctgaagaaccagcccgccagagtgtgcgagcactgcttccaggagctgcagaagctggaccaccagcacagccccagaatcggcagccccggcaaccacaagagccccagcagcgccctgagcagcgtgctgcacagcatccccagcggcagaaagcagaagaagatccccgccgccctgaaggaggtgagcgccaacaccgaggacagcagcatgagcggctacctgtacagaagcaagggcaacaagaagccctggaagcacttctggttcgtgatcaagaacaaggtgctgtacacctacgccgccagcgaggtgagaagcgagatctag

SEQ ID NO: 197992 - DNA, 3621 bp, Artificial Sequence
  derived and/or modified sequence
atgaccagcgccgccgagatcaagaagccccccgtggcccccaagcccaagttcgtggtggccaacaacaagcccgcccccccccccatcgcccccaagcccgacatcgtgatcagcagcgtgccccagagcaccaagaagatgaagcccgccatcgcccccaagcccaaggtgctgaagaccagccccgtgagagagatcggccagagccccagcagaaagatcatgctgaacctggagggccacaagcaggagctggccgagagcaccgacaacttcaactgcaagtacgagggcaaccagagcaacgactacatcagccccatgtgcagctgcagcagcgagtgcatccacaagctgggccacagagagaacctgtgcgtgaagcagctggtgctggagcccctggagatgaacgagaacctggagaacagcaagatcgacgagaccctgaccatcaagaccagaagcaagtgcgacctgtacggcgagaaggccaagaaccagggcggcgtggtgctgaaggccagcgtgctggaggaggagctgaaggacgccctgatccaccagatgccccccttcatcagcgcccagaagcacagacccaccgacagccccgagatgaacggcggctgcaacagcaacggccagttcagaatcgagttcgccgacctgagccccagccccagcagcttcgagaaggtgcccgaccaccacagctgccacctgcagctgcccagcgacgagtgcgagcacttcgagacctgccaggacgacagcgagaagagcaacaactgcttccagagcagcgagctggaggccctggagaacggcaagagaagcaccctgatcagcagcgacggcgtgagcaagaagagcgaggtgaaggacctgggccccctggagatccacctggtgccctacacccccaagttccccacccccaagcccagaaagaccagaaccgccagactgctgagacagaagtgcgtggacacccccagcgagagcaccgaggagcccggcaacagcgacagcagcagcagctgcctgaccgagaacagcctgaagatcaacaagatcagcgtgctgcaccagaacgtgctgtgcaagcaggagcaggtggacaagatgaagctgggcaacaagagcgagctgaacatggagagcaacagcgacgcccaggacctggtgaacagccagaaggccatgtgcaacgagaccaccagcttcgagaagatggcccccagcttcgacaaggacagcaacctgagcagcgacagcaccaccgtggacggcagcagcatgagcctggccgtggacgagggcaccggcttcatcagatgcaccgtgagcatgagcctgcccaagcagctgaagctgacctgcaacgagcacctgcagagcggcagaaacctgggcgtgagcgccccccagatgcagaaggagagcgtgatcaaggaggagaacagcctgagaatcgtgcccaagaagccccagagacacagcctgcccgccaccggcgtgctgaagaaggccgccagcgaggagctgctggagaagagcagctaccccagcagcgaggagaagagcagcgagaagagcctggagagaaaccacctgcagcacctgtgcgcccagaacagaggcgtgagcagcagcttcgacatgcccaagagagccagcgagaagcccgtgtggaagctgccccaccccatcctgcccttcagcggcaaccccgagttcctgaagagcgtgaccgtgagcagcaacagcgagcccagcaccgccctgaccaagcccagagccaagagcctgagcgccatggacgtggagaagtgcaccaagccctgcaaggacagcaccaagaagaacagcttcaagaagctgctgagcatgaagctgagcatctgcttcatgaagagcgacttccagaagttctggagcaagagcagccagctgggcgacaccaccaccggccacctgagcagcggcgagcagaagggcatcgagagcgactggcagggcctgctggtgggcgaggagaagagaagcaagcccatcaaggcctacagcaccgagaactacagcctggagagccagaagaagagaaagaagagcagaggccagaccagcgccgccaacggcctgagagccgagagcctggacgaccagatgctgagcagagagagcagcagccaggccccctacaagagcgtgaccagcctgtgcgcccccgagtacgagaacatcagacactacgaggagatccccgagtacgagaacctgcccttcatcatggccatcagaaagacccaggagctggagtggcagaacagcagcagcatggaggacgccgacgccaacgtgtacgaggtggaggagccctacgaggcccccgacggccagctgcagctgggccccagacaccagcacagcagcagcggcgccagccaggaggagcagaacgacctgggcctgggcgacctgcccagcgacgaggaggagatcatcaacagcagcgacgaggacgacgtgagcagcgagagcagcaagggcgagcccgaccccctggaggacaagcaggacgaggacaacggcatgaagagcaaggtgcaccacatcgccaaggagatcatgagcagcgagaaggtgttcgtggacgtgctgaagctgctgcacatcgacttcagagacgccgtggcccacgccagcagacagctgggcaagcccgtgatcgaggacagaatcctgaaccagatcctgtactacctgccccagctgtacgagctgaacagagacctgctgaaggagctggaggagagaatgctgcactggaccgagcagcagagaatcgccgacatcttcgtgaagaagggcccctacctgaagatgtacagcacctacatcaaggagttcgacaagaacatcgccctgctggacgagcagtgcaagaagaaccccggcttcgccgccgtggtgagagagttcgagatgagccccagatgcgccaacctggccctgaagcactacctgctgaagcccgtgcagagaatcccccagtacagactgctgctgaccgactacctgaagaacctgatcgaggacgccggcgactacagagacacccaggacgccctggccgtggtgatcgaggtggccaaccacgccaacgacaccatgaagcagggcgacaacttccagaagctgatgcagatccagtacagcctgaacggccaccacgagatcgtgcagcccggcagagtgttcctgaaggagggcatcctgatgaagctgagcagaaaggtgatgcagcccagaatgttcttcctgttcaacgacgccctgctgtacaccacccccgtgcagagcggcatgtacaagctgaacaacatgctgagcctggccggcatgaaggtgagaaagcccacccaggaggcctaccagaacgagctgaagatcgagagcgtggagagaagcttcatcctgagcgccagcagcgccaccgagagagacgagtggctggaggccatcagcagagccatcgaggagtacgccaagaagagaatcaccttctgccccagcagaagcctggacgaggccgacagcgagaacaagtag

SEQ ID NO: 197993 - DNA, 4293 bp, Artificial Sequence
  derived and/or modified sequence
atgacgagcgcggctgagatcaagaagccccccgtggctccgaagccgaagttcgtcgtggccaataataaacctgcacctcctccaattgcacctaaaccggatatcgtgattagctctgtcccgcagtctacaaaaaaaatgaaaccagccattgcacctaagcctaaggtcctcaaaacctctccagtgagggagatcggccaatccccgtccagaaaaattatgctgaacctcgaggggcacaaacaggagttagccgaaagcacagataacttcaattgcaagtacgagggtaaccagtctaatgactacatttcgccaatgtgttcttgctcgagcgagtgtattcacaaactcgggcacagggagaacctgtgcgtgaaacagctggttctggaacctttagaaatgaatgaaaatctcgagaattctaagatcgatgagactctgacaatcaaaactcggagtaagtgcgatctctacggcgaaaaagccaagaaccagggtggggtggtgctgaaagcgagcgttctggaggaagaactgaaggacgccctgatccatcagatgcctccgttcatttccgcccagaagcataggcctactgacagccccgagatgaacggcggatgcaattccaacggacaatttcgcattgagttcgcggatctgtccccttccccctctagtttcgagaaggtgcctgatcatcacagctgccatttgcagctcccatctgatgagtgcgaacattttgaaacatgtcaggatgatagcgaaaaaagcaacaactgtttccagagctcagagctagaagccctcgagaacggaaagaggtcaaccctcatttcctctgatggcgtgtccaagaagtccgaggtcaaggatcttggcccgctggagatccaccttgtcccatacacccctaagttcccaactcccaagcctagaaagacaaggacagcaaggttgcttaggcagaaatgcgtggacactccatccgagtctaccgaggagccgggcaactccgatagttccagtagctgccttaccgaaaattcattaaagataaataaaatctcagttttgcatcagaacgtcctctgcaaacaggaacaggtcgataagatgaagctcggtaataagtctgagctcaacatggaatccaattcagacgcacaggatctggtcaactcccagaaagcgatgtgcaacgagacaacttcgttcgaaaagatggcaccctcttttgacaaggactcaaatttgagtagcgattcaactactgtggatggaagctctatgtctctcgcggtcgacgagggtacaggtttcattaggtgcaccgtgtcgatgtccctgccgaagcagttgaagctcacctgcaacgagcacctacaatctggcaggaatctgggggtgtccgcaccacagatgcaaaaggaaagtgtcattaaggaagagaatagcctgagaattgtgcccaagaaaccgcagcgacatagcctgcccgccacaggagttctgaaaaaggccgcttctgaggagcttctggagaaaagcagctacccttcttcggaagagaagtcttcagaaaagtctctggaacgcaatcacctgcaacacctgtgtgcccagaaccgcggcgtgagctctagtttcgatatgcctaagagagcctccgaaaagcctgtctggaagttgccacacccaattctgcctttcagcggtaatccggaatttcttaagagtgttacagtctcaagtaattccgagccatctaccgcactgaccaagccccgggctaagagcctatctgctatggacgtggaaaagtgcaccaaaccatgtaaagactccacaaagaagaatagcttcaagaagttgctcagcatgaagctgtcaatttgttttatgaagtcagacttccagaagttttggtccaagtcaagccagctgggagataccactacaggccacctctccagcggcgaacaaaaaggaatcgagagtgattggcaggggttgttggttggtgaggaaaagagatccaagcccatcaaagcgtatagcactgagaactatagcctggagtcccagaaaaagagaaaaaagagcaggggccagacatccgcagccaatgggctgcgggccgagtctctggatgatcagatgctgtcacgggagagcagcagtcaggcaccctataagtctgttacctccttgtgcgctcccgaatacgaaaacataaggcattatgaagagatcccggagtatgaaaacctgcccttcattatggcgattagaaagacccaggagttagagtggcaaaacagctcttccatggaggatgcagacgcgaatgtgtatgaggttgaagaaccgtatgaggcacctgacggccaattacagctggggcctaggcatcagcacagttccagtggcgccagccaggaagaacagaatgatctgggcctgggtgacctgcccagcgatgaagaagaaattattaatagctccgacgaggatgacgtgtcctccgaaagttccaagggggaacctgacccgcttgaggacaagcaggatgaagacaatggcatgaagtctaaggtccatcatatcgcaaaagaaataatgtcatctgaaaaggtcttcgtagatgtccttaagctactccacattgatttcagggacgcagtggcccacgcctccagacagctaggcaagcccgtgatcgaagataggatcctgaaccagattctctattatttaccccagctttacgaactcaaccgcgatctcttaaaagaattagaggaaagaatgttacactggaccgagcagcagaggattgccgatatattcgtcaagaagggtccctatctgaagatgtacagcacctacatcaaggaattcgataagaacatcgccttgctagatgagcagtgtaagaaaaatccggggttcgctgcagtggtgagagaattcgaaatgtccccaaggtgcgccaacctcgccttaaaacactacttactgaaacccgtgcagagaatcccacagtacaggttactgctgacagactatctgaaaaatctaattgaggacgctggcgactacagagatacgcaagacgcgctcgcagtagtgatcgaagttgctaatcacgccaatgataccatgaaacagggcgataacttccaaaaactcatgcaaatacagtacagtctaaacggacaccacgaaatcgtgcagccaggccgtgtttttcttaaggaaggcattttgatgaagctttcccgcaaggttatgcagcctcggatgttctttctctttaatgacgctctgctgtacaccacacccgtccaaagtggaatgtataagctgaataacatgttgagtctcgctggtatgaaagtgcgcaaacctacacaggaagcttatcagaacgagctgaagatcgaatctgtagagcgctcattcatcttaagtgctagcagcgcaactgagcgcgacgagtggctggaagccatctcccgcgccatcgaagaatacgccaaaaaaagaatcaccttttgcccttcccggagtctggacgaagcggacagtgagaataaggaagaagtatcccccctggggagtaaggcacccatttggatcccggatacacgcgccaccatgtgcatgatttgtacttcagaatttacactcacctggaggagacatcactgccgagcgtgcggtaaaatcgtgtgtcaggcctgcagctctaacaaatatgggttagattatctgaaaaaccagccagctagggtatgcgaacactgctttcaggagctgcagaagctggatcatcagcacagtccacggattggctcacccggtaatcacaagagcccatcttccgcattatccagcgtactgcattccatcccgtcagggagaaagcagaagaaaattcccgcggctcttaaggaggtttcagcaaacactgaggactcttccatgtccgggtatctctataggtccaaagggaacaaaaagccctggaagcacttttggttcgtgattaagaacaaagttctatatacctatgccgctagtgaagacgtggcagcccttgagagccagcctcttcttggcttcacagtcattcaggttaaggatgaaaactctgaatcaaaggtgtttcagctcctgcacaaaaacatgctgttttacgtcttcaaagcagaggatgcccattcggctcagaagtggatcgaggccttccaggaggggacaatactctag

SEQ ID NO: 197994 - DNA, 4125 bp, Artificial Sequence
  derived and/or modified sequence
atgacgtctgccgcagagatcaagaagcctccagtagcccccaagcccaaattcgtcgtcgccaataataaacccgctcctccacctatcgctccaaagcctgacatagtgatctcatccgtaccacaatccactaaaaaaatgaagcccgctatagcacccaaacccaaggtgttgaagaccagccctgtccgggagatcggacagagcccctctaggaaaattatgttaaatttagagggccataaacaggagctggccgagagcaccgataacttcaactgcaaatatgaaggtaatcagagtaatgattacattagccctatgtgcagctgctcatcagaatgtattcataaactggggcatagagaaaacttgtgcgtgaaacagctcgtactcgaaccgctggagatgaacgaaaacttggagaattctaagattgatgagacactcaccatcaaaacgcgatcgaagtgcgacttatacggcgaaaaagccaagaaccagggaggcgtcgtcctcaaagcaagcgtattagaggaggaattaaaagacgcgttaatccatcagatgccccccttcatcagtgcacaaaaacacaggcctaccgacagccccgagatgaatggtggttgtaattccaatggccagtttcggattgagtttgcggaccttagcccttctccgagtagctttgagaaggtgcctgaccaccattcttgccacctacaactgccctcagatgagtgcgaacattttgaaacatgtcaagatgacagcgaaaagagcaacaactgtttccagtcatcagagctggaagcacttgagaatggcaagagatctaccctaatttcaagcgatggtgtgtcgaagaagagcgaagtgaaagacctggggccgctcgaaatacatctggtgccctatacccctaaatttccaacacctaagccgaggaagacacgaactgcccggctcctgcgacagaagtgtgtggataccccctctgagagcactgaagagccaggcaatagcgacagcagcagtagttgtctgacagaaaactccttgaagatcaataagatcagcgtactgcatcaaaacgtcctttgtaagcaggagcaggtggacaaaatgaaattaggcaacaaaagtgagctcaatatggagtctaactcagacgctcaggacctggtgaactctcagaaggctatgtgcaacgagactacgagttttgaaaagatggcgccaagcttcgacaaggactcaaacttatccagcgattccaccactgtagatggaagctccatgagtctggccgtggatgaggggacgggttttattagatgtaccgtgtccatgtcgttacccaagcaactgaaactcacctgtaacgaacaccttcaaagtgggcgtaacctcggagtttctgcccctcaaatgcaaaaggaaagcgttattaaagaggaaaattcactaaggattgtacctaaaaaaccgcagaggcattcccttcccgccacaggcgttcttaagaaggcagcctctgaggagctgcttgaaaagagcagctatccttcctccgaagagaagtcttccgagaagtccttagaacggaaccacctgcagcatctgtgcgcccagaatcgcggagtgtcctccagcttcgatatgccgaagcgcgcctccgagaagccggtgtggaagctccctcatcccattctccctttctcggggaatccggagtttctgaaatctgttaccgtgtccagcaatagcgagccctctaccgcactgactaagcccagggcaaagagcctctctgctatggatgtggaaaagtgtaccaagccatgcaaggattccacaaaaaagaatagctttaaaaagctactttccatgaagctttccatctgttttatgaaatcggactttcagaagttctggagtaagtcctcccaattgggagataccaccacagggcacctgagctcaggagagcagaaagggatcgaaagtgactggcagggacttctcgttggggaggagaagcgcagcaaacccatcaaggcatactccactgagaattatagtcttgagtcccagaaaaagcgcaaaaagagccgggggcagacgagtgctgccaacggactgcgcgctgaatctctggacgaccagatgctgtcccgagaaagctccagtcaggctccctataagtctgtgacatctttgtgtgcgcctgagtacgagaacattaggcattacgaagagatacctgagtacgagaacctgcccttcatcatggctattcgtaaaactcaagagttagaatggcagaactccagtagtatggaagacgctgacgccaacgtttacgaggtggaagagccttacgaggccccggatgggcaactgcaactggggccgagacaccagcattcctcatctggagcaagtcaagaggagcagaatgacttgggtctgggagatctccccagcgatgaagaggagattatcaattcatcagatgaagacgacgtgtcatctgagtcatctaagggagaacctgaccccctcgaggataaacaggatgaggataacggtatgaaaagcaaggtgcatcacattgccaaggagataatgtccagcgagaaggttttcgtggacgtgctcaagttgttacatatcgactttagagacgctgtggcccacgcctcccgtcagttaggtaagccagttattgaagaccggatcctaaatcagattctgtattatcttccccaactgtatgagttgaaccgtgatcttttgaaggaactggaagaaaggatgctgcactggacagaacagcaacgcatcgcagacattttcgtgaaaaagggtccttatctgaagatgtatagcacctatatcaaggagtttgacaaaaatattgccctgctcgatgaacagtgcaaaaagaacccaggatttgcggctgtggtgcgggaatttgagatgagtccaagatgtgccaacctcgctctaaaacactatcttttgaagccggtacagaggattccccagtataggctcctcctgactgactatctcaaaaacctcattgaagacgctggtgactatagggacactcaagacgctctggcagttgtgatcgaggtggctaatcacgccaatgataccatgaaacaaggagacaatttccaaaaattgatgcaaatacagtatagtttgaatggtcaccatgaaatcgtccagcccggcagagtgttcctcaaggagggtattcttatgaagttgtctaggaaagtcatgcagccccgcatgttctttctgttcaacgatgctctcctgtacaccacgccagtccagagcggcatgtataagctcaataacatgctgtctttagccgggatgaaggtgcgcaagccaactcaggaggcttatcaaaatgaactgaaaatagagagcgtggagcgcagcttcatcctctcagcttcaagcgcaaccgagagggatgaatggctcgaggctatcagcagagccatcgaggagtatgctaagaagagaattacattctgtccttccagaagcttggatgaggccgactctgaaaacaaagaagaggtgagcccactgggctctaaggctcccatttggattccggatacccgggctaccatgtgtatgatttgtacgagcgaattcaccctcacctggcgacgccaccactgcagagcctgtggtaagatcgtgtgccaggcctgcagttcaaacaaatatggtctggactaccttaagaaccagcccgccagggtgtgcgaacattgctttcaggaactgcagaaactggatcaccagcactctccaaggatcggatcccccgggaatcataagagtccaagttcagcgctgagctcagtgttacattctatcccttcagggcgcaagcagaagaaaatccccgccgcgttgaaagaggtcagtgcgaacactgaagattccagtatgtctggttacctgtatcggtccaaggggaataaaaagccctggaagcacttctggttcgtcattaagaataaggtcttgtatacgtatgccgcatcagaggtcagatccgagatctag

SEQ ID NO: 197995 - DNA, 3621 bp, Artificial Sequence
  derived and/or modified sequence
atgacttccgcagccgagattaaaaaaccgcccgtggcccctaagcctaagttcgtggtggccaataataaacccgctccccctcctatcgcccccaaaccagacatagtaatctcttcagtgccccaaagcacaaagaaaatgaaaccggccatcgctcccaagcctaaagtactgaaaacctcacctgtccgggaaatcgggcagtcgccttcacggaagatcatgcttaacctggagggtcacaagcaggagttggcggaatcaacggacaactttaattgcaagtacgagggcaaccaaagcaacgattacatcagccctatgtgttcttgcagttccgagtgcatccataagctggggcatcgggaaaacttgtgcgtcaaacagctggtgttagagcctctagagatgaacgagaacctagaaaattctaagatcgatgaaacactaacaatcaaaacgaggtctaagtgtgacctttacggggagaaggctaagaaccagggaggcgttgtcctgaaagcctcggttctagaagaagagctgaaggatgcattaatccatcaaatgcctcccttcatcagcgctcaaaagcatagacccaccgatagtcctgagatgaacggaggctgtaactccaacggacaatttaggatcgagtttgctgatctctcgccgagcccatcgagcttcgaaaaagttcctgaccatcattcgtgtcatcttcaactgccttccgatgagtgcgaacactttgagacttgccaggacgactccgagaaatcaaataactgctttcagagttcagagcttgaagccctagagaatggcaagagatccacattgatcagctccgacggggttagcaagaaaagcgaggtgaaggatttgggtcccttagagatccacctggtcccttatacgcccaaatttccaacgccgaaacctcggaagacaaggactgctaggctgctcaggcagaaatgcgtcgacacaccttctgagtccaccgaagaacccgggaactctgactcaagcagtagctgtctcactgagaatagcctcaagattaacaaaataagcgttttacaccagaatgttctgtgcaagcaggaacaggtggataagatgaagttaggcaacaaaagcgagctgaacatggaaagtaactctgacgcacaggatttggttaactctcagaaggccatgtgcaatgagaccacgtccttcgaaaaaatggctccatccttcgataaggactcaaatttaagctcagactccaccactgttgatggaagctctatgagcctggcagtagatgaggggaccggctttatcagatgtacagtgagcatgtctctgcctaaacaactgaagctcacctgcaacgagcacttacaatctggaaggaatctgggggtatcggcgccacagatgcaaaaagaatcagtgataaaagaagagaactccctgaggattgtgccaaagaagccacagcgacactccctccctgcgactggagtgcttaagaaggccgccagcgaggaacttttggaaaagagtagctatccaagttcagaggagaagtcttcagaaaagagccttgagcgcaaccatctgcagcacttatgcgctcagaataggggcgtgagcagctcattcgacatgccaaagagagcatcggagaagcccgtgtggaaacttcctcacccaatcctgcctttctcgggcaatcctgagttcctaaagtccgtcacagtctctagcaatagtgagccctctacagccctgacgaaacctagggcaaagtctctatccgctatggatgttgagaagtgcaccaagccttgcaaagatagcaccaaaaaaaattcgtttaaaaaactgctatccatgaagctttccatctgctttatgaaatccgacttccaaaaattctggagtaaatccagccagctcggagacaccacaacaggccatctgagctccggggaacagaaagggatcgaaagcgattggcaaggtttattggtgggcgaagagaaaagatccaagcctattaaggcttactccaccgagaattacagtctggagtcccaaaaaaaacggaaaaaaagccggggtcagacctcagctgccaacggtctgagagccgaatcacttgacgaccaaatgctgtcacgcgagtcctccagccaggctccgtataagagcgttacatctttatgcgctccagaatatgagaacatacgccattatgaggagatcccagaatacgaaaatcttccatttattatggctatccgaaaaactcaggaactcgagtggcagaattcctctagcatggaagatgccgacgctaatgtgtacgaagtcgaagaaccatatgaagccccggatggacaactgcaactggggccaagacaccagcacagttctagcggcgccagccaggaagagcagaacgatctaggcctcggagacttaccctctgacgaagaggagatcatcaactcttccgacgaagacgatgtgagctctgaaagctccaagggtgaacctgatccactcgaggacaagcaggacgaggataatgggatgaagtctaaagtgcaccatatcgccaaggaaataatgtcatcagaaaaggtgtttgtggacgtgctgaaactactgcacattgacttcagagacgccgtagcccacgccagtaggcaactcggcaaacctgttattgaggatcggattctgaatcagattctatactacctgccccagctgtacgaactgaatagagacctgctgaaggaactggaagagcggatgctccattggacagagcaacagagaatcgcagacatatttgtcaagaaaggcccctacctgaagatgtactctacctatataaaggaatttgataagaatatcgccctactggatgaacagtgtaagaaaaatccgggctttgccgccgtggttcgagagtttgagatgtcgcctaggtgcgccaatctggccctcaaacactatctcttgaaaccagtgcagaggattcctcagtatagactactgctcacagactacctgaagaacttgattgaggacgcaggcgattacagagatacccaggacgctctggcagttgtcattgaagttgccaaccatgcaaatgatacaatgaagcagggagacaacttccaaaaactgatgcaaattcaatactcactcaacggtcatcatgaaatcgttcagcccgggcgggtgttcctgaaggaggggatcctgatgaaactgagccgaaaagtgatgcagccccgtatgtttttcctgttcaacgacgctttgctctacacgactccggtgcagagcggaatgtacaagctgaataatatgttgtctctcgcgggcatgaaggtgcgaaaaccaacacaggaggcctaccagaacgagcttaaaattgaaagcgttgagagaagcttcattttgtccgccagcagtgccacagaacgagacgagtggctggaggccatttccagggctatcgaggagtacgctaaaaagcgcatcacgttttgtccaagcaggagcctcgacgaggccgatagcgagaataagtag

SEQ ID NO: 197996 - DNA, 4293 bp, Artificial Sequence
  derived and/or modified sequence
atgaccagcgctgctgagatcaagaagccccctgtggcccccaagcccaagtttgtggtggccaacaacaagccagcccccccacccatcgcccccaagccagacatcgtcatcagctctgtgccccagagcaccaagaagatgaagccagccatcgcccccaagcccaaggtgctgaagaccagccctgtgcgggagatcggccagagccccagcaggaagatcatgctgaacctggagggccacaagcaggagctggccgagagcacagacaacttcaactgcaagtatgagggcaaccagagcaatgactacatcagccccatgtgcagctgcagcagcgagtgcatccacaagctgggccaccgggagaacctgtgtgtgaagcagctggtgctggagcccctggagatgaatgaaaacctggagaacagcaagattgatgagaccctgaccatcaagaccaggagcaaatgtgacctgtatggagagaaggccaagaaccagggcggcgtggtgctgaaggcctctgtgctggaggaggagctgaaggatgccctgatccaccagatgccacccttcatcagcgcccagaagcaccggcccacagacagccctgagatgaatggaggctgcaacagcaatggccagttccgcatcgagtttgctgacctgagccccagccccagcagctttgagaaggtgcctgaccaccacagctgccacctgcagctgcccagtgatgaatgtgagcactttgagacctgccaggatgacagcgagaagagcaacaactgcttccagagcagcgagctggaggccctggagaatggcaagaggagcaccctcatcagcagtgatggagtgtccaagaagtctgaggtgaaggacctgggccccctggagatccacctggtgccctacacccccaagttccccacccccaagcccaggaagaccaggacagcccggctgctgcggcagaagtgtgtggacaccccatctgagagcacagaggagcccggcaacagcgacagcagcagcagctgcctgacagagaacagcctgaagatcaacaagatctctgtgctgcaccagaatgtgctgtgcaagcaggagcaggtggacaagatgaagctgggcaacaagtctgagctgaacatggagagcaacagtgatgcccaggacctggtgaacagccagaaggccatgtgcaatgagaccaccagctttgagaagatggcccccagctttgacaaggacagcaacctgagcagtgacagcaccaccgtggatggcagctccatgagcctggccgtggatgagggcaccggcttcatccgctgcaccgtgtccatgagcctgcccaagcagctgaagctgacctgcaatgagcacctgcagagcggcaggaacctgggcgtgtctgccccccagatgcagaaggagagcgtcatcaaggaggagaacagcctgcgcatcgtgcccaagaagccccagaggcacagcctgcctgccactggagtgctgaagaaggccgccagcgaggagctgctggagaagagcagctaccccagcagcgaggagaagagcagcgagaagagcctggagaggaaccacctgcagcacctgtgtgcccagaacagaggagtgagcagcagctttgacatgcccaagagggccagcgagaagcctgtgtggaagctgccccaccccatcctgcccttcagcggcaaccctgagttcctgaagtctgtgacagtgagcagcaacagcgagcccagcacagccctgaccaagccccgggccaagagcctgagcgccatggatgtggagaagtgcaccaagccctgcaaggacagcaccaagaagaacagcttcaagaagctgctgtccatgaagctgagcatctgcttcatgaagagtgacttccagaagttctggagcaagagcagccagctgggggacaccaccaccggccacctgagcagcggggagcagaagggcatcgagagtgactggcagggcctgctggtgggggaggagaagaggagcaagcccatcaaggcctacagcacagagaactacagcctggagagccagaagaagaggaagaagagccggggccagaccagcgctgccaacggcctgcgggcagagagcctggatgaccagatgctgagccgggagagcagcagccaggccccctacaagtctgtgaccagcctgtgtgccccagaatatgagaacatccgccactatgaggagatcccagaatatgagaacctgcccttcatcatggccatcaggaagacccaggagctggagtggcagaacagcagctccatggaggatgctgatgccaacgtgtatgaggtggaggagccctatgaggccccagatggccagctgcagctgggccccaggcaccagcacagcagcagcggggccagccaggaggagcagaatgacctgggcctgggggacctgcccagtgatgaggaggagatcatcaacagcagtgatgaagatgatgtgagcagcgagagcagcaagggggagccagaccccctggaggacaagcaggatgaggacaatggcatgaagagcaaggtgcaccacatcgccaaggagatcatgagcagcgagaaggtgtttgtggatgtgctgaagctgctgcacatcgacttcagagatgctgtggcccacgccagccggcagctgggcaagcctgtgattgaggaccgcatcctgaaccagatcctgtactacctgccccagctgtatgagctgaacagagacctgctgaaggagctggaggagaggatgctgcactggacagagcagcagagaattgctgacatctttgtgaagaagggcccctacctgaagatgtacagcacctacatcaaggagtttgacaagaacatcgccctgctggatgagcagtgcaagaagaaccctggctttgctgctgtggtgcgggagtttgagatgagcccccgctgtgccaacctggccctgaagcactacctgctgaagcctgtgcagaggatcccccagtaccgcctgctgctgacagactacctgaagaacctgattgaagatgctggggactacagagacacccaggatgccctggccgtggtgattgaggtggccaaccacgccaatgacaccatgaagcagggcgacaacttccagaagctgatgcagatccagtacagcctgaatggccaccatgaaattgtgcagcccggccgggtcttcctgaaggagggcatcctgatgaagctgagcaggaaggtgatgcagcccaggatgttcttcctgttcaatgatgccctgctgtacaccacccctgtgcagagcggcatgtacaagctgaacaacatgctgagcctggccggcatgaaggtgaggaagcccacccaggaggcctaccagaatgagctgaagattgagagcgtggagaggagcttcatcctgagcgccagcagcgccacagaaagagatgagtggctggaggccatcagccgggccatcgaggagtatgccaagaagaggatcaccttctgccccagccgcagcctggatgaagctgacagcgagaacaaggaggaggtgagccccctgggcagcaaggcccccatctggatcccagacacccgggccaccatgtgcatgatctgcaccagcgagttcaccctgacctggaggaggcaccactgccgggcctgtgggaagatcgtgtgccaggcctgcagcagcaacaagtatggcctggactacctgaagaaccagcctgcccgggtgtgtgagcactgcttccaggagctgcagaagctggaccaccagcacagccccagaattggcagccctggcaaccacaagagccccagcagcgccctgagctctgtgctgcacagcatccccagcggcaggaagcagaagaagatcccagctgccctgaaggaggtgtctgccaacacagaggacagctccatgagcggctacctgtaccgcagcaagggcaacaagaagccctggaagcacttctggtttgtgatcaagaacaaggtgctgtacacctacgccgcctctgaagatgtggccgccctggagagccagcccctgctgggcttcaccgtcatccaggtgaaggatgagaacagcgagagcaaggtgttccagctgctgcacaagaacatgctgttctacgtgttcaaggccgaggatgcccacagcgcccagaagtggattgaggccttccaggagggcaccatcctgtag

SEQ ID NO: 197997 - DNA, 4125 bp, Artificial Sequence
  derived and/or modified sequence
atgaccagcgctgctgagatcaagaagccccctgtggcccccaagcccaagtttgtggtggccaacaacaagccagcccccccacccatcgcccccaagccagacatcgtcatcagctctgtgccccagagcaccaagaagatgaagccagccatcgcccccaagcccaaggtgctgaagaccagccctgtgcgggagatcggccagagccccagcaggaagatcatgctgaacctggagggccacaagcaggagctggccgagagcacagacaacttcaactgcaagtatgagggcaaccagagcaatgactacatcagccccatgtgcagctgcagcagcgagtgcatccacaagctgggccaccgggagaacctgtgtgtgaagcagctggtgctggagcccctggagatgaatgaaaacctggagaacagcaagattgatgagaccctgaccatcaagaccaggagcaaatgtgacctgtatggagagaaggccaagaaccagggcggcgtggtgctgaaggcctctgtgctggaggaggagctgaaggatgccctgatccaccagatgccacccttcatcagcgcccagaagcaccggcccacagacagccctgagatgaatggaggctgcaacagcaatggccagttccgcatcgagtttgctgacctgagccccagccccagcagctttgagaaggtgcctgaccaccacagctgccacctgcagctgcccagtgatgaatgtgagcactttgagacctgccaggatgacagcgagaagagcaacaactgcttccagagcagcgagctggaggccctggagaatggcaagaggagcaccctcatcagcagtgatggagtgtccaagaagtctgaggtgaaggacctgggccccctggagatccacctggtgccctacacccccaagttccccacccccaagcccaggaagaccaggacagcccggctgctgcggcagaagtgtgtggacaccccatctgagagcacagaggagcccggcaacagcgacagcagcagcagctgcctgacagagaacagcctgaagatcaacaagatctctgtgctgcaccagaatgtgctgtgcaagcaggagcaggtggacaagatgaagctgggcaacaagtctgagctgaacatggagagcaacagtgatgcccaggacctggtgaacagccagaaggccatgtgcaatgagaccaccagctttgagaagatggcccccagctttgacaaggacagcaacctgagcagtgacagcaccaccgtggatggcagctccatgagcctggccgtggatgagggcaccggcttcatccgctgcaccgtgtccatgagcctgcccaagcagctgaagctgacctgcaatgagcacctgcagagcggcaggaacctgggcgtgtctgccccccagatgcagaaggagagcgtcatcaaggaggagaacagcctgcgcatcgtgcccaagaagccccagaggcacagcctgcctgccactggagtgctgaagaaggccgccagcgaggagctgctggagaagagcagctaccccagcagcgaggagaagagcagcgagaagagcctggagaggaaccacctgcagcacctgtgtgcccagaacagaggagtgagcagcagctttgacatgcccaagagggccagcgagaagcctgtgtggaagctgccccaccccatcctgcccttcagcggcaaccctgagttcctgaagtctgtgacagtgagcagcaacagcgagcccagcacagccctgaccaagccccgggccaagagcctgagcgccatggatgtggagaagtgcaccaagccctgcaaggacagcaccaagaagaacagcttcaagaagctgctgtccatgaagctgagcatctgcttcatgaagagtgacttccagaagttctggagcaagagcagccagctgggggacaccaccaccggccacctgagcagcggggagcagaagggcatcgagagtgactggcagggcctgctggtgggggaggagaagaggagcaagcccatcaaggcctacagcacagagaactacagcctggagagccagaagaagaggaagaagagccggggccagaccagcgctgccaacggcctgcgggcagagagcctggatgaccagatgctgagccgggagagcagcagccaggccccctacaagtctgtgaccagcctgtgtgccccagaatatgagaacatccgccactatgaggagatcccagaatatgagaacctgcccttcatcatggccatcaggaagacccaggagctggagtggcagaacagcagctccatggaggatgctgatgccaacgtgtatgaggtggaggagccctatgaggccccagatggccagctgcagctgggccccaggcaccagcacagcagcagcggggccagccaggaggagcagaatgacctgggcctgggggacctgcccagtgatgaggaggagatcatcaacagcagtgatgaagatgatgtgagcagcgagagcagcaagggggagccagaccccctggaggacaagcaggatgaggacaatggcatgaagagcaaggtgcaccacatcgccaaggagatcatgagcagcgagaaggtgtttgtggatgtgctgaagctgctgcacatcgacttcagagatgctgtggcccacgccagccggcagctgggcaagcctgtgattgaggaccgcatcctgaaccagatcctgtactacctgccccagctgtatgagctgaacagagacctgctgaaggagctggaggagaggatgctgcactggacagagcagcagagaattgctgacatctttgtgaagaagggcccctacctgaagatgtacagcacctacatcaaggagtttgacaagaacatcgccctgctggatgagcagtgcaagaagaaccctggctttgctgctgtggtgcgggagtttgagatgagcccccgctgtgccaacctggccctgaagcactacctgctgaagcctgtgcagaggatcccccagtaccgcctgctgctgacagactacctgaagaacctgattgaagatgctggggactacagagacacccaggatgccctggccgtggtgattgaggtggccaaccacgccaatgacaccatgaagcagggcgacaacttccagaagctgatgcagatccagtacagcctgaatggccaccatgaaattgtgcagcccggccgggtcttcctgaaggagggcatcctgatgaagctgagcaggaaggtgatgcagcccaggatgttcttcctgttcaatgatgccctgctgtacaccacccctgtgcagagcggcatgtacaagctgaacaacatgctgagcctggccggcatgaaggtgaggaagcccacccaggaggcctaccagaatgagctgaagattgagagcgtggagaggagcttcatcctgagcgccagcagcgccacagaaagagatgagtggctggaggccatcagccgggccatcgaggagtatgccaagaagaggatcaccttctgccccagccgcagcctggatgaagctgacagcgagaacaaggaggaggtgagccccctgggcagcaaggcccccatctggatcccagacacccgggccaccatgtgcatgatctgcaccagcgagttcaccctgacctggaggaggcaccactgccgggcctgtgggaagatcgtgtgccaggcctgcagcagcaacaagtatggcctggactacctgaagaaccagcctgcccgggtgtgtgagcactgcttccaggagctgcagaagctggaccaccagcacagccccagaattggcagccctggcaaccacaagagccccagcagcgccctgagctctgtgctgcacagcatccccagcggcaggaagcagaagaagatcccagctgccctgaaggaggtgtctgccaacacagaggacagctccatgagcggctacctgtaccgcagcaagggcaacaagaagccctggaagcacttctggtttgtgatcaagaacaaggtgctgtacacctacgccgccagcgaggtgcgctctgagatctag

SEQ ID NO: 197998 - DNA, 3621 bp, Artificial Sequence
  derived and/or modified sequence
atgaccagcgctgctgagatcaagaagccccctgtggcccccaagcccaagtttgtggtggccaacaacaagccagcccccccacccatcgcccccaagccagacatcgtcatcagctctgtgccccagagcaccaagaagatgaagccagccatcgcccccaagcccaaggtgctgaagaccagccctgtgcgggagatcggccagagccccagcaggaagatcatgctgaacctggagggccacaagcaggagctggccgagagcacagacaacttcaactgcaagtatgagggcaaccagagcaatgactacatcagccccatgtgcagctgcagcagcgagtgcatccacaagctgggccaccgggagaacctgtgtgtgaagcagctggtgctggagcccctggagatgaatgaaaacctggagaacagcaagattgatgagaccctgaccatcaagaccaggagcaaatgtgacctgtatggagagaaggccaagaaccagggcggcgtggtgctgaaggcctctgtgctggaggaggagctgaaggatgccctgatccaccagatgccacccttcatcagcgcccagaagcaccggcccacagacagccctgagatgaatggaggctgcaacagcaatggccagttccgcatcgagtttgctgacctgagccccagccccagcagctttgagaaggtgcctgaccaccacagctgccacctgcagctgcccagtgatgaatgtgagcactttgagacctgccaggatgacagcgagaagagcaacaactgcttccagagcagcgagctggaggccctggagaatggcaagaggagcaccctcatcagcagtgatggagtgtccaagaagtctgaggtgaaggacctgggccccctggagatccacctggtgccctacacccccaagttccccacccccaagcccaggaagaccaggacagcccggctgctgcggcagaagtgtgtggacaccccatctgagagcacagaggagcccggcaacagcgacagcagcagcagctgcctgacagagaacagcctgaagatcaacaagatctctgtgctgcaccagaatgtgctgtgcaagcaggagcaggtggacaagatgaagctgggcaacaagtctgagctgaacatggagagcaacagtgatgcccaggacctggtgaacagccagaaggccatgtgcaatgagaccaccagctttgagaagatggcccccagctttgacaaggacagcaacctgagcagtgacagcaccaccgtggatggcagctccatgagcctggccgtggatgagggcaccggcttcatccgctgcaccgtgtccatgagcctgcccaagcagctgaagctgacctgcaatgagcacctgcagagcggcaggaacctgggcgtgtctgccccccagatgcagaaggagagcgtcatcaaggaggagaacagcctgcgcatcgtgcccaagaagccccagaggcacagcctgcctgccactggagtgctgaagaaggccgccagcgaggagctgctggagaagagcagctaccccagcagcgaggagaagagcagcgagaagagcctggagaggaaccacctgcagcacctgtgtgcccagaacagaggagtgagcagcagctttgacatgcccaagagggccagcgagaagcctgtgtggaagctgccccaccccatcctgcccttcagcggcaaccctgagttcctgaagtctgtgacagtgagcagcaacagcgagcccagcacagccctgaccaagccccgggccaagagcctgagcgccatggatgtggagaagtgcaccaagccctgcaaggacagcaccaagaagaacagcttcaagaagctgctgtccatgaagctgagcatctgcttcatgaagagtgacttccagaagttctggagcaagagcagccagctgggggacaccaccaccggccacctgagcagcggggagcagaagggcatcgagagtgactggcagggcctgctggtgggggaggagaagaggagcaagcccatcaaggcctacagcacagagaactacagcctggagagccagaagaagaggaagaagagccggggccagaccagcgctgccaacggcctgcgggcagagagcctggatgaccagatgctgagccgggagagcagcagccaggccccctacaagtctgtgaccagcctgtgtgccccagaatatgagaacatccgccactatgaggagatcccagaatatgagaacctgcccttcatcatggccatcaggaagacccaggagctggagtggcagaacagcagctccatggaggatgctgatgccaacgtgtatgaggtggaggagccctatgaggccccagatggccagctgcagctgggccccaggcaccagcacagcagcagcggggccagccaggaggagcagaatgacctgggcctgggggacctgcccagtgatgaggaggagatcatcaacagcagtgatgaagatgatgtgagcagcgagagcagcaagggggagccagaccccctggaggacaagcaggatgaggacaatggcatgaagagcaaggtgcaccacatcgccaaggagatcatgagcagcgagaaggtgtttgtggatgtgctgaagctgctgcacatcgacttcagagatgctgtggcccacgccagccggcagctgggcaagcctgtgattgaggaccgcatcctgaaccagatcctgtactacctgccccagctgtatgagctgaacagagacctgctgaaggagctggaggagaggatgctgcactggacagagcagcagagaattgctgacatctttgtgaagaagggcccctacctgaagatgtacagcacctacatcaaggagtttgacaagaacatcgccctgctggatgagcagtgcaagaagaaccctggctttgctgctgtggtgcgggagtttgagatgagcccccgctgtgccaacctggccctgaagcactacctgctgaagcctgtgcagaggatcccccagtaccgcctgctgctgacagactacctgaagaacctgattgaagatgctggggactacagagacacccaggatgccctggccgtggtgattgaggtggccaaccacgccaatgacaccatgaagcagggcgacaacttccagaagctgatgcagatccagtacagcctgaatggccaccatgaaattgtgcagcccggccgggtcttcctgaaggagggcatcctgatgaagctgagcaggaaggtgatgcagcccaggatgttcttcctgttcaatgatgccctgctgtacaccacccctgtgcagagcggcatgtacaagctgaacaacatgctgagcctggccggcatgaaggtgaggaagcccacccaggaggcctaccagaatgagctgaagattgagagcgtggagaggagcttcatcctgagcgccagcagcgccacagaaagagatgagtggctggaggccatcagccgggccatcgaggagtatgccaagaagaggatcaccttctgccccagccgcagcctggatgaagctgacagcgagaacaagtag

SEQ ID NO: 197999 - DNA, 4293 bp, Artificial Sequence
  derived and/or modified sequence
atgaccagcgccgccgagatcaagaagccccccgtggcccccaagccaaagtttgtcgttgctaataataagccggcccctccgcccatcgcccctaagcctgacatcgtgattagcagtgtgccacagtctactaaaaagatgaaacctgctattgctccaaaacccaaggtcctcaaaacttctcccgtgagagaaatcggtcagtcacctagtcgcaagataatgctcaacttggagggccacaaacaggagcttgcggaaagtaccgacaacttcaactgcaagtacgaaggtaatcagagtaatgactacatatccccaatgtgtagctgcagcagcgagtgtatccacaaacttggccacagggaaaacctgtgtgttaaacagttagtgctggagccgctggagatgaacgaaaatcttgagaatagcaagattgacgaaactcttactattaagacacggtccaaatgcgacctgtacggggagaaagcgaagaaccagggaggagttgttctcaaggcctctgtactcgaagaggaactgaaggatgctcttatccaccagatgccccctttcatctctgcgcagaagcaccggccaactgattcccccgaaatgaatggaggatgcaatagcaatggccaatttcggattgagttcgccgacttatcccccagtccttcctcctttgaaaaagtgcccgaccaccattcctgccacctgcagctgccctccgacgagtgtgaacactttgaaacatgtcaggacgattccgagaagagtaataattgttttcagtcaagtgagctcgaggccctggaaaacggcaaacgaagcacacttatatcctctgatggcgtaagtaaaaagtccgaggtgaaagacctgggcccactggaaatccatctggtaccatacacacccaagttccccacacccaaaccccgcaaaacccgcacagctcgactgctgaggcagaaatgcgtagatacaccttcggagagtacagaagaacctggtaacagcgacagcagcagctcctgcttaaccgaaaactcacttaagatcaataagatttcagttctccatcagaacgtcttgtgtaagcaggagcaagtcgataaaatgaagttaggcaataagagtgaactaaatatggaatcgaactccgatgctcaagacctggtgaatagtcaaaaagccatgtgcaatgagactactagcttcgaaaaaatggctccctcgttcgacaaagattctaacctgtcatcagattccaccaccgtggacggcagctctatgtccctggccgtggacgagggaacaggcttcattagatgcacggtttctatgtcgctgccaaagcagctgaagttgacctgtaatgagcacctacagagtggcagaaacctgggtgtctcggccccccaaatgcaaaaggaaagcgtgatcaaggaggaaaactccctgcggatcgttccaaaaaagccacagaggcacagtctccctgcaacaggcgtgctgaagaaggctgcttccgaggagttgctggaaaagagctcgtatccgtcaagtgaagaaaagtcttccgagaaaagcctggagaggaaccacctacaacatctgtgcgctcagaaccgcggcgtttcaagttcatttgacatgcccaaaagagcctcagagaaacctgtctggaaacttcctcacccgattctgcctttttccggcaaccctgagttcttgaagtctgtgacagtgtcttcaaatagcgagccctctaccgccctaaccaaaccacgcgcaaaatcactgtcagccatggatgtggagaagtgtaccaagccctgtaaggatagtactaaaaagaactccttcaaaaagctcctgtcaatgaagctgtcaatatgcttcatgaaatcggactttcagaagttctggtcgaagtcctcccagctcggtgacacaacgacagggcacctaagctctggcgaacagaagggtattgagtccgactggcagggtctactggttggagaagagaaaagatccaagcctattaaggcctattccactgaaaactattccctagagtcccagaaaaaacggaagaagtctaggggccaaacttcggccgccaacggtctccgagccgagtctctcgacgaccaaatgctgagcagagaaagctcaagccaagcaccctacaaaagcgtgacctctctgtgtgctcccgagtatgagaacatccgccattatgaggagattcctgaatatgagaatctcccctttatcatggccattcggaaaacccaggaacttgaatggcagaacagttcaagtatggaggacgcagatgcgaatgtctacgaggtggaggagccttatgaggccccagacggccaactccaattggggccaagacaccagcacagtagctccggggcctctcaggaagagcagaacgaccttggcttgggggatttaccttctgatgaggaagaaattattaactcatcagatgaagacgatgtatccagcgagtcctcaaaaggagagcctgacccgctcgaagataagcaagacgaggataacggcatgaaatcgaaagtgcatcacatcgctaaagagatcatgagctcagagaaagtcttcgttgatgtgctgaagttgctacacatcgactttagagacgctgtggcacacgctagcaggcagctggggaagccggtgatcgaggaccggatccttaatcagatactctattaccttccccagctctatgaactgaaccgtgatctcctgaaagagctggaagagaggatgctgcattggaccgagcagcagagaatcgctgacatcttcgtgaaaaaaggtccttacctgaagatgtattccacctacataaaagagttcgataaaaatatcgcactacttgacgaacagtgcaaaaaaaacccgggtttcgctgctgttgtgcgggagttcgaaatgtctcctaggtgtgctaatctggccctcaagcactatttgctgaagcctgtacagcgcattccccagtaccggttactgctcactgattatctgaaaaatctgatcgaggatgctggcgactacagggatacacaggatgcgcttgcagtggtgatcgaagtggccaaccacgcaaacgacacaatgaagcaaggagataatttccagaaactgatgcagatccagtacagccttaatggacaccatgaaatcgtccagcccgggcgcgtcttcctcaaagaaggaattttaatgaagctgagtaggaaagttatgcagccaagaatgttttttctgttcaacgacgcgttattatatacgaccccagtccagtccgggatgtataagctgaacaacatgctgagcctggccgggatgaaggtccggaaacccacccaggaggcctatcagaatgagctcaaaattgagagcgtcgagaggtcatttatcctctcggctagttcagccactgagcgggatgaatggctggaagctatttcaagggccatagaagagtatgccaagaagaggatcacgttttgccccagtaggtctttggatgaggcagattctgagaacaaagaagaggtgagtccattgggctccaaagctcctatttggatccctgatactcgcgctaccatgtgtatgatttgtacaagcgaattcacgctcacttggcggcggcatcattgtagggcatgtggcaagattgtctgtcaggcctgttcatcaaacaaatatggcctggactacctgaagaaccaacctgccagagtgtgtgaacattgcttccaggagctgcagaagttagatcatcaacatagtccaagaattgggtccccaggaaatcataaatccccctcgagtgcactgtctagtgtactgcacagtattccatccggcaggaagcagaaaaagattccggccgccctgaaagaagtaagtgctaatacagaagacagctctatgagcggctacctgtacaggtcaaagggtaataagaaaccgtggaagcacttctggtttgtgattaagaacaaggttctgtatacttacgcagcctctgaagacgtggctgccttggaaagccagccacttctaggtttcaccgtcatccaggtgaaggacgaaaattcagagtctaaggtgtttcagttactccacaagaatatgctgttttatgtcttcaaagctgaggacgcacactctgcccagaaatggatagaagcctttcaggagggtacaattctctag

SEQ ID NO: 198000 - DNA, 4125 bp, Artificial Sequence
  derived and/or modified sequence
atgaccagcgccgccgagatcaagaagccccccgtggcccccaagcctaagttcgtcgtggccaacaataaaccagctcctccacccattgcacctaagcccgatatcgttattagctccgtccctcagagcacaaagaagatgaagccagccattgcccccaagccaaaggtcctgaagacttcaccagttcgtgaaatcgggcagtctccatccagaaaaatcatgcttaatcttgaaggacataagcaagaactggccgagtctactgacaattttaactgcaaatatgagggaaatcagagcaatgactatatcagcccgatgtgcagctgttcatctgaatgcatccataaacttggccatcgggagaatttatgcgtgaaacagctggtacttgagccattagaaatgaacgaaaacctggagaactcgaaaatagacgaaacgcttaccattaagactaggtctaaatgtgacctgtatggagagaaggccaaaaaccaggggggggtcgttcttaaagctagtgtgctggaggaagagctgaaagacgccctgattcatcagatgccaccatttataagtgctcaaaagcacagacccaccgacagccccgagatgaatggggggtgcaattccaatgggcagttcaggatagagttcgcagatttgagtcccagcccctctagcttcgagaaggttcctgaccatcatagctgtcacttacagctgcctagcgacgagtgcgagcatttcgagacctgtcaggacgatagcgaaaaatctaacaattgttttcagagctctgagctggaagcacttgagaatggtaaacgctcaacccttatcagttccgatggcgtcagcaaaaagtcggaggtgaaagatctgggacctttggaaatccatctcgtgccctacacccctaaattccccacaccgaagcccaggaagaccaggactgcccgactgctccggcagaaatgcgttgacactcctagtgagagcacggaagagcccggaaatagcgacagctccagctcgtgtctgaccgagaacagcttaaagattaacaaaatttctgttctgcaccagaatgtgttatgtaagcaagagcaggtggacaagatgaaacttggtaataaaagcgagttaaacatggagagcaatagcgacgcccaggaccttgtgaactcacaaaaagcaatgtgtaacgaaaccacttcattcgagaagatggcgccatccttcgataaggactcaaacttgtcatcagactccaccaccgtggacggctcatccatgtctctagccgtggatgaagggactggcttcatacgctgcactgtctcaatgagcctcccaaagcaactgaaactaacttgcaacgagcatctccagagcggcaggaatttgggtgtatctgcccctcagatgcagaaagagtcagtaataaaagaggagaacagcctgagaattgtcccaaaaaaaccccagcggcactccctacctgcaacaggggtgttgaagaaagccgcttccgaggagctcctggagaaaagctcttacccatctagtgaagagaagtcgtccgagaagtctctcgagcgcaaccacctgcagcacctctgcgcccagaacaggggggtctcctcttccttcgacatgccaaagagggcatcagaaaaacctgtgtggaagctaccccaccccatcctaccattctccggcaacccagagttcctgaagagtgtgaccgtaagttccaatagtgagccttcgacagccctgactaaacctcgcgccaagagcctgagtgcaatggatgttgaaaagtgtaccaagccctgcaaggatagcactaaaaagaacagttttaagaagctgttatctatgaaactgtcaatctgttttatgaaatctgacttccagaaattttggtccaaatcgtcccagctgggagacacgacgacaggtcacttgtcatctggcgagcagaagggcatcgaatcagattggcaggggctgctggttggcgaggaaaagcgaagcaagcctatcaaggcctacagtactgaaaactacagcctggaaagccagaaaaaaaggaagaaatctcggggtcagacttctgcggctaacggcctgagggccgagtccctggacgaccagatgctcagcagagaatccagttctcaggccccttacaagagtgttacctcactgtgtgcccccgagtatgaaaacattcggcactatgaggagatcccagagtatgagaacttaccttttattatggcaatcaggaagacccaggagctggaatggcaaaattcgtcctctatggaagatgctgacgcaaacgtgtacgaggtggaggagccctatgaggcacccgatggtcaactacagttaggaccaagacaccagcactcgagttcaggagctagccaggaggagcagaatgatttgggcttgggagacttgccatccgatgaggaagaaatcattaacagctctgacgaggatgatgttagttctgagagcagcaaaggtgaacctgatcccctggaagataagcaggacgaggacaatggcatgaaatctaaggtgcaccacattgctaaggagataatgagtagcgagaaagttttcgtcgacgtacttaaactcctccacattgactttcgcgacgccgtggcgcatgccagcagacagctgggaaagcctgtgattgaggaccggatactcaaccagatactgtactacctgcctcaattgtatgaactaaaccgggatctgctgaaagagctagaggaaaggatgctgcattggaccgagcagcagaggatagcagacattttcgtgaagaaggggccctatctcaagatgtattcaacatacattaaggagtttgataagaatatcgctctgcttgatgaacagtgtaagaagaaccccggttttgcagctgtggtgcgcgaattcgaaatgagcccacggtgcgcaaacctggctcttaaacactatttgctaaagcccgtgcaacggatcccccagtatcgattgctgcttactgactacctgaaaaacctgatcgaggacgcaggggactatagagacactcaggacgcactagccgtcgtgatcgaagtggcgaaccacgctaatgatacaatgaaacaaggggacaacttccagaaactgatgcaaatccaatacagcctgaatggacaccacgaaatcgtccaacccggcagggtcttcctaaaagaggggatattgatgaagctaagccgtaaggtcatgcagcctcgcatgttttttctcttcaacgacgccctgctgtacactacccccgtgcaatccggcatgtacaagttgaacaacatgctatcattggctggcatgaaggtcaggaaacccactcaggaggcataccagaacgaactaaagatagaatctgtggagaggagtttcattttatcagcatctagcgcaaccgagcgtgatgagtggcttgaggccatctcgagagctatcgaggagtacgctaagaagagaatcactttttgtccaagtcgcagcctggacgaggctgacagcgaaaacaaagaagaggtgtcacctctgggaagcaaggctcctatctggatcccggacactcgggctactatgtgtatgatctgtacctctgagtttacactaacctggagaaggcatcactgccgcgcctgcggaaaaatcgtatgccaggcttgttcatctaacaaatatgggctcgactacctgaagaatcagccagcacgagtttgtgagcattgctttcaggagctgcaaaagcttgatcatcagcactcccccagaattgggtcacccggcaaccacaagagccctagctccgccctgagtagcgtcctgcattctatcccttctggaaggaagcaaaaaaagattcccgcagctctgaaagaggtgtcagcaaacacagaggactcttctatgagcggttatctgtatcggagtaaaggcaataaaaagccttggaaacacttctggtttgttattaagaacaaagtgttgtacacctacgcagccagtgaggtaagatcagagatatag

SEQ ID NO: 198001 - DNA, 3621 bp, Artificial Sequence
  derived and/or modified sequence
atgaccagcgccgccgagatcaagaagccccccgtggcccccaagccaaaatttgtcgttgctaataacaaaccagccccccccccgatagcaccaaaacctgatattgttattagtagtgttcctcaatccactaaaaagatgaagcccgccatcgcccctaagcccaaggtactgaaaaccagcccagtgagagaaataggacaatctccaagcagaaagataatgcttaatctcgaaggtcataagcaggaacttgccgagagcaccgataattttaactgtaaatatgagggcaaccaaagtaatgactacatatctccaatgtgcagctgcagtagcgaatgtatccacaagctgggacatagagagaacctctgcgtgaagcagcttgtgcttgagcctctggagatgaatgaaaacctggagaattctaaaatagatgaaacgcttaccataaaaacgagatcaaaatgtgatctctacggagaaaaagcaaaaaaccagggaggagtagtactgaaggcgtcagtcttggaagaggagttaaaggacgctctgatccaccagatgccgccatttatttcagcccagaagcacaggccgaccgattcacccgaaatgaacggggggtgcaactccaacggtcagttccgaattgaattcgctgacctctcaccttctccgtcatcgttcgagaaagtacctgaccatcatagctgccacctacaactcccatccgacgagtgtgaacattttgagacgtgccaggatgacagcgagaagtcgaacaactgctttcagtccagtgaactggaggccttggaaaacggaaagcgcagtacactgataagctccgatggagtttccaaaaagagcgaggttaaggaccttgggcctttagagatacacctggtgccatacacacccaagttccccacgcctaaaccacgtaaaacacggaccgcgcgactgctacgacagaagtgtgtggacaccccaagcgagagcaccgaagaacctggcaattccgattccagcagctcctgcctgacggagaattcactgaagatcaataagatctccgtgctgcaccagaacgtactatgtaagcaagagcaggttgacaagatgaagcttggtaacaaaagcgagctgaacatggagagcaactctgacgctcaggatctcgtgaatagccagaaagcaatgtgtaacgagacgacaagcttcgaaaagatggccccgtcttttgacaaggattccaacctttcaagcgacagcaccacggtggacggatcatccatgtctctcgcagttgacgaggggactggatttattcggtgcactgtttcaatgtctctccccaaacagctgaagctcacttgtaacgagcatctgcagtcaggccggaacttgggggtaagcgccccgcagatgcagaaagaatccgttatcaaagaagagaactccctccgcattgtaccaaagaagcctcaaagacattcccttcctgcgactggggtgctgaaaaaagccgcttctgaggagttgctcgaaaagagttcctacccaagcagcgaagagaaatcatcggagaaaagcttggagagaaaccacctccagcacttgtgcgcacagaaccgaggggttagcagcagctttgatatgcctaagagggcttcagagaagcccgtctggaagctgccccatcccattctcccgttctccgggaaccccgaatttctgaaatccgtgacagtgagctccaactccgagccatctacggccctgactaaaccccgcgcaaagagcctgagtgcaatggacgtcgagaaatgcacaaagccatgcaaggactctaccaaaaagaactcttttaaaaagctcttgtccatgaaactgagcatttgtttcatgaaaagcgattttcaaaagttttggtctaaatctagtcagcttggcgacactacaacaggtcatttatcctctggcgagcagaagggcatagagtccgactggcagggtttgctggtcggtgaggagaaaaggtctaaaccaataaaggcttactcgactgaaaactactctctagaaagccaaaaaaagaggaagaagtctcggggtcagacgtccgcagccaacggtctgagggctgaaagtctggacgatcagatgttatccagagaatcatcctcccaggctccctacaagagcgtcacatctctgtgtgctccagaatatgagaatattcggcactatgaggagattcctgagtatgaaaaccttcccttcataatggcgattagaaagacccaggaactggagtggcagaactcttcctccatggaggacgcggacgccaacgtatacgaagtagaggaaccatacgaagcccccgatggtcagctgcagctagggccaagacaccagcacagcagtagcggtgcatcacaggaagagcagaatgatctaggtctgggcgatctcccgtcggatgaagaagaaattatcaacagcagcgatgaggatgacgtcagctctgagtcctctaaaggtgaaccggatcctcttgaggataaacaagatgaggacaacgggatgaagtccaaagtgcatcatatcgccaaagaaataatgagttccgagaaggtctttgtggacgttctcaagctgcttcatatcgatttccgggacgcggtggcccacgcctccaggcagttagggaaacctgtgattgaggaccgaatcctgaaccaaattctctactacctcccccagctatacgagttgaacagggacctcctcaaggaactggaagagaggatgctgcattggaccgaacaacaacgtatagcagatatttttgttaaaaagggtccctatctgaaaatgtatagtacatacattaaggagtttgataagaatattgctctgctggatgagcagtgcaaaaaaaaccccggcttcgcggctgtggttcgcgagtttgagatgtctccacggtgtgctaacctggctttaaagcattacctgctgaagccagtacagcgtatacctcagtataggctcttgctcactgactatcttaagaacctgattgaggatgccggggactaccgagatacccaagatgccctggccgtggtcatcgaggtggcgaatcatgcgaatgataccatgaagcagggcgacaatttccagaaacttatgcagatccaatattcactgaatggtcaccatgagattgttcagccggggagagtgtttctgaaagaaggaattcttatgaagctgtcccgcaaagtcatgcagccgcgtatgtttttcttgttcaatgatgctttgctgtacaccacacctgtccagtccggcatgtataagttgaacaatatgctcagcctggccggcatgaaggtccgaaagcctactcaggaggcttaccagaacgaactcaagatagagtcagtcgaacgcagttttatcttgtctgcaagttcggctaccgaaagagatgaatggctggaggcaataagtcgagccatcgaggagtatgccaaaaagcgtatcacgttctgcccctcacgctctctcgatgaagccgactctgaaaataagtag

SEQ ID NO: 198002 - DNA, 4293 bp, Artificial Sequence
  derived and/or modified sequence
atgacctccgccgctgaaatcaaaaagccccctgtcgcccctaaacccaagtttgtggttgctaacaataaacctgctcccccacctatcgcccctaaacccgacatagtgatcagtagtgtcccgcagagcacaaaaaaaatgaaacctgccatcgccccaaagcccaaagtccttaagacgagtcccgtccgtgagattgggcagtctccctccagaaaaattatgttgaacctggaaggtcacaagcaagaactggctgagagcacggataattttaattgcaaatacgaaggaaatcagtctaacgattatatttccccaatgtgttcctgtagctcagaatgcattcataagctaggacatcgggaaaatctttgcgtgaagcagctcgttcttgagcctcttgaaatgaacgagaatttggagaactctaagatcgacgaaacactcactattaagaccaggagtaagtgtgacctctacggcgagaaagctaagaaccagggcggagtcgtcctgaaagcctccgtcctggaggaggaattaaaggatgctctgattcatcagatgcctcccttcatctccgcccaaaagcatcgtcccactgactctccggaaatgaatgggggatgtaactcaaacgggcagtttcggatcgaatttgccgatttgagtccttctccaagctcattcgaaaaggtgccagatcaccatagttgccatctgcagctgccctcagatgaatgcgagcatttcgaaacctgtcaagacgattccgagaaatccaacaactgctttcagtcatccgaattagaggcgctagagaatgggaaacgttctacactgatctcctcggatggggtctctaagaaatccgaggtcaaggatctgggtcctctggaaatacatctggtcccttatacccccaaatttccgactccaaagcccagaaagacacgaaccgctcgcctgttgagacagaagtgcgttgataccccatcagaatccacagaggaaccagggaattctgactctagctccagttgtttgactgagaattctctgaagatcaacaagattagcgtgctgcaccagaacgtactgtgcaaacaagagcaggttgataagatgaaacttggcaacaagtcagagcttaatatggagtccaactcggacgcacaagacctggtgaatagtcagaaggccatgtgtaacgagacaacatcctttgaaaagatggctccatcttttgacaaggattctaacttatcctctgattctactacagtggacggcagcagcatgagcctggctgtggatgagggcaccggctttatccgatgcaccgtaagtatgtccttgccaaagcagctgaaactgacttgcaacgagcatctccaatccggccgtaacctaggcgtttccgctccacagatgcagaaggagtctgtcatcaaggaggagaacagtctgagaatcgtgcctaagaagcctcagcgacattcgttgccagctaccggtgtgttaaagaaagcagcctccgaggaattactggaaaagtcttcatacccgtcgagtgaggagaagagcagcgaaaaatctttggagcggaaccatctacagcacctgtgtgctcaaaacagaggagtcagctcctctttcgatatgccgaagagggcctccgagaagccagtctggaagctgccgcaccccatcctcccctttagcggcaaccccgaatttctaaaatccgtcacagtgtcttctaattcggaaccgtctacagctctgacgaagcctagggctaaaagcctgtccgccatggacgtcgaaaagtgtacaaagccatgcaaagacagtactaagaaaaattctttcaaaaagttactgtcaatgaagctcagcatttgcttcatgaagagtgattttcaaaagttttggtcaaagagtagccagctcggcgataccacaacgggacacctcagcagcggagagcagaagggaatcgaatccgattggcaagggctactggtcggcgaggagaagaggtctaaacccataaaggcttacagcactgagaactattctttagagagccagaagaaacggaaaaaatcgagaggtcagacttccgctgcgaatggactaagagccgagagtctggatgaccagatgctctccagggaatcctccagtcaggctccatataaatctgtgacgtccctttgcgcccctgagtacgagaacattcgccattacgaagagataccagagtacgaaaaccttcctttcatcatggccatccgcaagacccaggagctcgagtggcagaactcctcttctatggaggacgccgatgcaaacgtatacgaggtggaagagccatacgaggctcctgacggtcagctccagctcgggcctaggcaccagcacagtagctcaggtgcttcacaagaggaacagaatgatttgggtttgggcgacctgccatccgacgaggaagaaattataaattcctccgacgaggacgatgtgagctctgaatcttcaaaaggcgaacctgaccctcttgaggataaacaggatgaagacaatggcatgaaatcgaaggttcatcatatcgccaaggaaattatgtcatccgagaaggtgttcgtggacgtactcaaactgttgcacattgacttccgcgatgctgtagcccatgcaagcagacagttaggaaagcccgtaatcgaggaccgcatcttaaaccaaatcttatattatctgccccaactgtatgagcttaatcgtgatctcctgaaagagctggaggagcgaatgctgcattggacagaacagcagagaatcgccgacattttcgtcaaaaaagggccttatctcaagatgtactccacatatattaaggagtttgacaaaaatatcgctctgctggatgagcagtgcaaaaagaaccccggttttgcggcagtggtgcgggagttcgagatgtcccctagatgtgcaaatttggccttgaagcactacttgctgaaacctgtgcaaagaatccctcagtaccgcctgctcctcaccgactatcttaagaatctgatcgaggatgccggtgactatcgagatactcaggatgccttagctgtagttattgaagtggctaaccatgccaacgacactatgaagcagggagataatttccagaagttgatgcagatccagtactctctgaacggacatcacgaaattgttcagcctggtcgtgtgtttctcaaagagggtattctcatgaaactttctcgcaaggtgatgcagcccagaatgtttttcttatttaacgacgccctcctgtatactactccagtccagtccggcatgtataagttgaacaacatgctgtctcttgccggaatgaaggtgcggaaaccgacacaggaggcgtatcagaatgagctgaagatcgaatcagtcgagaggtcgttcatcttaagcgccagttctgctaccgagagagatgagtggttagaagccatctctcgcgctatcgaggagtatgcaaaaaagcgaatcaccttttgtccttcacggtctctggatgaagctgacagtgagaacaaggaagaggtctctcctctgggttctaaggccccaatctggattcccgacacgagggcaaccatgtgcatgatatgtacctctgagtttaccctcacctggaggcgtcatcactgtagagcatgtgggaaaattgtatgccaggcatgcagttctaataagtatggcttggactacctgaaaaatcagccagctcgtgtatgtgagcattgcttccaggagctgcagaaactcgaccatcagcactcacccagaatcggctcccctggaaatcacaaatcacccagttctgccctgagctcagtcctgcactctattccttctggaagaaagcagaaaaagattccggcagctttgaaagaggtcagtgcaaacaccgaagattcctccatgtctggatatttgtacaggtctaaaggaaacaagaaaccctggaagcacttctggtttgtgatcaaaaataaagtgttgtacacctatgcagcatccgaagacgttgctgcactggagagtcaacctttgctcggcttcacagtgattcaggttaaggatgagaactcagagtccaaagtgttccagctgctccacaagaacatgctgttctatgtgttcaaagcagaggatgcccactctgcccagaagtggatcgaggccttccaagaaggtacaatcctgtag

SEQ ID NO: 198003 - DNA, 4125 bp, Artificial Sequence
  derived and/or modified sequence
atgacatctgccgctgaaataaagaaacccccagtggctccaaaacctaagtttgttgttgctaacaacaaacccgcacccccacccattgcccctaagcccgatatcgtcatctcttccgtgccccaatccacaaagaaaatgaagcccgcaatcgcccctaaaccaaaagtcctaaagacctctcctgtgagggagattggtcagtcaccttctaggaagataatgttaaacttggagggtcataagcaggaactagccgaaagcactgacaactttaactgcaaatacgaagggaaccagtcgaacgactatattagtccaatgtgcagctgtagctctgagtgtatacacaagctcggccatcgggaaaatctctgtgttaaacaactcgtcctggaacccctcgagatgaatgagaacctcgagaatagcaaaatcgacgagacgctgacgattaagactaggtccaaatgcgacctatatggcgagaaagctaaaaatcaagggggagtggtcttgaaagctagtgtgctggaggaagagttgaaggacgccctgatccaccagatgcccccattcatttcagctcaaaagcaccgcccaaccgactcgcctgaaatgaacgggggatgtaattcaaatggacagtttaggatcgagttcgcggatctatctcctagcccttcctcctttgaaaaagtccctgaccaccatagttgtcacctgcaactgcctagcgacgaatgtgaacatttcgagacttgccaggatgattccgagaagtctaacaattgtttccagtcatcagaattagaagccttagagaatggtaagaggagtacactcatctctagtgatggtgtgtccaaaaagtcagaggtgaaggatcttgggccactggaaatccacttggtgccatatacgcccaagtttccaacacccaagcctcgaaaaacccgtacggcccgtctccttcgtcaaaagtgcgtggatacaccctctgaaagcacggaggaacctgggaacagtgacagttcctcgtcttgcttaacagagaactcccttaaaattaacaaaatctccgttctccaccagaatgttctttgcaagcaggaacaagtggacaagatgaaattaggcaataagtctgaactcaacatggagagcaactccgatgcccaagacctcgttaactcccagaaggcaatgtgtaatgaaacaacgtcttttgaaaagatggctccatctttcgataaggactcgaacctctcttcggattctaccacagttgacgggagctctatgtccttggctgttgacgagggcacgggatttattaggtgtacagtgtcaatgtctctgccgaagcaactaaaattgacctgtaatgagcacctgcagtcaggtagaaatttaggcgtgtccgccccacagatgcagaaggagtcggtgataaaagaggagaactcactgcggattgtgccaaaaaagccacagaggcactccctgccagctactggggtgctgaagaaagccgcttcagaggaacttttggaaaagtcatcttatccaagttctgaagaaaagagctcagagaagtcactggaacggaatcacctacagcatctttgcgcccagaatcgaggagtgagcagttcattcgacatgccgaaaagagctagcgagaaacctgtgtggaagcttccgcacccaatactgccattctctggtaatccagagtttctgaagtcagtcacagtatcctcaaattccgaaccgagtaccgctctgactaagcctcgcgctaaatcactgtctgctatggacgtggagaagtgtactaagccttgcaaagacagcactaaaaaaaactcattcaaaaagctgctgtcaatgaaattgtcaatctgtttcatgaagagcgactttcagaaattttggagcaagtctagccaacttggggatacaaccacggggcacctgtccagtggagaacaaaagggaatcgaaagcgattggcagggcctgctcgttggagaagagaagcgttcaaaaccgattaaggcttactccactgagaattattctcttgaaagtcagaagaaacggaagaagagtagaggacagacctccgcggcaaacgggcttagagctgaatctttggacgatcaaatgctctcccgtgagtcctcttcccaggctccatacaagagcgtgacgtcattgtgtgcacccgaatatgaaaatatcagacattacgaggagattcctgaatacgaaaatttgccttttattatggctattaggaagacccaggaactggaatggcaaaattcgagcagcatggaggacgccgacgccaatgtttatgaagtggaagagccttacgaagctccagacggacagctgcaacttgggcctagacaccagcatagtagtagtggagccagccaggaagaacagaacgatctgggcctgggcgaccttccttctgacgaggaagagatcattaacagcagtgacgaagatgacgtctcatccgagtcctccaaaggggaacctgatccactcgaggataagcaggatgaggacaatgggatgaaatccaaggtccaccatatcgcaaaagagattatgagttccgagaaagtgtttgtggacgtgctgaaactgctgcacatagacttcagagacgccgttgcacacgcgtcccggcagcttggtaagccagtgatagaagatcgtattctgaaccaaatcctgtattatttgcctcagttatacgaactgaatagggatcttcttaaagagttagaagagaggatgctgcattggaccgaacagcagagaatcgctgatattttcgtaaagaaagggccatatctgaaaatgtactccacttacatcaaagaatttgataagaacattgctttgctggacgagcagtgtaagaagaaccccggatttgccgctgtggttcgggaattcgagatgtctccaagatgcgccaatctcgcactgaaacactacttattgaaacccgtacagaggatcccgcagtaccgcctccttctgacggactatttaaagaaccttatagaggacgctggagactaccgtgatactcaggacgcacttgccgtggttatcgaggtagcaaaccacgcgaacgacaccatgaagcaaggtgacaatttccaaaagctcatgcaaattcagtatagccttaacggacaccacgagatagttcagccagggagggtgtttttgaaggaggggatcctaatgaagttatcaagaaaggtgatgcagcctcgcatgtttttcctgtttaacgacgctcttctgtacaccacaccagtgcagagcggaatgtataagctcaacaacatgcttagcctcgcagggatgaaagtgagaaagccaactcaagaggcctatcaaaacgagcttaaaatagaatcggtagaacggtcgttcatattgagtgcctcgtctgcaactgagagagatgagtggctagaagctattagtcgggctatcgaggagtacgctaagaaacgtataacgttctgtccttctcgctccctggatgaggctgattcagagaacaaggaagaggtgtcccctctcggcagcaaagccccaatctggattcctgacaccagagccactatgtgtatgatttgtacaagtgaatttaccctcacatggcgacgccatcactgccgagcgtgtggtaagatcgtgtgtcaggcctgctccagcaacaagtacgggctcgattatttaaaaaatcagcccgctcgggtttgcgagcactgctttcaagagcttcagaagctcgatcatcagcatagtcccagaattggctccccaggaaatcacaaatccccttcatctgccctctccagcgtgcttcatagtatcccatctggcagaaaacagaaaaagatccctgctgcacttaaagaggtgagtgctaacactgaggattcctccatgtctggctatctctacagatccaaaggcaataaaaaaccctggaagcatttttggtttgtgattaagaataaagtgttgtatacatacgccgcatcagaggtcaggtcagagatttag

SEQ ID NO: 198004 - DNA, 3621 bp, Artificial Sequence
  derived and/or modified sequence
atgacatctgccgcagagatcaagaaaccgcctgtggccccaaaacctaaattcgtagtggccaacaacaagcccgctccaccacccattgcccctaagcccgacatagtcatctcgtccgtgcctcaaagcacaaagaaaatgaagccagccatcgccccaaagcctaaggtgctcaaaacttcccctgttagagagattgggcaatccccctcccgcaagatcatgctcaatctggaaggccacaagcaggagcttgctgaatctaccgacaatttcaactgcaaatatgaaggcaaccagagcaatgattacatctctcccatgtgttcttgttcttcagagtgtatccataaactgggccaccgggaaaacctctgcgtcaaacagcttgtcctcgaaccgttagagatgaacgagaatctggaaaactctaagattgacgagacactaacaatcaaaactagatcaaagtgcgatctctatggcgaaaaggcaaaaaaccagggaggggttgtgctgaaggcctcagtgcttgaagaagaattgaaggacgcacttatccaccagatgcccccatttatctcagcacagaaacaccgcccaactgattctccagaaatgaacgggggatgtaactcaaatggtcaattccgcatcgaatttgccgatctctctccgtctccatcttcattcgagaaagtgcctgaccaccactcttgccacctgcaactgccttctgatgagtgcgagcattttgagacatgtcaagacgattcagagaagtctaataattgcttccagagctcagagctggaagcactggagaacgggaagaggtccacgctgattagcagcgacggagttagcaagaaaagtgaggtgaaagacttggggcctctggagatccacctggtcccttatacacctaaattccccacccccaagccacgaaagacacgtaccgccagactgttaaggcaaaaatgcgtggatacgccaagcgaatcgaccgaagaaccgggtaacagcgactcatcatcgtcctgcctaaccgaaaattcactgaaaattaataagataagcgtgttacaccagaatgttttgtgtaagcaggaacaggtggacaagatgaagctggggaacaagtcagagctaaacatggaaagcaattctgatgctcaggacctggtgaacagccagaaggccatgtgcaacgaaacaactagttttgaaaagatggccccttcatttgataaagactctaacctcagcagtgatagcacgactgtagatggaagctcaatgagtctagctgttgacgaaggaactgggttcattcgctgcacagttagtatgagcctgcctaagcagcttaagcttacatgtaatgagcacctgcagagcggtcgaaacctgggagtatcagccccacaaatgcagaaggaatctgtcataaaagaggagaactctcttcgaattgtgcctaaaaaaccccaacgacacagtctccctgcaactggggtgttgaagaaagccgcatccgaggaactgctcgagaagtctagctatccctcttccgaggagaaatctagcgaaaaatctctcgaacgtaaccacttgcagcacctgtgtgctcaaaaccgaggcgtgtctagctcattcgacatgcccaaaagggcctctgagaaacctgtgtggaagttgccgcacccaattctacccttcagtggcaaccccgaatttctcaagtccgtgaccgtgagcagtaacagtgaacccagtacagccctcacgaagcccagagctaagtcactgagcgccatggacgtagagaaatgcacaaaaccctgcaaggatagtactaagaagaattccttcaaaaaattattgtcgatgaagctcagtatttgcttcatgaagtccgacttccagaagttttggagtaagagcagtcagctgggtgatactacaaccggccacctgagcagtggggaacagaagggaattgaatccgattggcagggcctgttagtgggtgaagaaaagaggtctaaaccgatcaaggcttactcgaccgaaaattacagtctggaaagtcagaagaagaggaaaaagagcagaggccagacatctgcagcaaatggactgagggcagagtcgctcgacgatcagatgttgtccagagagtcatcttctcaggcgccttacaagagcgtgacctcgctgtgtgcgcctgagtatgagaatatccggcactacgaggagatcccagaatatgaaaacttgccttttatcatggcgatccgaaaaacacaggagctagagtggcagaactcttcaagtatggaggatgcggatgccaacgtgtacgaagtcgaggagccatacgaggcgcctgacggacaactgcagttgggcccacgccaccaacactcctcatcgggggcaagccaggaagagcaaaatgacctgggcctgggcgatcttccctcagacgaggaagagatcatcaactcatcagacgaagacgatgtcagttcagaatcttccaagggtgaaccagacccactggaggacaagcaggatgaggataatggcatgaaatcaaaggttcaccacatcgccaaagaaatcatgtcttcagaaaaagtatttgttgatgtgctcaagctactgcatattgactttagagatgctgtggctcacgcgtctaggcagcttggcaagccagttattgaagacagaattctgaaccaaatcctatactatctccctcagctctatgaacttaatcgcgatttactcaaggaactggaggagcgcatgctccattggaccgagcagcaacgtatagcggatatctttgttaagaaaggtccctatctgaaaatgtacagcacctacataaaggagttcgacaagaacatcgccctgctggacgagcaatgcaagaagaaccctgggttcgcagctgtggtgcgggaattcgagatgtcaccaaggtgtgcaaacctggccctgaaacattatttgttgaagcccgtgcagaggataccgcagtatcgcttgcttctcacagactacctaaaaaatttgatcgaggatgccggtgactacagagatacccaagacgccctggctgtggtcatcgaggttgccaatcatgcaaacgataccatgaagcaaggagacaactttcaaaagctcatgcagatccagtacagtctgaatggtcatcatgaaattgtccagcctggtagagtcttcctgaaggagggaatcctaatgaaactatccagaaaggtcatgcagccacggatgttctttctctttaacgatgccctgttgtacaccactcccgtccagagcggaatgtataaactaaataatatgctgtctctcgccggtatgaaggtccggaagcccactcaggaagcctatcagaatgagttaaaaatcgaatctgtggaaagaagcttcatcttgagcgcctcttccgcaaccgagcgcgacgaatggctggaggcaatctctagagcaattgaggaatatgcaaagaagagaatcaccttttgtccttcacgaagcttggatgaggcagattctgagaacaagtag

SEQ ID NO: 198005 - DNA, 4568 bp, Artificial Sequence
  derived and/or modified sequence
agtgctcgcccgcccgaccccggcggctcgcgcccgggagcgccgcagggtcgctagagtcggccgcgtcctttgtgtggcgctcaggctgcgccgcggggcggcgggacggaatgtgggcgctgcgggggcttttctctcctacccgaactgtgggaacaatggactgaaaggggaagatggattgaggggccgagcggggaagcgagctgcaccggggaatcatgacttctgcagccgagataaagaagccaccagtggcccccaagcccaagtttgttgtggcaaataataagccagccccacctcctattgcacctaaacccgacattgtgatttctagtgttccacagtcgacaaagaaaatgaaaccagcaatagccccaaaaccaaaagtcctgaagacctcacctgttcgagagattgggcagtcgccatcaaggaaaatcatgttgaacctggaagggcataaacaggaattagctgaaagcactgacaactttaattgtaaatatgaaggcaatcagagcaatgattatatttcaccaatgtgttcctgcagttctgagtgtatccataagctgggccatagagagaatttgtgtgtaaagcagcttgttttagagcccctggaaatgaatgaaaatttagaaaacagtaaaattgatgagactttgactataaaaactaggagtaaatgtgatttgtatggtgaaaaagccaagaaccagggtggggttgttttaaaggcaagcgttttagaagaggagctcaaagatgccttaatacaccaaatgccaccttttatttctgcacagaagcacaggcccacagacagcccagaaatgaatggtggctgtaattcaaatggacaattcagaattgaatttgcggatttgtcaccttccccatccagctttgaaaaagttcctgatcatcacagttgccacttacagcttcctagtgatgaatgtgaacattttgaaacttgccaggatgacagtgaaaaaagcaataattgctttcagtcatctgaactagaggctctggaaaatgggaaaaggagtactttaatatcttcagatggagttagtaagaaatcagaagtcaaagaccttggtcccttagaaattcatttagtaccatataccccaaaatttccaactcccaagcccagaaagacacgaactgctcgtctgttacgccaaaagtgtgtagatactcctagtgaaagcactgaagaaccggggaattcagacagtagctcttcctgtcttactgaaaatagtttgaaaatcaataaaatcagtgttctgcatcagaatgttttgtgtaagcaggaacaggtggataaaatgaagctaggaaataaaagtgaattgaatatggaatccaacagtgatgcacaggacttagtcaattcacagaaagccatgtgtaatgaaacaacttcctttgaaaaaatggcaccttcttttgataaagactctaatttgagttctgacagcacaactgtagatggttctagtatgtcgcttgctgtggacgaagggaccggttttataagatgtactgtatctatgagcctgcctaagcagctcaaattaacttgcaatgaacatttgcaatctgggagaaacctgggagtttctgcccctcaaatgcaaaaggaatctgttataaaagaggaaaattctctacgaattgtccccaaaaaacctcaaagacatagcttgcctgctacaggagtgcttaaaaaggctgcctccgaggagcttttggaaaaaagttcttatccttcaagtgaagaaaaaagttcagagaagagtctagaaagaaatcaccttcagcatttgtgtgcccaaaaccgtggtgtgtcatcctcctttgatatgcctaaacgggcttcagaaaagccagtgtggaagttacctcatcctattttacccttttcagggaacccagaattcttaaagtctgtcaccgtatcgtcaaacagtgagccttcaacagccctaaccaagcccagagcaaaatcgttatctgctatggatgtggaaaagtgcactaagccttgcaaagactctacaaagaaaaactcttttaaaaagttgctcagcatgaaactgtccatctgtttcatgaagagtgactttcaaaaattttggtccaagagtagccaactcggagacaccaccacaggccacctctccagtggggagcagaaggggattgaaagtgattggcaaggcttgttggtaggagaggagaagagaagtaaacccatcaaggcatattccacagaaaactatagcctggaatctcaaaagaagaggaagaagtctcggggccagaccagtgcagctaatggtctgagagctgagtctttggatgaccaaatgctctcccgggagtcatcatctcaggcaccttacaagtctgttacaagcctctgtgcaccggagtatgaaaatatacgccattatgaggaaataccagagtacgagaacttgccatttattatggctatacggaaaactcaagagttggaatggcagaattccagcagcatggaggacgctgatgcaaatgtgtatgaggtagaagagccgtatgaagctccagatggccagctgcagcttggacccagacatcagcattccagttcaggagcatcccaggaggaacagaatgatcttggtcttggtgaccttccctctgatgaggaggaaatcatcaacagttctgatgaagatgatgtcagctctgagtcaagtaaaggagagcctgacccactggaagataaacaggatgaagataatggaatgaaaagtaaagttcatcatattgccaaggagatcatgagctcagagaaagtgtttgtggatgtgttaaaacttttgcatattgatttccgggatgcagtagctcatgcttccaggcaacttgggaaaccagtgattgaggaccggattctaaatcagatcctatactacttgcctcagctgtatgagctcaaccgggatctcttgaaggaactggaggaaagaatgttgcactggactgaacaacaaagaattgctgatatctttgtaaagaagggaccatatctaaaaatgtattccacatacatcaaagaatttgataagaatatagccttgctggatgaacagtgcaagaaaaatccaggttttgctgctgttgttagagaatttgagatgagccctcgctgtgctaatctggccctcaagcactacctgctcaagccggttcagaggatcccccagtacaggctgttgctgacagattatttgaagaatctcatagaagatgctggagattacagagacactcaagatgcccttgctgttgttatagaggtagccaaccacgccaatgacaccatgaagcaaggagacaactttcagaaacttatgcaaattcagtacagcttaaatggacaccatgaaattgtgcagcctggtcgggtttttctcaaagaaggaattctgatgaagctgtctcggaaagtgatgcaacctcgaatgtttttcctgtttaatgatgccctgctgtatacaacaccagtgcagtctgggatgtataaactgaacaacatgctctcactggctggaatgaaggtcagaaaacctacccaagaagcctatcagaatgaattaaagattgaaagtgtagaacgttccttcattctctcagccagttctgccacagaaagggatgaatggctagaagcgatttccagggcaatagaagagtatgccaagaaaagaatcaccttctgtcctagtaggagtcttgatgaggcagactcagaaaataaagaagaagttagtcctcttggatcgaaggctcccatctggattcctgataccagagccacaatgtgtatgatctgcacaagcgaattcactctcacctggagacgacaccactgccgggcctgtggaaagattgtatgccaagcttgttcgtctaataagtatggcttagattacctgaaaaatcaaccagcaagagtatgtgaacattgtttccaagaactgcagaaattagatcaccagcactcccctaggattggatctcctggaaatcacaaatctccttcaagtgccttatcatcagtcttacatagcattccatcagggaggaaacagaaaaaaatcccagctgctctcaaagaagtatcagcaaacacagaggattcttctatgagtggctacttgtacagatcaaagggcaataaaaaaccctggaaacacttttggtttgtcataaaaaataaagtactatatacatatgctgcaagtgaggtaagatctgaaatctaaagatgagtaatttggggttttgtaatgccaactgcaagtaattacaatattttaaaaatccatttattttacataagattttttgctttgcttttggatgggggaggtgttgttgctgttatttttaatgtgaacagtgttcttgctttgtacctggagagctctttctcaaatgtgttaggaattttccatattattaaaatgcaatttttgtgtgtg

SEQ ID NO: 198006 - DNA, 3757 bp, Artificial Sequence
  derived and/or modified sequence
aggctgcgccgcggggcggcgggacggaatgtgggcgctgcgggggcttttctctcctacccgaactgtgggaacaatggactgaaaggggaagatggattgaggggccgagcggggaagcgagctgcaccggggaatcatgacttctgcagccgagataaagaagccaccagtggcccccaagcccaagtttgttgtggcaaataataagccagccccacctcctattgcacctaaacccgacattgtgatttctagtgttccacagtcgacaaagaaaatgaaaccagcaatagccccaaaaccaaaagtcctgaagacctcacctgttcgagagattgggcagtcgccatcaaggaaaatcatgttgaacctggaagggcataaacaggaattagctgaaagcactgacaactttaattgtaaatatgaaggcaatcagagcaatgattatatttcaccaatgtgttcctgcagttctgagtgtatccataagctgggccatagagagaatttgtgtgtaaagcagcttgttttagagcccctggaaatgaatgaaaatttagaaaacagtaaaattgatgagactttgactataaaaactaggagtaaatgtgatttgtatggtgaaaaagccaagaaccagggtggggttgttttaaaggcaagcgttttagaagaggagctcaaagatgccttaatacaccaaatgccaccttttatttctgcacagaagcacaggcccacagacagcccagaaatgaatggtggctgtaattcaaatggacaattcagaattgaatttgcggatttgtcaccttccccatccagctttgaaaaagttcctgatcatcacagttgccacttacagcttcctagtgatgaatgtgaacattttgaaacttgccaggatgacagtgaaaaaagcaataattgctttcagtcatctgaactagaggctctggaaaatgggaaaaggagtactttaatatcttcagatggagttagtaagaaatcagaagtcaaagaccttggtcccttagaaattcatttagtaccatataccccaaaatttccaactcccaagcccagaaagacacgaactgctcgtctgttacgccaaaagtgtgtagatactcctagtgaaagcactgaagaaccggggaattcagacagtagctcttcctgtcttactgaaaatagtttgaaaatcaataaaatcagtgttctgcatcagaatgttttgtgtaagcaggaacaggtggataaaatgaagctaggaaataaaagtgaattgaatatggaatccaacagtgatgcacaggacttagtcaattcacagaaagccatgtgtaatgaaacaacttcctttgaaaaaatggcaccttcttttgataaagactctaatttgagttctgacagcacaactgtagatggttctagtatgtcgcttgctgtggacgaagggaccggttttataagatgtactgtatctatgagcctgcctaagcagctcaaattaacttgcaatgaacatttgcaatctgggagaaacctgggagtttctgcccctcaaatgcaaaaggaatctgttataaaagaggaaaattctctacgaattgtccccaaaaaacctcaaagacatagcttgcctgctacaggagtgcttaaaaaggctgcctccgaggagcttttggaaaaaagttcttatccttcaagtgaagaaaaaagttcagagaagagtctagaaagaaatcaccttcagcatttgtgtgcccaaaaccgtggtgtgtcatcctcctttgatatgcctaaacgggcttcagaaaagccagtgtggaagttacctcatcctattttacccttttcagggaacccagaattcttaaagtctgtcaccgtatcgtcaaacagtgagccttcaacagccctaaccaagcccagagcaaaatcgttatctgctatggatgtggaaaagtgcactaagccttgcaaagactctacaaagaaaaactcttttaaaaagttgctcagcatgaaactgtccatctgtttcatgaagagtgactttcaaaaattttggtccaagagtagccaactcggagacaccaccacaggccacctctccagtggggagcagaaggggattgaaagtgattggcaaggcttgttggtaggagaggagaagagaagtaaacccatcaaggcatattccacagaaaactatagcctggaatctcaaaagaagaggaagaagtctcggggccagaccagtgcagctaatggtctgagagctgagtctttggatgaccaaatgctctcccgggagtcatcatctcaggcaccttacaagtctgttacaagcctctgtgcaccggagtatgaaaatatacgccattatgaggaaataccagagtacgagaacttgccatttattatggctatacggaaaactcaagagttggaatggcagaattccagcagcatggaggacgctgatgcaaatgtgtatgaggtagaagagccgtatgaagctccagatggccagctgcagcttggacccagacatcagcattccagttcaggagcatcccaggaggaacagaatgatcttggtcttggtgaccttccctctgatgaggaggaaatcatcaacagttctgatgaagatgatgtcagctctgagtcaagtaaaggagagcctgacccactggaagataaacaggatgaagataatggaatgaaaagtaaagttcatcatattgccaaggagatcatgagctcagagaaagtgtttgtggatgtgttaaaacttttgcatattgatttccgggatgcagtagctcatgcttccaggcaacttgggaaaccagtgattgaggaccggattctaaatcagatcctatactacttgcctcagctgtatgagctcaaccgggatctcttgaaggaactggaggaaagaatgttgcactggactgaacaacaaagaattgctgatatctttgtaaagaagggaccatatctaaaaatgtattccacatacatcaaagaatttgataagaatatagccttgctggatgaacagtgcaagaaaaatccaggttttgctgctgttgttagagaatttgagatgagccctcgctgtgctaatctggccctcaagcactacctgctcaagccggttcagaggatcccccagtacaggctgttgctgacagattatttgaagaatctcatagaagatgctggagattacagagacactcaagatgcccttgctgttgttatagaggtagccaaccacgccaatgacaccatgaagcaaggagacaactttcagaaacttatgcaaattcagtacagcttaaatggacaccatgaaattgtgcagcctggtcgggtttttctcaaagaaggaattctgatgaagctgtctcggaaagtgatgcaacctcgaatgtttttcctgtttaatgatgccctgctgtatacaacaccagtgcagtctgggatgtataaactgaacaacatgctctcactggctggaatgaaggtcagaaaacctacccaagaagcctatcagaatgaattaaagattgaaagtgtagaacgttccttcattctctcagccagttctgccacagaaagggatgaatggctagaagcgatttccagggcaatagaagagtatgccaagaaaagaatcaccttctgtcctagtaggagtcttgatgaggcagactcagaaaataaa

SEQ ID NO: 198007 - DNA, 1668 bp, Artificial Sequence
  derived and/or modified sequence
atggccttcacccagctgaccttcagagacgtggccatcgagttcagccaggacgagtggaagtgcctgaacagcacccagagaaccctgtacagagacgtgatgctggagaactacagaaacctggtgagcctggacctgagcagaaactgcgtgatcaaggagctggccccccagcaggagggcaaccccggcgaggtgttccacaccgtgaccctggagcagcacgagaagcacgacatcgaggagttctgcttcagagagatcaagaagaagatccacgacttcgactgccagtggagagacgacgagagaaactgcaacaaggtgaccaccgcccccaaggagaacctgacctgcagaagagaccagagagacagaagaggcatcggcaacaagagcatcaagcaccagctgggcctgagcttcctgccccacccccacgagctgcagcagttccaggccgagggcaagatctacgagtgcaaccacgtggagaagagcgtgaaccacggcagcagcgtgagccccccccagatcatcagcagcaccatcaagacccacgtgagcaacaagtacggcaccgacttcatctgcagcagcctgctgacccaggagcagaagagctgcatcagagagaagccctacagatacatcgagtgcgacaaggccctgaaccacggcagccacatgaccgtgagacaggtgagccacagcggcgagaagggctacaagtgcgacctgtgcggcaaggtgttcagccagaagagcaacctggccagacactggagagtgcacaccggcgagaagccctacaagtgcaacgagtgcgacagaagcttcagcagaaacagctgcctggccctgcacagaagagtgcacaccggcgagaagccctacaagtgctacgagtgcgacaaggtgttcagcagaaacagctgcctggccctgcaccagaagacccacatcggcgagaagccctacacctgcaaggagtgcggcaaggccttcagcgtgagaagcaccctgaccaaccaccaggtgatccacagcggcaagaagccctacaagtgcaacgagtgcggcaaggtgttcagccagaccagcagcctggccacccaccagagaatccacaccggcgagaagccctacaagtgcaacgagtgcggcaaggtgttcagccagaccagcagcctggccagacactggagaatccacaccggcgagaagccctacaagtgcaacgagtgcggcaaggtgttcagctacaacagccacctggccagccacagaagagtgcacaccggcgagaagccctacaagtgcaacgagtgcggcaaggccttcagcgtgcacagcaacctgaccacccaccaggtgatccacaccggcgagaagccctacaagtgcaaccagtgcggcaagggcttcagcgtgcacagcagcctgaccacccaccaggtgatccacaccggcgagaagccctacaagtgcaacgagtgcggcaagagcttcagcgtgagacccaacctgaccagacaccagatcatccacaccggcaagaagccctacaagtgcagcgactgcggcaagagcttcagcgtgagacccaacctgttcagacaccagatcatccacaccaaggagaagccctacaagagaaactag

SEQ ID NO: 198008 - DNA, 1668 bp, Artificial Sequence
  derived and/or modified sequence
atggccttcacccagctaacattccgcgacgtggcaatcgagttttcacaggacgagtggaaatgtctgaactctacccagaggaccctataccgggatgtaatgttggagaattaccgcaacctggtgtcgctggaccttagcaggaactgtgtgatcaaggagctcgccccccagcaggagggcaaccccggagaggtgtttcatactgtcacgctggagcagcatgaaaaacacgacattgaagagttttgcttcagagagatcaaaaaaaagatccacgattttgactgtcaatggcgggacgatgaaaggaactgtaataaggtaaccacagccccaaaggaaaatttgacctgcaggagagaccagcgagacagaagggggattgggaacaaatccatcaagcatcaactcggcctgtctttcctgcctcacccccacgaattgcagcagtttcaggctgagggcaaaatttatgaatgcaatcacgtagaaaagagcgtgaaccatggatcctctgtcagcccaccgcagatcatttccagtacgataaagacacacgtgtcaaataaatacggaacagatttcatctgcagtagtctgcttactcaggagcagaagtcatgcattcgggaaaagccgtacagatacatcgaatgtgacaaggccctgaaccacggtagtcacatgacagttagacaagtctctcattctggggaaaaggggtacaagtgtgacttgtgcgggaaggttttctcccaaaagtcaaacctagccaggcattggagggtccatacgggtgaaaagccctacaaatgcaacgaatgcgaccgtagctttagcagaaattcctgcctcgccctgcaccgacgagtccatacaggagaaaagccctacaagtgttacgagtgtgataaggtgttctcaaggaactcctgcctggcactgcaccagaagacacacatcggggaaaagccgtacacctgcaaagagtgcggcaaggcatttagcgtgagatcaacactgaccaaccaccaagtcattcactccggtaagaagccttataagtgtaatgaatgtggtaaagtgttttcgcagaccagttctctggcaacgcatcagcggatccacacaggagagaagccatacaagtgcaatgaatgtggcaaggtgttttcacagacatctagcctggccagacactggaggatccatactggcgaaaaaccatacaagtgtaatgaatgcggcaaggtgttttcctataacagccatctggcctcccaccgaagagtgcatacaggcgaaaaaccctacaagtgtaacgaatgtggtaaggcattttccgtccacagtaacctgacgacacatcaggtgatccacaccggggagaaaccctataagtgtaaccagtgcgggaaaggcttctctgttcactcatccttaactactcatcaggtcattcataccggggagaagccctacaagtgtaatgagtgcggcaagtcttttagcgtgcgccccaatttgacccgtcaccagatcattcacacggggaagaagccatacaagtgctctgactgtgggaagtcattcagtgtgcggccaaacttgtttagacatcaaattatacatactaaggagaagccttacaaacgtaattag

SEQ ID NO: 198009 - DNA, 1668 bp, Artificial Sequence
  derived and/or modified sequence
atggccttcacccagctgaccttcagagatgtggccatcgagttcagccaggatgagtggaagtgcctgaacagcacccagaggaccctgtacagagatgtgatgctggagaactacagaaacctggtgtccctggacctgagcaggaactgtgtgatcaaggagctggccccccagcaggagggcaaccctggagaggtgttccacacagtgaccctggagcagcacgagaagcatgacatcgaggagttctgcttccgggagatcaagaagaagatccatgactttgactgccagtggagagatgatgaaagaaactgcaacaaggtgaccacagcccccaaggagaacctgacctgcagaagagaccagagggacagaagaggcatcggcaacaagagcatcaagcaccagctgggcctgtccttcctgccccacccccatgagctgcagcagttccaggccgagggcaagatctatgagtgcaaccacgtggagaagtctgtgaaccacggcagctctgtgtccccaccccagatcatcagcagcaccatcaagacccacgtgagcaacaagtatggaacagacttcatctgcagcagcctgctgacccaggagcagaagagctgcatccgggagaagccctaccgctacattgaatgtgacaaggccctgaaccacggcagccacatgacagtgcggcaggtgagccacagcggggagaagggctacaagtgtgacctgtgtgggaaggtgttcagccagaagagcaacctggcccggcactggagggtgcacactggagagaagccctacaagtgcaatgaatgtgacaggagcttcagcaggaacagctgcctggccctgcacagaagagtgcacactggagagaagccctacaagtgctatgaatgtgacaaggtgttcagcaggaacagctgcctggccctgcaccagaagacccacatcggggagaagccctacacctgcaaggaatgtgggaaggccttctctgtgcgcagcaccctgaccaaccaccaggtgatccacagcggcaagaagccctacaagtgcaatgaatgtgggaaggtgttcagccagaccagcagcctggccacccaccagaggatccacactggagagaagccctacaagtgcaatgaatgtgggaaggtgttcagccagaccagcagcctggcccggcactggaggatccacactggagagaagccctacaagtgcaatgaatgtgggaaggtgttctcctacaacagccacctggccagccacagaagagtgcacactggagagaagccctacaagtgcaatgaatgtgggaaggccttctctgtgcacagcaacctgaccacccaccaggtgatccacactggagagaagccctacaagtgcaaccagtgtgggaagggcttctctgtgcacagcagcctgaccacccaccaggtgatccacactggagagaagccctacaagtgcaatgaatgtgggaagagcttctctgtgcggcccaacctgaccaggcaccagatcatccacacaggcaagaagccctacaagtgcagcgactgtgggaagagcttctctgtgcggcccaacctcttccgccaccagatcatccacaccaaggagaagccctacaagaggaactag

SEQ ID NO: 198010 - DNA, 1668 bp, Artificial Sequence
  derived and/or modified sequence
atggccttcacccagctgaccttccgggacgtggccatcgagttctcccaggacgagtggaagtgtttgaactcaacccagagaaccctatacagagatgtgatgctggagaattacaggaatctagtgagtttagatctttctcgtaattgcgttatcaaagagcttgcgccgcaacaggaaggcaatcctggcgaagtattccacacagtgacattagaacaacacgaaaagcatgacatcgaggagttctgctttcgagaaattaagaagaaaattcacgattttgattgtcaatggcgggacgatgaaagaaattgcaacaaggtgacgaccgctcccaaagaaaacctaacttgcagaagagaccagagagatcggcggggaattgggaataagtcaatcaaacatcaacttggactttcctttctgccccatccacacgagcttcagcagtttcaggctgagggaaagatttatgagtgtaaccatgtcgaaaagagtgtgaatcacgggtctagcgtcagtccgccccaaatcatctctagtaccattaaaactcacgtttcaaataagtatggaacagacttcatctgctcctctctgctgacacaggagcagaaatcgtgcatccgggagaaaccctacagatacatcgagtgtgacaaggcactgaaccatgggagtcacatgacagtgagacaggtgtctcactccggcgagaagggctataagtgtgacctctgtggaaaagtgtttagtcagaagtctaatctggctcgccattggagagtccatacaggcgagaagccctataagtgtaatgaatgcgatcgctcctttagccgcaactcctgcctggctttacatcgacgggtgcacaccggcgagaagccttataagtgttacgagtgcgacaaggtattctctcgcaactcctgtttggccctgcaccaaaagacacacatcggagagaaaccctacacttgtaaagaatgcggcaaggccttcagcgtacggtcgactctcaccaatcatcaggtaatccactctggtaagaagccctacaagtgcaatgagtgcgggaaggttttcagccagacaagttctctggccactcaccagcgcatccacaccggagagaagccatataagtgcaacgaatgtggcaaagtgttttcccagacctcaagcttggcacgtcactggcgcatccacactggggaaaaaccatacaagtgtaatgaatgtggcaaagtgttttcctataattcccacttggcatctcataggcgggtgcacactggggagaagccttacaaatgcaacgagtgtggcaaagccttctccgtgcacagcaatcttactacgcatcaggttatccacaccggtgagaagccatataaatgcaatcagtgcggcaagggttttagcgtccatagttcactgactacgcatcaggtgattcacacaggagaaaagccatataaatgtaacgaatgtggaaagagttttagcgtgaggccaaatcttaccaggcatcagataatccatactggcaagaaaccatacaagtgtagtgactgcggaaaatcttttagcgttaggccgaatctatttcgccaccagattatccacactaaagaaaagccgtacaagaggaactag

SEQ ID NO: 198011 - DNA, 1668 bp, Artificial Sequence
  derived and/or modified sequence
atggcgtttacacagctcactttccgggatgtggcaatcgaattcagccaagacgagtggaaatgtctgaattctacgcagcggaccctgtatagagatgtcatgctcgaaaattaccgtaacctggttagccttgacttgagtagaaactgtgttattaaggagttagccccacagcaggaggggaaccctggggaggtttttcacactgtgaccttagaacagcatgagaagcacgacatcgaggaattttgctttagggagattaagaaaaaaattcacgacttcgattgccagtggcgagatgacgaaagaaactgtaataaggtcacaaccgcccctaaggagaacctgacctgcaggagggaccagagggatcgtagaggcatcggaaataaatcaatcaaacaccaacttggtttatcgttcctgccacaccctcacgagctgcagcagttccaggctgaagggaagatctatgaatgcaaccacgtggaaaagagcgtgaaccatggatcttccgtgtcacctccacaaattatcagcagtacaatcaagacacacgtgtccaacaagtatggaactgattttatctgtagctcgttgcttacccaggagcagaagtcatgtatccgggaaaagccttatagatatatcgaatgtgataaggctttaaaccatggaagccatatgacagtccgccaggtgagtcattccggcgagaaaggatacaaatgtgatctctgtgggaaggtgttctctcagaaaagcaatctggcacgacattggcgagttcataccggcgaaaagccttacaagtgtaatgaatgcgatagaagtttcagtagaaatagctgtctcgctttgcatagacgcgtgcatacgggcgaaaagccatataaatgctacgagtgtgataaggtctttagtaggaatagctgtctcgcactgcatcagaaaacccatatcggagaaaaaccttatacctgcaaggaatgcggtaaggcgttctcagtgaggagtaccctgacaaatcatcaggtgatccattccggcaagaaaccctacaaatgtaacgagtgtggtaaggttttttcacagacctccagcctggcaactcatcagcgtattcatacgggcgagaaaccgtataaatgcaacgagtgtgggaaagttttttcccaaacttcaagtttggcacgccactggcggatccatacaggtgaaaaaccatataagtgtaacgaatgtggcaaagtgttcagctacaattcacacttagcttcccaccgacgagtccacaccggagagaagccatacaagtgtaacgagtgtgggaaagcattttcagttcatagcaacttaaccacccaccaagtgattcacactggcgagaagccgtacaagtgcaatcagtgcggaaagggtttctcagtgcattcatcactcaccactcatcaggtaatccacactggcgagaagccatacaagtgtaacgaatgcggaaagtccttttctgtccggcctaacttgactcgtcaccagataatccatactgggaagaagccttacaagtgttctgactgtggaaagtcctttagcgtgaggccgaaccttttccgacatcagataattcacaccaaggagaagccttataaaagaaactag

SEQ ID NO: 198012 - protein, 442 aa, Artificial Sequence
  derived and/or modified sequence
MSDSAGGRAGLRRYPKLPVWVVEDHQEVLPFIYRAIGSKHLPASNVSFLHFDSHPDLLIPVNMPADTVFDKETLFGELSIENWIMPAVYAGHFSHVIWFHPTWAQQIREGRHHFLVGKDTSTTTIRVTSTDHYFLSDGLYVPEDQLENQKPLQLDVIMVKPYKLCNNQEENDAVSSAKKPKLALEDSENTASTNCDSSSEGLEKDTATQRSDQTCLEPSCSCSSENQECQTAASTGEILEILKKGKAFVLDIDLDFFSVKNPFKEMFTQEEYKILQELYQFKKPGTNLTEEDLVDIVDTRIHQLEDLEATFADLCDGDDEETVQRWASNPGMESLVPLVQSLKKRMEVPDYEMVHQAGLTCDYSELPHHISTEQEIECLIQSVHYLLKNLPNPTLVTIARSSLDDYCPSDQVDTIQEKVLNMLRALYGNLDLQVYAAESPPS

SEQ ID NO: 198013 - DNA, 3612 bp, Artificial Sequence
  derived and/or modified sequence
aatccgaaaacgcaaccgggtgagggagcgcttccgcccggagagagctggccgggatgaggcgccggctttcccgggtcttctccagctgccaccgctttactgcaaaactgacgggcgcaaaaacatgagtgactccgcgggagggcgcgctggtctccggcgttaccccaagctcccagtgtgggtggtggaggatcatcaggaggttctaccctttatataccgggccataggctcaaagcatcttcctgccagtaatgtaagttttttacatttcgactcacatccagacctccttattcctgtgaatatgccagcagacaccgtgtttgataaggaaacactctttggagaattaagtattgaaaattggattatgcctgcagtttatgctggccatttttcacatgtaatatggtttcatcccacatgggctcagcagatcagagagggcagacaccactttttagtaggcaaagacacttctaccacaacaatcagggttacaagtacagatcattatttcctaagtgatggtctgtatgtacctgaagaccagctagagaaccaaaaacctttacaattggatgtaattatggtaaaaccttataaactctgtaacaatcaagaagaaaacgatgcagtgtcttctgctaagaaaccaaagctagccctggaagattcggaaaacactgcctctactaactgtgactcttcttcagaaggactggaaaaggacacagcaacacagagaagtgaccagacttgcctagaaccatcatgttcatgttcttctgaaaatcaggaatgccagactgctgccagcactggggaaattctggaaattttgaagaaagggaaggcatttgttttagatattgacttggattttttttcagtcaagaatcccttcaaagaaatgttcactcaggaagagtacaaaatcttacaagagctgtaccaatttaagaaacctggcaccaacctaacagaggaagatttggtagatattgttgatactcgaattcatcaattagaggatttagaagccactttcgctgatttgtgtgatggtgatgatgaagaaacggtacagagatgggcttcaaaccctggaatggaatcactagttccccttgtacagagtttgaaaaaacggatggaagtaccagactatgaaatggttcaccaggctggtttaacctgcgattattcagaacttcctcaccatatcagcacagaacaagaaatagagtgtcttattcaatctgtgcattatttgctgaaaaatttaccaaatcctactcttgtgacaattgcaaggtcaagtctggatgattactgtccttctgaccaagttgacactattcaagaaaaggtcctcaatatgctacgtgccctctatggaaatctagacctccaagtgtatgcagcagagtctcctccatcttgaaacaaacaaaacattaggctcctgttgtatcttggtttagtaacaggcccttaattaacttatttgtacatgagtcttccagagaacactgttttatattaactttcagttgaaatctttcagatattttgaatctctgaacaaccattgtcagttgtgaatgatggtaaattttttggcatcaagtctcataaccccaactgatagaactgttgcttatctgtcttccttaagtattttttagggttttgtttttttttttgtttgtttgtttgtttgtcttcacttttcccccaggtctgttgagctgtatgagattcattcatacttcatttattcattcaactaatatttgttgaacacttacatgtaccagacattattaagtgctgggtatatggtaatgaacagaatagacaaggcccctgcccttttaggggagacagatgagaagtaaattacgggttatgagaaatgttatgaaggaaaggacaacaacagacatgtcttagtacttagggtatcatggctttataggaaagtaacattctctatctttttttttttttttaattttataaaaatagagatggggtctcaccatgttacccaggctggtctcaaactcctgggcacaagcaatccacctgccttcgcctcccgaagtgctgggattacagatgtaagtcactaccccagccagaaactaacattctcaaaagctactaccaaaaaaaccccacaaatttgccaatccatgaaagtatcataggaagtctacctttccaaggaatttggcattgtggccctgctcttgccaaatgctctccagcattgttggtatcaaggtggtctggttgagtaaacttgaccaaacaaaaattaactgttttttgcttttctgtttttgttttgctgatcaaaaaagcccttcagggtctcttgtgcatccaggaggtcattgtagatatcaataatatagtgcctaagtgccactttattgccaagtctagattgatacttttttcagataaaccagctttttatgtaaagagtaagggaaaaagttaaatctttaattctgacctgccataaatacccaaagatataaactgtcttccaccacccccctcataactaagacatccttcctgagtcactcttaatcatgaaacttgattttctcaattggccagtcttctgatctttagtatctctttagttcagtaatttttacctacctacttgatttattttcctttaaaaggtgaaatgacatttaaagaaaaacaaacacccatcattcctcagtcccaacacagcagttcttttcactcttgcttgtaactttcaggccttacccacatgtgttcctatagagttgcatgtagctaaaattatagtgtgctgcctaactttgtgctaataacgaaggacacacattatcattgcctcacagtggatggcacctgaccccatttttccaaggattctattttccagtgaatttttgtcaccgagttaatttcccaagtctgatagcatgaatgcttatttgtgctgtgaaaagcagagcagcctgactcagctttccattttcataggataatatgtgccaaaaaaggtttattttcttggtaaaatcagaattgtagaattgtgctatttttaatttttaaaatttttggttagagcttatagacattacttttatgattattttgcgtgctaaataagttaaagggtatgttttgaactatagcactaattaatgtgtgtgatcctagtatgttgatagctttgattttgtgagtggtttactagtcatttattatgattcccatgaactctgatatgattcattgtggttttaactcaggttgaataaaagcatccatttcttttataggaaggtttgtttaattctcatgttctgtgatcatctctttgagaataaaattcagtccctaatagttgaaaagaatcaacttagtaaattatgtcttgcacattccaaataggaaggtatttactttatcaagatgtgtttcatttgtgttctgagtaccagtgaggggataccgtggtacagtgttttgaattgtgtactaatatcattaaagcatgggattttagtggctttttaaaaaatgtga

SEQ ID NO: 198014 - DNA, 3799 bp, Artificial Sequence
  derived and/or modified sequence
aatccgaaaacgcaaccgggtgagggagcgcttccgcccggagagagctggccgggatgaggcgccggctttcccgggtcttctccagctgccaccgctttactgcaaaactgacgggcgcaaaaacatgagtgactccgcgggagggcgcgctggtctccggcgttaccccaagctcccagtgtgggtggtggaggatcatcaggaggttctaccctttatataccgggccataggctcaaagcatcttcctgccagtaatgtaagttttttacatttcgactcacatccagacctccttattcctgtgaatatgccagcagacaccgtgtttgataaggaaacactctttggagaattaagtattgaaaattggattatgcctgcagtttatgctggccatttttcacatgtaatatggtttcatcccacatgggctcagcagatcagagagggcagacaccactttttagtaggcaaagacacttctaccacaacaatcagggttacaagtacagatcattatttcctaagtgatggtctgtatgtacctgaagaccagctagagaaccaaaaacctttacaattggatgtaattatggtaaaaccttataaactctgtaacaatcaagaagaaaacgatgcagtgtcttctgctaagaaaccaaagctagccctggaagattcggaaaacactgcctctactaactgtgactcttcttcagaaggactggaaaaggacacagcaacacagagaagtgaccagacttgcctagaaccatcatgttcatgttcttctgaaaatcaggaatgccagactgctgccagcactggggaaattctggaaattttgaagaaagggaaggcatttgttttagatattgacttggattttttttcagtcaagaatcccttcaaagaaatgttcactcaggaagagtacaaaatcttacaagagctgtaccaatttaagaaacctggcaccaacctaacagaggaagatttggtagatattgttgatactcgaattcatcaattagaggatttagaagccactttcgctgatttgtgtgatggtgatgatgaagaaacggtacagagatgggcttcaaaccctggaatggaatcactagttccccttgtacagagtttgaaaaaacggatggaagtaccagactatgaaatgttcccagcaagttcttcatctccatctgagaccacctcagcctggatttcattgtccatgtcattatcagcattttggtccaagccattcaacaagtctctaggaagttccaaactgtccaacatttccctgccttcttctgagccctccaaactgttccaacctctgccagttccaaagttgcttccacattttcaggttcaccaggctggtttaacctgcgattattcagaacttcctcaccatatcagcacagaacaagaaatagagtgtcttattcaatctgtgcattatttgctgaaaaatttaccaaatcctactcttgtgacaattgcaaggtcaagtctggatgattactgtccttctgaccaagttgacactattcaagaaaaggtcctcaatatgctacgtgccctctatggaaatctagacctccaagtgtatgcagcagagtctcctccatcttgaaacaaacaaaacattaggctcctgttgtatcttggtttagtaacaggcccttaattaacttatttgtacatgagtcttccagagaacactgttttatattaactttcagttgaaatctttcagatattttgaatctctgaacaaccattgtcagttgtgaatgatggtaaattttttggcatcaagtctcataaccccaactgatagaactgttgcttatctgtcttccttaagtattttttagggttttgtttttttttttgtttgtttgtttgtttgtcttcacttttcccccaggtctgttgagctgtatgagattcattcatacttcatttattcattcaactaatatttgttgaacacttacatgtaccagacattattaagtgctgggtatatggtaatgaacagaatagacaaggcccctgcccttttaggggagacagatgagaagtaaattacgggttatgagaaatgttatgaaggaaaggacaacaacagacatgtcttagtacttagggtatcatggctttataggaaagtaacattctctatctttttttttttttttaattttataaaaatagagatggggtctcaccatgttacccaggctggtctcaaactcctgggcacaagcaatccacctgccttcgcctcccgaagtgctgggattacagatgtaagtcactaccccagccagaaactaacattctcaaaagctactaccaaaaaaaccccacaaatttgccaatccatgaaagtatcataggaagtctacctttccaaggaatttggcattgtggccctgctcttgccaaatgctctccagcattgttggtatcaaggtggtctggttgagtaaacttgaccaaacaaaaattaactgttttttgcttttctgtttttgttttgctgatcaaaaaagcccttcagggtctcttgtgcatccaggaggtcattgtagatatcaataatatagtgcctaagtgccactttattgccaagtctagattgatacttttttcagataaaccagctttttatgtaaagagtaagggaaaaagttaaatctttaattctgacctgccataaatacccaaagatataaactgtcttccaccacccccctcataactaagacatccttcctgagtcactcttaatcatgaaacttgattttctcaattggccagtcttctgatctttagtatctctttagttcagtaatttttacctacctacttgatttattttcctttaaaaggtgaaatgacatttaaagaaaaacaaacacccatcattcctcagtcccaacacagcagttcttttcactcttgcttgtaactttcaggccttacccacatgtgttcctatagagttgcatgtagctaaaattatagtgtgctgcctaactttgtgctaataacgaaggacacacattatcattgcctcacagtggatggcacctgaccccatttttccaaggattctattttccagtgaatttttgtcaccgagttaatttcccaagtctgatagcatgaatgcttatttgtgctgtgaaaagcagagcagcctgactcagctttccattttcataggataatatgtgccaaaaaaggtttattttcttggtaaaatcagaattgtagaattgtgctatttttaatttttaaaatttttggttagagcttatagacattacttttatgattattttgcgtgctaaataagttaaagggtatgttttgaactatagcactaattaatgtgtgtgatcctagtatgttgatagctttgattttgtgagtggtttactagtcatttattatgattcccatgaactctgatatgattcattgtggttttaactcaggttgaataaaagcatccatttcttttataggaaggtttgtttaattctcatgttctgtgatcatctctttgagaataaaattcagtccctaatagttgaaaagaatcaacttagtaaattatgtcttgcacattccaaataggaaggtatttactttatcaagatgtgtttcatttgtgttctgagtaccagtgaggggataccgtggtacagtgttttgaattgtgtactaatatcattaaagcatgggattttagtggcttttt

SEQ ID NO: 198015 - DNA, 1329 bp, Artificial Sequence
  derived and/or modified sequence
atgagcgacagcgccggcggcagagccggcctgagaagataccccaagctgcccgtgtgggtggtggaggaccaccaggaggtgctgcccttcatctacagagccatcggcagcaagcacctgcccgccagcaacgtgagcttcctgcacttcgacagccaccccgacctgctgatccccgtgaacatgcccgccgacaccgtgttcgacaaggagaccctgttcggcgagctgagcatcgagaactggatcatgcccgccgtgtacgccggccacttcagccacgtgatctggttccaccccacctgggcccagcagatcagagagggcagacaccacttcctggtgggcaaggacaccagcaccaccaccatcagagtgaccagcaccgaccactacttcctgagcgacggcctgtacgtgcccgaggaccagctggagaaccagaagcccctgcagctggacgtgatcatggtgaagccctacaagctgtgcaacaaccaggaggagaacgacgccgtgagcagcgccaagaagcccaagctggccctggaggacagcgagaacaccgccagcaccaactgcgacagcagcagcgagggcctggagaaggacaccgccacccagagaagcgaccagacctgcctggagcccagctgcagctgcagcagcgagaaccaggagtgccagaccgccgccagcaccggcgagatcctggagatcctgaagaagggcaaggccttcgtgctggacatcgacctggacttcttcagcgtgaagaaccccttcaaggagatgttcacccaggaggagtacaagatcctgcaggagctgtaccagttcaagaagcccggcaccaacctgaccgaggaggacctggtggacatcgtggacaccagaatccaccagctggaggacctggaggccaccttcgccgacctgtgcgacggcgacgacgaggagaccgtgcagagatgggccagcaaccccggcatggagagcctggtgcccctggtgcagagcctgaagaagagaatggaggtgcccgactacgagatggtgcaccaggccggcctgacctgcgactacagcgagctgccccaccacatcagcaccgagcaggagatcgagtgcctgatccagagcgtgcactacctgctgaagaacctgcccaaccccaccctggtgaccatcgccagaagcagcctggacgactactgccccagcgaccaggtggacaccatccaggagaaggtgctgaacatgctgagagccctgtacggcaacctggacctgcaggtgtacgccgccgagagcccccccagctag

SEQ ID NO: 198016 - DNA, 1329 bp, Artificial Sequence
  derived and/or modified sequence
atgagcgactccgctgggggccgggcggggttgcggcgctaccccaaactgccggtatgggtggtcgaggatcatcaggaggtgctaccatttatttatagggccatcggatctaaacacctgccagccagcaatgtgtcattcctgcactttgatagccatccagacctgttgattccagtaaatatgccggcggatacagttttcgataaggagacactcttcggcgaacttagtatagaaaactggatcatgcccgccgtgtatgcaggtcacttttcccacgtgatctggtttcatcctacctgggcccagcagatacgggaaggtcgacaccacttcttagtggggaaagacacatccactaccacaatcagggtcacctcgacagatcattattttctcagcgacgggttatacgtgcccgaggatcagctggaaaaccagaaaccactgcaactcgatgtgattatggtgaaaccgtataaattgtgtaacaatcaggaggaaaatgacgcagtgtctagcgccaaaaagccaaaacttgcgctggaagatagtgagaatactgcctccaccaattgcgactcctcttctgaagggctggagaaagacactgccacccaaaggagcgaccagacttgcctggagccctcatgttcctgtagttccgagaatcaagagtgccagaccgccgcctccaccggagaaatacttgaaatcctgaagaaggggaaagctttcgtccttgatattgatctcgacttcttctccgtgaagaaccccttcaaagagatgtttacccaagaggaatacaaaatcctgcaggagctgtaccagtttaagaaacctggtacaaatttaaccgaggaggacctcgtggatatagtggacaccagaatacatcagctggaggacttggaagccaccttcgctgatctctgcgatggggatgacgaggaaaccgtgcagcggtgggcgtcaaatcctggaatggaatcccttgtcccactggtccagagccttaagaagcgcatggaggttccagactacgagatggtgcatcaggcagggctgacctgcgactattctgaactgcctcaccacatatctacagaacaagagatcgagtgtctcattcagagcgtgcactacctgctgaaaaacctacccaatcccacactggtgacgatcgctagaagttcactggacgattattgcccttctgaccaagttgacacgatccaggaaaaagtgcttaacatgctgcgagctctgtacggcaacctcgatcttcaagtgtatgcagccgaatcccccccctcatag

SEQ ID NO: 198017 - DNA, 1329 bp, Artificial Sequence
  derived and/or modified sequence
atgtctgacagcgctgggggccgggccggcctgcggcgctaccccaagctgcctgtgtgggtggtggaggaccaccaggaggtgctgcccttcatctaccgggccatcggcagcaagcacctgcctgccagcaatgtgtccttcctgcactttgacagccacccagacctgctgatccctgtgaacatgcctgctgacacagtgtttgacaaggagaccctgtttggagagctgagcattgagaactggatcatgcctgctgtgtatgccggccacttcagccacgtgatctggttccaccccacctgggcccagcagatccgggagggccgccaccacttcctggtgggcaaggacaccagcaccaccaccatccgggtgaccagcacagaccactacttcctgagtgatggcctgtatgtgcctgaggaccagctggagaaccagaagcccctgcagctggatgtgatcatggtgaagccctacaagctgtgcaacaaccaggaggagaatgatgctgtgagcagcgccaagaagcccaagctggccctggaggacagcgagaacacagccagcaccaactgtgacagcagcagcgagggcctggagaaggacacagccacccagaggagtgaccagacctgcctggagcccagctgcagctgcagcagcgagaaccaggagtgccagacagctgccagcactggagagatcctggagatcctgaagaagggcaaggcctttgtgctggacatcgacctggacttcttctctgtgaagaaccccttcaaggagatgttcacccaggaggagtacaagatcctgcaggagctgtaccagttcaagaagccaggcaccaacctgacagaggaggacctggtggacatcgtggacacccgcatccaccagctggaggacctggaggccacctttgctgacctgtgtgatggagatgatgaggagaccgtgcagcgctgggccagcaaccctggcatggagagcctggtgcccctggtgcagagcctgaagaagaggatggaggtgcctgactatgagatggtgcaccaggccggcctgacctgtgactacagcgagctgccccaccacatcagcacagagcaggagattgaatgtctcatccagagcgtgcactacctgctgaagaacctgcccaaccccaccctggtgaccatcgcccggagcagcctggatgactactgccccagcgaccaggtggacaccatccaggagaaggtgctgaacatgctgcgggccctgtatggcaacctggacctgcaggtgtatgctgctgagagcccccccagctag

SEQ ID NO: 198018 - DNA, 1329 bp, Artificial Sequence
  derived and/or modified sequence
atgagcgacagcgccggcggccgggccggcctgcggcggtaccccaagctgcccgtgtgggtggtggaagatcaccaggaagttctcccattcatataccgtgccattggatcgaagcacctccctgccagcaacgtatcctttctgcattttgacagtcacccagatctgctaatccctgttaatatgcccgcagacacggtctttgataaggagactctgttcggcgaattgagtattgagaattggatcatgcccgccgtttacgccgggcatttttcccacgtgatttggttccatccaacttgggcacaacagatccgtgaggggcgtcaccatttcctagtggggaaggatactagtacaactacaatacgtgtcacttctacagatcactacttcctgtctgacggattgtatgtgcctgaagaccagctggaaaaccagaaacccctccagttggacgtgatcatggtcaagccatacaagttgtgtaacaaccaagaggaaaatgacgccgtatcctccgccaagaagccgaaattagcattggaagattctgaaaatacggcctcaaccaactgtgatagttcttctgagggtctcgaaaaggacacagctacacaacggagtgatcagacctgcttggagccatcttgtagttgttcttcagagaaccaggagtgtcagacagcggcttcaactggagaaatcttagagatcctcaagaaaggaaaggcctttgtgttggatatcgacctggattttttctccgtgaaaaacccttttaaagaaatgttcacccaggaggagtacaaaatactgcaggaactttatcagttcaagaaacctggcacaaacctcaccgaggaggatctggtggatatagtggatacccggattcatcagcttgaggatctggaagccaccttcgctgacctgtgtgatggagacgacgaagagacagtacagagatgggctagtaaccctggcatggagagccttgtgccactggtgcaatctctgaagaaacgcatggaagtccccgactacgaaatggttcatcaggccgggctaacctgcgattactcagaactgcctcaccacatatccaccgaacaggagattgagtgcctgatacagagcgtgcactacctcctaaagaatttaccaaatccgaccttggtgaccatagccagatcttcactggacgattactgcccatcagaccaggtggatacgattcaagagaaagtcctgaatatgttacgggccctgtacggcaacctggatctgcaggtctacgcagcagagtcccctccaagttag

SEQ ID NO: 198019 - DNA, 1329 bp, Artificial Sequence
  derived and/or modified sequence
atgagcgatagcgctgggggacgggctggactccggcgataccccaagctcccagtctgggtggttgaagaccaccaggaggtgcttccctttatttatcgagccattgggagtaagcatctcccagcctctaatgtgtctttcctgcatttcgattctcacccggacctcttaatccccgtgaacatgccagctgatactgtgtttgacaaagaaacacttttcggtgagttaagcattgaaaactggatcatgccagctgtctatgctggccatttctctcacgtgatatggttccatcccacttgggcacagcagatccgcgaaggccgtcatcattttctggttggtaaggatactagcactaccacaattcgggtcacaagtactgatcactattttctctctgacggtctgtacgttcccgaggaccagctggaaaatcagaagccactgcagcttgatgtgattatggtgaagccttacaagttgtgtaacaatcaggaagagaacgacgcagtgagtagtgctaagaagcccaaattggctctggaagatagtgagaacactgcgtccacaaactgcgacagctcctcagagggcctagagaaggatactgccacacaacggtctgaccagacatgtctggagcctagctgctcttgttcctcggaaaatcaggagtgccagacagcagccagcactggggagatactggagatcctcaagaaaggtaaagccttcgtgctggacatcgatctggacttcttctcagtgaagaacccttttaaggagatgttcactcaggaggagtacaaaatcctccaagagttgtaccagttcaagaaaccgggtaccaatctgaccgaagaagacctagtcgatattgtggacacaagaatccatcagctcgaggatctggaggctacatttgctgatctgtgtgacggcgatgatgaagagacagtgcagaggtgggccagcaacccaggtatggagagtctggtgccactcgtgcagtccctgaagaagaggatggaggtccctgattacgagatggtccaccaggccggtttaacttgtgattacagtgaactgcctcaccacatatctaccgaacaggaaattgagtgtctgattcagtcagtgcactatctcttaaaaaatcttccgaatcctacattggttactattgcacggagcagcctcgatgattattgtccttcagaccaggttgatactatccaggagaaggtcctcaacatgttaagggctctgtatggcaatctcgatctgcaggtgtacgccgcagagtcaccgccttcctag

SEQ ID NO: 198020 - protein, 491 aa, Artificial Sequence
  derived and/or modified sequence
MAQSGGEARPGPKTAVQIRVAIQEAEDVDELEDEEEGAETRGAGDPARYLSPGWGSASEEEPSRGHSGTTASGGENEREDLEQEWKPPDEELIKKLVDQIEFYFSDENLEKDAFLLKHVRRNKLGYVSVKLLTSFKKVKHLTRDWRTTAHALKYSVVLELNEDHRKVRRTTPVPLFPNENLPSKMLLVYDLYLSPKLWALATPQKNGRVQEKVMEHLLKLFGTFGVISSVRILKPGRELPPDIRRISSRYSQVGTQECAIVEFEEVEAAIKAHEFMITESQGKENMKAVLIGMKPPKKKPAKDKNHDEEPTASIHLNKSLNKRVEELQYMGDESSANSSSDPESNPTSPMAGRRHAATNKLSPSGHQNLFLSPNASPCTSPWSSPLAQRKGVSRKSPLAEEGRLNCSTSPEIFRKCMDYSSDSSVTPSGSPWVRRRRQAEMGTQEKSPGTSPLLSRKMQTADGLPVGVLRLPRGPDNTRGFHGHERSRACV

SEQ ID NO: 198021 - DNA, 1476 bp, Artificial Sequence
  derived and/or modified sequence
atggcccagagtggaggtgaagcccggccgggccccaagaccgccgtgcagattagagttgcaatccaagaagcggaagacgtcgacgaactagaagatgaggaggagggcgctgaaactcgcggagctggggacccagcccgctacctatcacctggctggggaagcgccagtgaggaggagccttcccgcggccactccggtactactgcttcaggtggcgagaacgaaagagaggacctggagcaggaatggaaacctcctgatgaagagcttattaagaagctggtcgaccagattgaattctatttttccgatgaaaacctggagaaggacgcctttcttctcaaacacgttaggcgtaacaagctcgggtatgtcagcgttaaactccttacaagttttaaaaaagtgaaacatctgactagggattggaggacaaccgcccacgctctgaaatattcggttgtgctggagttaaacgaagaccaccgaaaggtccgtaggactacacctgttcctttattcccaaacgaaaacctgccgtcaaagatgttgctggtgtatgatctctacctgtcccccaaactttgggcgctggccactcctcaaaagaatggacgtgtacaggaaaaggtaatggagcatctgctgaaactgtttggtacttttggtgtcatcagctctgtgcgtatcctgaagccaggacgagagctgcctcccgatatccggcggatttcaagccgatactctcaggtgggaacccaggaatgcgccattgtggaatttgaagaagtggaggccgccataaaagcgcacgaatttatgattacagagtcacaaggtaaagaaaacatgaaagccgtgctaatcggaatgaagcctcccaagaagaagccagccaaggacaaaaaccacgacgaggagcctaccgcatcaatccatctgaacaagagcctgaataagcgtgtggaggagctgcagtatatgggcgacgagtcgtccgcaaacagttctagcgatcccgagagtaaccccacgagcccgatggctggaaggaggcacgcagctaccaataaactttcaccctccggtcaccagaacttgttcctgagtcctaatgcatccccctgcacgtccccctggtcgtctcccctcgcccagcggaagggcgtaagccgcaaaagtccactggctgaggaaggccgattaaactgttcaacctcgccagagatttttagaaagtgtatggactactccagcgattcatccgtgactcccagcggcagcccctgggtcaggagaagaagacaggcagaaatgggcacacaagaaaaatctcctgggacaagcccattgctgagcagaaagatgcaaacagctgacggactccctgtcggggttcttcgtctcccacgcggccctgacaacactagaggatttcacggacacgagaggtctcgtgcctgtgtttag

SEQ ID NO: 198022 - DNA, 1476 bp, Artificial Sequence
  derived and/or modified sequence
atggcccagagcggcggggaggcccggcccggccccaagacagctgtgcagatccgggtggccatccaggaggccgaggatgtggatgagctggaggatgaggaggagggcgctgagaccagaggagctggggaccctgcccgctacctgagccctggctggggcagcgccagcgaggaggagcccagccggggccacagcggcaccacagccagcggaggagaaaatgaaagagaggacctggagcaggagtggaagcccccagatgaggagctgatcaagaagctggtggaccagatcgagttctacttcagtgatgagaacctggagaaggatgccttcctgctgaagcacgtgagaagaaacaagctgggctacgtgtctgtgaagctgctgaccagcttcaagaaggtgaagcacctgacccgggactggaggaccacagcccacgccctgaagtacagcgtggtgctggagctgaatgaagaccacaggaaggtgcggaggaccacccctgtgcccctcttccccaatgaaaacctgcccagcaagatgctgctggtgtatgacctgtacctgagccccaagctgtgggccctggccaccccccagaagaatggccgggtgcaggagaaggtgatggagcacctgctgaagctgtttggcaccttcggggtcatcagctctgtgcgcatcctgaagccaggccgggagctgcccccagacatccgccgcatcagcagccgctacagccaggtgggcacccaggagtgtgccatcgtggagtttgaggaggtggaggccgccatcaaggcccacgagttcatgatcacagagagccagggcaaggagaacatgaaggctgtgctgattggcatgaagccacccaagaagaagccagccaaggacaagaaccatgatgaggagcccacagccagcatccacctgaacaagagcctgaacaagagggtggaggagctgcagtacatgggagatgagagcagcgccaacagcagcagtgaccctgagagcaaccccaccagccccatggccggcagaagacatgctgccaccaacaagctgagccccagcggccaccagaacctcttcctgagccccaatgccagcccctgcaccagcccctggagcagccccctggcccagaggaagggcgtgtccaggaagagccccctggccgaggagggccgcctgaactgcagcaccagccctgagatcttcaggaagtgcatggactacagcagtgacagctctgtgacccccagcggcagcccctgggtgagaagaagacggcaggccgagatgggcacccaggagaagagccctggcaccagccccctgctgagcaggaagatgcagacagcagatggcctgcctgtgggcgtgctgcggctgccccggggccctgacaacacccggggcttccacggccacgagaggagccgggcctgtgtgtag

SEQ ID NO: 198023 - DNA, 1476 bp, Artificial Sequence
  derived and/or modified sequence
atggcccagagcggcggcgaggcccggcccggccccaagaccgccgtccagattcgagtggcgatacaggaagccgaagacgttgatgagctggaagatgaggaggaaggcgccgaaacgagaggggccggggatcccgccaggtacctgagtcccggctggggttcggcgagcgaggaggagcccagtcgggggcatagcggaacaactgccagtggtggggaaaatgaaagagaggatctcgagcaggagtggaaaccccccgacgaggagttgatcaaaaaactcgtagatcaaattgagttttacttctcagatgagaatctcgagaaggacgctttcctcctgaaacatgtgcgacggaacaagctgggatacgtgtctgtcaaactgctgacttcatttaaaaaggtcaaacacttaacgcgagactggcggaccaccgctcacgctttgaagtactcggtggtgctagaactgaatgaggaccaccggaaggtgaggcgcactactcccgtgcctctctttccgaatgagaacctccccagcaaaatgcttttggtgtatgacttgtatctttcaccgaagctttgggcattggctacccctcaaaagaacggtagagttcaggagaaggttatggagcacttgctgaaactgttcggcaccttcggtgtgatttcatcagtccggatcctgaagccgggccgcgagcttccccccgatatccgaagaatttcctcacgatactcccaagtcggcacccaggaatgcgctattgttgagttcgaagaagtcgaagccgccatcaaagctcatgagtttatgatcacggagtcacaagggaaggaaaacatgaaggcggttctcatcggaatgaagcctccaaagaagaagcctgccaaagacaagaatcatgatgaggagcccacggctagtatccatttaaacaagagcctgaataagagggtagaggagctccagtatatgggagatgagagtagcgcaaatagcagcagtgatccagagtccaaccctacaagccctatggctggcagacgacatgctgctactaacaagctgtcgccctctggacaccagaacttatttctcagccccaatgccagcccatgcacctctccatggtcttctcctctcgcacaaagaaagggcgtcagtcgtaagagtccactcgctgaagagggcaggctcaactgctccacaagtcccgagattttccggaagtgcatggattactcatctgattcgtctgtcaccccatcaggatccccctgggtaaggcgccggagacaggctgagatgggtacgcaggaaaaatcccccggcacctccccccttctttctaggaaaatgcaaaccgctgatgggttgcctgtgggcgtgcttcggctaccccgaggccctgacaatactagggggttccatggacatgagcgttcccgcgcctgcgtgtag

SEQ ID NO: 198024 - DNA, 1476 bp, Artificial Sequence
  derived and/or modified sequence
atggcccaaagcggcggagaggccaggccagggcctaagactgctgttcagatcagagttgccatccaggaagctgaggatgtggacgagctggaggacgaggaggagggggctgagacaaggggcgcaggggacccagcccgatacttgtctcctggttggggttccgctagcgaggaagagccatcgcgcggacactctggaactactgccagcgggggagagaacgagagagaagacctggaacaggagtggaagccaccagacgaggaactcataaagaaactggttgaccagattgaattttatttctctgatgagaacctggaaaaagacgcgttcctcctgaaacacgtgcgcagaaataaactggggtatgttagcgtcaagttacttacaagcttcaagaaggtaaagcatctaaccagggactggcggacgacagcacacgcgctgaagtactcagtggtgctggagctgaacgaggaccacaggaaagtccggaggacaacacccgtgcctctttttccaaacgagaatcttcctagcaaaatgcttctggtgtatgatttgtacctaagcccaaagctgtgggctctcgcgactccccaaaagaacggcagggtccaggagaaagtgatggaacatttgctgaaactgtttggcacatttggtgtcatttcatccgtgcgcatattgaagcctgggagagaactaccacccgacataaggaggatatcatcccgctactcacaagtgggtacccaggaatgcgcaattgtcgaattcgaggaggtggaagcagctatcaaggcccatgagttcatgatcacagagagccaaggcaaggagaatatgaaggctgtgcttataggcatgaagccacctaagaaaaaaccagcaaaggacaaaaaccacgatgaggagcctactgccagcattcaccttaataaatcactcaacaagagagtggaagaactacagtacatgggtgatgaatcttcagctaacagctcaagcgaccctgagagcaatcccacctcacccatggcaggcaggcggcacgccgcaactaacaagctctcaccctctggccaccagaacctgttcctgagccctaatgcgagcccatgcacaagtccatggagcagtcctttagcgcagcgcaagggcgttagccgcaaaagcccactagctgaagagggcagattgaactgcagcacaagtcccgaaatcttccgtaaatgtatggactattccagtgacagcagcgttactccttctggaagcccatgggttagacgtaggcgtcaagcagagatgggaacccaagagaagtcgcctggtacctcccctttgctgagtcgcaaaatgcagacagcagacggactgcccgtgggtgtcctgcggctgcccagaggcccagacaacactcgcggatttcacggccatgagagatccagagcctgcgtgtag

SEQ ID NO: 198025 - DNA, 4469 bp, Artificial Sequence
  derived and/or modified sequence
gcagtcgctgccgaccggctggctgggccttgcggcgtgaggaccccggcggcgccgcagtcccgcgagccatggcccagtccggcggggaggctcggcccgggcccaagacggcggtgcagatccgcgtcgccatccaggaggccgaggacgtggacgagttggaggacgaggaggagggggcggagactcggggcgccggggacccggcccggtacctcagccccggctggggcagcgcgagcgaggaggagccgagccgcgggcacagtggcaccactgcaagtggaggtgagaacgagcgtgaggacctggagcaggagtggaagcccccggatgaggagttgatcaagaaactggtggatcagatcgaattctacttttctgatgaaaacctggagaaggacgcctttttgctaaaacacgtgaggaggaacaagctgggatatgtgagcgttaagctactcacatccttcaaaaaggtgaaacatcttacacgggactggagaaccacagcacatgctttgaagtattcagtggtccttgagttgaatgaggaccaccggaaggtgaggaggaccacccccgtcccactgttccccaacgagaacctccccagcaagatgctcctggtctatgatctctacttgtctcctaagctgtgggctctggccaccccccagaagaatggaagggtgcaagagaaggtgatggaacacctgctcaagctttttgggacttttggagtcatctcatcagtgcggatcctcaaacctgggagagagctgccccctgacatccggaggatcagcagccgctacagccaagtggggacccaggagtgcgccatcgtggagttcgaggaggtggaagcagccatcaaagcccatgagttcatgatcacagaatctcagggcaaagagaacatgaaagctgtcctgattggtatgaagccacccaaaaagaaacctgccaaagacaaaaatcatgacgaggagcccactgcgagcatccacctgaacaagtccctgaacaagagagtcgaggagcttcagtacatgggtgatgagtcttctgccaacagctcctctgaccccgagagcaaccccacatcccctatggcgggccgacggcacgcggccaccaacaagctcagcccgtctggccaccagaatctctttctgagtccaaatgcctccccgtgcacaagtccttggagcagccccttggcccaacgcaaaggcgtttccagaaagtccccactggcggaggaaggtagactgaactgcagcaccagccctgagatcttccgcaagtgtatggattattcctctgacagcagcgtcactccctctggcagcccctgggtccggaggcgtcgccaagccgagatggggacccaggagaaaagccccggtacgagtcccctgctctcccggaagatgcagactgcagatgggctacccgtaggggtgctgaggttgcccaggggtcctgacaacaccagaggatttcatggccatgagaggagcagggcctgtgtataaataccttctatttttaatacaagctccactgaaaaccaccttcgttttcaaggttctgacaaacacctggcatgacagaatggaattcgttcccctttgagagattttttattcatgtagacctcttaatttatctatctgtaatatacataaatcggtacgccatggtttgaagaccaccttctagttcaggactcctgttcttcccagcatggccactattttgatgatggctgatgtgtgtgagtgtgatggccctgaagggctgtaggacggaggttccctgggggaagtctgttctttggtatggaatttttctctcttctttggtatggaatttttcccttcagtgactgagctgtcctcgataggccatgcaagggcttcctgagagttcaggaaagttctcttgtgcaacagcaagtagctaagcctatagcatggtgtcttgtaggaccaaatcgatgttacctgtcaagtaaataaataataaaacacccaactgggagtgctgactttgaggttatagattgtgcctgacaaaagtctgtgcctgtctgacagagctgtgggtggtatgtcatgaggccctgaggagcttagcagagacatctttcttttctttaagagaacatttaaaaatttttttatttgtacacatttatgggctacatgagaaactttgttacatgtttataatgcatagtgatcaagtcagggcatttagggtttctcactgtaccccagggcagccccagggctctccttgggcttctggcagcctgagtggtgtctcatcacagggaattttactgagcaaaggcagcttggcgtatactgagggtgtacagtccaggacccacagcattgatctcacctgggaacttattagaaatccagattctcaggccaaccctaggcccactgaattagaaagtctgggagaaaggcctggaatttgggttttaacaaacgctgcaggtgattctgatgcacgctggagaaccactggatggacaaaggctgcaggacttgaggtcagtccatttgacccccaatctctcactattttgtgaccttgggaaggttactaagccccgtgaacctcatcatctccctgtgaattgctttgttacgatgtccatgtctggaatgcagctggccctccataaatgttagctctctttccttctcacttgggttaatgtttgttatcatcaggagctgccttggtgtagcagaaagagcattggcctagattccagtgttggcttatgctctggctatttggcaggatttaatagagcttgttaataattattgaacagtgattaggtgccagggactatgctaagagctttccatgcattatctcatttaatctgcccaaaaactacaagagaaatgttcaggtattatctctattttattccagaaaaaaacagactttacttgggtaattaacttgtctaaggcttaacagctaaattggtagagttgggcttgaaactagtggtctggctttggagcccacactgtttaaccactaagtggtactcaacatttctgatctttactatccatattcaaaaaagaatccaccataaaaggtgctaatatttattcagcaccttcctacgtgctaggcattgggttagacacatttcacttactctcagtgtccatcataaggaattattatgccagtatcacacatgcagctgctgaagtaggaaaataatatcccaaacttgtgaaaatggacaaagatagtatatcctaaatgatatggctctatacaaattagcaggtgattgtgatctggatagtaagatgctttgtcccttaagatgcagaagagttcgtgttaactggcaaatgcctccagcaatgttctggatttgccatttccagcactaccagctgtaggtagcctgaaggcttgtgcctagaccaccaggactcctgaccttgggcaatgtcagggccccctccagccccgccctatgcttccctccctgactctgctcccatcaccccctgcctgctccttccctgcagccactccacctgctccttggccatcgggccatctgggcttcaccagctcttcttggcctgtgacattcaaggctgttccaccctattatgcctgttacacaagtcacagctctatttttagattaaccctcgtggatcatagttacttttaaaaatacctacaccctcacctttacatgtgaatacagatgaacttggccttcctttggtcgtattgccctgtgtgacattataaaagaaccctgaagtgggggtcagcagatctgaggtcgagtcgtggcttttctactaagcaactgtgaccttcagcaagtcatttattttattggttcacagttcttcccacaaaccagtggataacaagaagatgttccttaaataaggtcatatatgtgcaagtgctttctgaatggaaaagtgctttgcaggcattagtcactacttatcctgctgtctgatcatcacctccaaaggcaagcctccttttgctgcaattcttaaccctggcctcacattagagtcacctaaagagcttttaaaaactgcctatggggctgggcacggtggctcacgcctgtaatcccagcacttcaggagactgaggcgggcagatcatgaggtcaggagattgagactatcctggctaatgtggtaaaaccctgtctctactaaaaatacaaaaaaattagccgggcatggtggcacgcacctgtaatcccagctacttgggaggcggaggcaggagaattgcttgaacctgggaggcggaggttgcagtgagccgagatcacgccgctgcattccagcctgggcaacagaatgagactccatctcaaaaaaataaaaataaaaataaacaaa

SEQ ID NO: 198026 - DNA, 1476 bp, Artificial Sequence
  derived and/or modified sequence
atggcccagagcggcggcgaggccagacccggccccaagaccgccgtgcagatcagagtggccatccaggaggccgaggacgtggacgagctggaggacgaggaggagggcgccgagaccagaggcgccggcgaccccgccagatacctgagccccggctggggcagcgccagcgaggaggagcccagcagaggccacagcggcaccaccgccagcggcggcgagaacgagagagaggacctggagcaggagtggaagccccccgacgaggagctgatcaagaagctggtggaccagatcgagttctacttcagcgacgagaacctggagaaggacgccttcctgctgaagcacgtgagaagaaacaagctgggctacgtgagcgtgaagctgctgaccagcttcaagaaggtgaagcacctgaccagagactggagaaccaccgcccacgccctgaagtacagcgtggtgctggagctgaacgaggaccacagaaaggtgagaagaaccacccccgtgcccctgttccccaacgagaacctgcccagcaagatgctgctggtgtacgacctgtacctgagccccaagctgtgggccctggccaccccccagaagaacggcagagtgcaggagaaggtgatggagcacctgctgaagctgttcggcaccttcggcgtgatcagcagcgtgagaatcctgaagcccggcagagagctgccccccgacatcagaagaatcagcagcagatacagccaggtgggcacccaggagtgcgccatcgtggagttcgaggaggtggaggccgccatcaaggcccacgagttcatgatcaccgagagccagggcaaggagaacatgaaggccgtgctgatcggcatgaagccccccaagaagaagcccgccaaggacaagaaccacgacgaggagcccaccgccagcatccacctgaacaagagcctgaacaagagagtggaggagctgcagtacatgggcgacgagagcagcgccaacagcagcagcgaccccgagagcaaccccaccagccccatggccggcagaagacacgccgccaccaacaagctgagccccagcggccaccagaacctgttcctgagccccaacgccagcccctgcaccagcccctggagcagccccctggcccagagaaagggcgtgagcagaaagagccccctggccgaggagggcagactgaactgcagcaccagccccgagatcttcagaaagtgcatggactacagcagcgacagcagcgtgacccccagcggcagcccctgggtgagaagaagaagacaggccgagatgggcacccaggagaagagccccggcaccagccccctgctgagcagaaagatgcagaccgccgacggcctgcccgtgggcgtgctgagactgcccagaggccccgacaacaccagaggcttccacggccacgagagaagcagagcctgcgtgtag

SEQ ID NO: 198027 - protein, 528 aa, Artificial Sequence
  derived and/or modified sequence
MATRVEEAARGRGGGAEEATEAGRGGRRRSPRQKFEIGTMEEAGICGLGVKADMLCNSQSNDILQHQGSNCGGTSNKHSLEEDEGSDFITENRNLVSPAYCTQESREEIPGGEARTDPPDGQQDSECNRNKEKTLGKEVLLLMQALNTLSTPEEKLAALCKKYADLLEESRSVQKQMKILQKKQAQIVKEKVHLQSEHSKAILARSKLESLCRELQRHNKTLKEENMQQAREEEERRKEATAHFQITLNEIQAQLEQHDIHNAKLRQENIELGEKLKKLIEQYALREEHIDKVFKHKELQQQLVDAKLQQTTQLIKEADEKHQREREFLLKEATESRHKYEQMKQQEVQLKQQLSLYMDKFEEFQTTMAKSNELFTTFRQEMEKMTKKIKKLEKETIIWRTKWENNNKALLQMAEEKTVRDKEYKALQIKLERLEKLCRALQTERNELNEKVEVLKEQVSIKAAIKAANRDLATPVMQPCTALDSHKELNTSSKRALGAHLEAEPKSQRSAVQKPPSTGSAPAIESVD

SEQ ID NO: 198028 - protein, 180 aa, Artificial Sequence
  derived and/or modified sequence
MEEAGLCGLREKADMLCNSESHDILQHQDSNCSATSNKHLLEDEEGRDFITKNRSWVSPVHCTQESRRELPEQEVAPPSGQQALQQQEQRKSLRKRSFIIDASPKHFRLQRRSWQLSVRNMLILEIHLFYRRVCFELYDLKQNSFFGDYGNILNRETLLDFVKQIMEKIQNFLKNHGKFL

SEQ ID NO: 198029 - protein, 131 aa, Artificial Sequence
  derived and/or modified sequence
MEEAGLCGLREKADMLCNSESHDILQHQDSNCSATSNKHLLEDEEGRDFITKNRSWVSPVHCTQESRRELPEQEVAPPSGQQALQCNRNKEKVLGKEVLLLMQALNTLSTPEEKLAALCKKYADLGNSPLL

SEQ ID NO: 198030 - protein, 170 aa, Artificial Sequence
  derived and/or modified sequence
  misc_feature (1)..(1): Xaa can be any naturally occurring amino acid
XTSWRRGEVTPRRGSGGGAKTIGAKQGRTQLSSGFVNSTMEEAGLCGLREKADMLCNSESHDILQHQDSNCSATSNKHLLEDEEGRDFITKNRSWVSPVHCTQESRRELPEQEVAPPSGQQALQCNRNKEKVLGKEVLLLMQALNTLSTPEEKLAALCKKYADLGNSPLL

SEQ ID NO: 198031 - DNA, 1587 bp, Artificial Sequence
  derived and/or modified sequence
atggccaccagagtggaggaggccgccagaggcagaggcggcggcgccgaggaggccaccgaggccggcagaggcggcagaagaagaagccccagacagaagttcgagatcggcaccatggaggaggccggcatctgcggcctgggcgtgaaggccgacatgctgtgcaacagccagagcaacgacatcctgcagcaccagggcagcaactgcggcggcaccagcaacaagcacagcctggaggaggacgagggcagcgacttcatcaccgagaacagaaacctggtgagccccgcctactgcacccaggagagcagagaggagatccccggcggcgaggccagaaccgacccccccgacggccagcaggacagcgagtgcaacagaaacaaggagaagaccctgggcaaggaggtgctgctgctgatgcaggccctgaacaccctgagcacccccgaggagaagctggccgccctgtgcaagaagtacgccgacctgctggaggagagcagaagcgtgcagaagcagatgaagatcctgcagaagaagcaggcccagatcgtgaaggagaaggtgcacctgcagagcgagcacagcaaggccatcctggccagaagcaagctggagagcctgtgcagagagctgcagagacacaacaagaccctgaaggaggagaacatgcagcaggccagagaggaggaggagagaagaaaggaggccaccgcccacttccagatcaccctgaacgagatccaggcccagctggagcagcacgacatccacaacgccaagctgagacaggagaacatcgagctgggcgagaagctgaagaagctgatcgagcagtacgccctgagagaggagcacatcgacaaggtgttcaagcacaaggagctgcagcagcagctggtggacgccaagctgcagcagaccacccagctgatcaaggaggccgacgagaagcaccagagagagagagagttcctgctgaaggaggccaccgagagcagacacaagtacgagcagatgaagcagcaggaggtgcagctgaagcagcagctgagcctgtacatggacaagttcgaggagttccagaccaccatggccaagagcaacgagctgttcaccaccttcagacaggagatggagaagatgaccaagaagatcaagaagctggagaaggagaccatcatctggagaaccaagtgggagaacaacaacaaggccctgctgcagatggccgaggagaagaccgtgagagacaaggagtacaaggccctgcagatcaagctggagagactggagaagctgtgcagagccctgcagaccgagagaaacgagctgaacgagaaggtggaggtgctgaaggagcaggtgagcatcaaggccgccatcaaggccgccaacagagacctggccacccccgtgatgcagccctgcaccgccctggacagccacaaggagctgaacaccagcagcaagagagccctgggcgcccacctggaggccgagcccaagagccagagaagcgccgtgcagaagccccccagcaccggcagcgcccccgccatcgagagcgtggactag

SEQ ID NO: 198032 - DNA, 1587 bp, Artificial Sequence
  derived and/or modified sequence
atggctacccgggtcgaggaagctgcccggggacggggcgggggcgccgaggaggccacggaggccggacgtggtgggagaaggagaagcccccgccaaaagttcgagatcggaactatggaggaagccggaatttgcggtctgggtgtaaaagccgacatgctatgtaattcgcagtccaacgatattttgcaacatcagggtagtaattgcggaggaacttctaacaaacacagcttggaggaagacgaagggtcagacttcattaccgagaaccggaacctggtgagccccgcgtactgcacgcaggagagccgagaagaaatcccagggggtgaggcacgaactgatcccccagacggtcagcaggattctgaatgtaacagaaacaaggaaaaaacattgggaaaagaagtcctgctactgatgcaggcactgaacacgctgtccacacctgaggagaaactggcagctctgtgcaaaaagtacgccgacctgctggaggaaagcagatccgtacagaaacaaatgaagatcttgcagaagaaacaggcacagatcgtgaaagaaaaggtacatttacaatcagagcacagcaaagctatactggcccgctccaaactggaaagcctctgtcgcgaacttcagagacataataaaaccttaaaggaagaaaatatgcagcaggcaagagaggaggaggaacgacgtaaggaagccacggcccactttcagatcacgcttaacgaaattcaagcgcagctcgaacagcatgacatccacaacgcgaagctacgccaggagaacatcgagctgggagagaaactaaagaagctgattgaacagtacgctctccgggaggagcatatcgacaaggtctttaagcataaggagttacaacagcaactggtcgatgccaagctccaacaaaccacccagcttatcaaggaagctgatgagaaacatcagcgcgagcgtgagttcttgctcaaggaagctactgagtcacgccataaatacgagcagatgaagcaacaggaggtgcagttgaaacagcagttgtccctctacatggataaatttgaggaatttcagaccaccatggccaagtccaatgagctctttaccacatttcgacaggagatggagaagatgacaaaaaaaatcaagaagcttgagaaagaaactatcatctggcgcacgaagtgggaaaataacaataaagctcttctacagatggccgaggaaaaaacagtacgtgacaaggagtataaggcgctccagatcaagttggaacggcttgaaaagttgtgccgagctctgcagactgaaagaaatgagctcaatgagaaagtagaggttctcaaagagcaggtttccattaaagcggctatcaaagccgccaaccgggacctggctactcctgtgatgcaaccttgtactgctctcgactcccataaggaactgaacacctcaagtaagagagcactgggtgcccatctcgaagccgaacctaagtcgcagcggagcgctgtgcaaaaaccgcctagcactgggtcagcacctgccatagaatcagtcgactag

SEQ ID NO: 198033 - DNA, 1587 bp, Artificial Sequence
  derived and/or modified sequence
atggccaccagggtggaggaggccgcccggggccggggcggcggcgctgaggaggccacagaggccggccggggcggcagaagaagaagcccccggcagaagtttgaaattggcaccatggaggaggccggcatctgtggcctgggcgtgaaggctgacatgctgtgcaacagccagagcaatgacatcctgcagcaccagggcagcaactgtggcggcaccagcaacaagcacagcctggaggaggatgagggcagtgacttcatcacagaaaatagaaacctggtgtccccagcctactgcacccaggagagccgggaggagatccctggaggagaggccaggacagaccccccagatggccagcaggacagcgagtgcaacagaaacaaggagaagaccctgggcaaggaggtgctgctgctgatgcaggccctgaacaccctgagcaccccagaggagaagctggccgccctgtgcaagaagtatgctgacctgctggaggagagccgctctgtgcagaagcagatgaagatcctgcagaagaagcaggcccagatcgtgaaggagaaggtgcacctgcagagcgagcacagcaaggccatcctggcccggagcaagctggagagcctgtgccgggagctgcagaggcacaacaagaccctgaaggaggagaacatgcagcaggcccgggaggaggaggagaggaggaaggaggccacagcccacttccagatcaccctgaatgagatccaggcccagctggagcagcacgacatccacaatgccaagctgcggcaggagaacatcgagctgggggagaagctgaagaagctgattgagcagtatgccctgcgggaggagcacatcgacaaggtgttcaagcacaaggagctgcagcagcagctggtggatgccaagctgcagcagaccacccagctgatcaaggaggctgatgagaagcaccagcgggagcgggagttcctgctgaaggaggccacagagagccgccacaagtatgagcagatgaagcagcaggaggtgcagctgaagcagcagctgagcctgtacatggacaagtttgaggagttccagaccaccatggccaagagcaatgagctgttcaccaccttccggcaggagatggagaagatgaccaagaagatcaagaagctggagaaggagaccatcatctggaggaccaagtgggagaacaacaacaaggccctgctgcagatggccgaggagaagacagtgcgggacaaggagtacaaggccctgcagatcaagctggagcggctggagaagctgtgccgggccctgcagacagaaagaaatgagctgaatgagaaggtggaggtgctgaaggagcaggtgtccatcaaggccgccatcaaggccgccaacagagacctggccacccctgtgatgcagccctgcacagccctggacagccacaaggagctgaacaccagcagcaagagggccctgggcgcccacctggaggccgagcccaagagccagaggtctgctgtgcagaagccacccagcacaggcagcgccccagccatcgagagcgtggactag

SEQ ID NO: 198034 - DNA, 4401 bp, Artificial Sequence
  derived and/or modified sequence
aaggccctgcgagattctgtgccccttgtcgggccgcttgtttggctgctgccgtcacctcatggcgacgcgggtagaggaggcagcgcggggaagaggcggcggcgccgaagaggcgactgaggccggacggggcggacggcgacgcagcccgcggcagaagtttgaaattggcacaatggaagaagctggaatttgtgggctaggggtgaaagcagatatgttgtgtaactctcaatcaaatgatattcttcaacatcaaggctcaaattgtggtggcacaagtaacaagcattcattggaagaggatgaaggcagtgactttataacagagaacaggaatttggtgagcccagcatactgcacgcaagaatcaagagaggaaatccctgggggagaagctcgaacagatccccctgatggtcagcaagattcagagtgcaacaggaacaaagaaaaaactttaggaaaagaagttttattactgatgcaagccctaaacaccctttcaaccccagaggagaagctggcagctctctgtaagaaatatgctgatcttctggaggagagcaggagtgttcagaagcaaatgaagatcctgcagaagaagcaagcccagattgtgaaagagaaagttcacttgcagagtgaacatagcaaggctatcttggcaagaagcaagctagaatctctttgcagagaacttcagcgtcacaataagacgttaaaggaggaaaatatgcagcaggcacgagaggaagaagaacgacgtaaagaagcaactgcacatttccagattaccttaaatgaaattcaagcccagctggagcagcatgacatccacaacgccaaactccgacaggaaaacattgagctgggggagaagctaaagaagctcatcgaacagtacgcactgagggaagagcacattgataaggtgttcaaacataaggaactgcaacagcagctcgtggatgccaaactgcagcaaacgacacaactgataaaagaagctgatgaaaaacatcagagagagagagagtttttattaaaagaagcgacagaatcgaggcacaaatacgaacaaatgaaacagcaagaagtacaactaaaacagcagctttctctttatatggataagtttgaagaattccagactaccatggcaaaaagcaatgaactgtttacaaccttcagacaggaaatggaaaagatgacaaagaaaattaaaaaactggaaaaagaaacaataatttggcgtaccaaatgggaaaacaataataaagcacttctgcaaatggctgaagagaaaacagtccgtgataaagagtacaaggcccttcaaataaaactggaacggttagagaagctgtgcagggctcttcagacagaaaggaatgagctcaatgagaaggtggaagtcctgaaagagcaggtatccatcaaagcggccatcaaagcggcgaacagggatttagcaacacctgtgatgcagccctgtactgccctggattctcacaaggagctgaacacttcctcgaaaagagccctgggagcgcacctggaggctgagcccaagagtcagagaagcgctgtgcaaaagcccccgtccacaggctctgctccggccatcgagtcggttgactaagatgaggtgtgatcactgtattgagagatatattttgtgtataactttctctgttagtagttaactattggttttgtggtgaaaattttcttactttttctaccatatctgtattttcttagaactactggacttatgtggtacaggaggctgcttagcagttttgaatagtttaatctataaattttcctcagctgtgttgcacatcagcctcgttctccctccactggaatgcatgtgttcattgccttgtcctttctctccctgctccttgcacattatcatcctaatgaaaatttcactgacagggccgaccattacaagggaactttgttctgacgatggttccttgatgtgaaaacaatattaatttaaacgtcttagcccccccccccataatattattcagaaaaacaaaataccaaggcgattagttttgtctaataacccatttaaatgccaagtaaaaataaaactcctagtgttgggtcagaagcatatttgattgaaattagctttttgaaaacatttatatctcgggacaaattgagatggccacatgcctagaatcctaagtttcggcagaatatgtatataaagatgtcacttgtggacaaaatagtacatagaggcaaatcactagacaaataagcttagtgtttacgtgactgaacagtcatcctgctttggtttcaggtgtgggatttggaccatgaggggctcccgtagaggatggcggtttgtgtttgattctgatttgggatttcagtacatattctccacttcccatagaaggccacttattctttgaaaactggtgttcatgtttgccgttcaatgaagtcccttgtcaaagacaaggacggtcaattcacgtgtcactttcactaggcagaagtttctccaataccttctggctacttgaaagttactacaaaaattccaccagcaaagtactccaggtttttcaaaagggaattttcattatggatcagtaccaaccgaaattgattttcatttccaaaacaaacactggcaccaacatttttactttgggaagacttggcagagtgttagtcatgatctgttacttacgtgttcagtctgttttctcacccccttcttagttaccatctcttttttaagaagaaaaaagaaaagccacagtattatcaaggtctctacacttggactgggggaaaatttgaaattaagcacataacttttgaattagttctttgtttcaatgttgaatgtggcgcagttatgcagatgattaatcaggctgcactgatggaagttttgactttgtccctggtataatttgcattgaaatgctttatgaaataaaaggttctactagaactgatgttagcacattccactgagcaaaactatcagactgacacttgttaaattgcttactggactgaataaactctgttttgtccagttaaaagggttttctctttgttacaagtgttatttgtaaagtcctgtcacattcatggtcgaaactgggttgaaagaattgaaaattgtccaacagatagatagataggaaaccgcctggagtggaggagggttgtatctaagcctccactatcagtcatgttaattcaaggggccacagtggaggaaaataaatccacaaagtagattatctaattaccatcaaaatgagtcagaagcaaaaaacaccaccctccaacagcctcttaggagtacaccctgttctgctactaaaatactagactcatttccctggtggtgggggggaatgcaggtatagatcagaaatataatccaccttaaaattagtactaatgatcacattatttcacaagaactctgctggatgtacagctcttaacattttattaagccatttgtgtagcccaccacgtttctttgtggtgcttgtcctgtgtggaagattgtaaatcttgggcctgttgcatacttccaagggctttaaagcaatgtgattaacagtacttggcctgctgcttttggcttactttgtatttttagctagatgctattatagtgttgaaaggatatggattctgtctgggatgcatttgttgtcctttcagaacccttcctcccattaccctgtgaataaaaacaaatgggaccccctgagaaggacatcttcctacagtgatcacctcaccagcccagtgttgtggctttgtagcgcaccccgtatctaccatattctagaacactgtaatgctactaggctggcccagaaaaggtttaaatgttgaattcacttaaattgcaattgttgcaccatcatggaatcgtgatgtgtattatttatattggcggtggactccaaggtgtagagaaaacttgggtcttgggtaatatggaccatttcatcctcagacttgttaggagtacatttcttggtcttgagaccagtatttttcagttatgtatgcaactgcctttattacacctggttatcacaattcaattctcaggtgttgcagaaaaatctacctctttcagactgtagatggaaataactgtgaaaaaaatgatgcagatatcttctagtttgtgctaaacacactgctttatttttacagcccacgtctttcatgaggatacgaattgttaagaggcagtctcgttttgcttttcaaagacattttgtagagatttttcactaatgtgaatctgattttatctacttgattctgtatagattaagtaaatatgtatgataaacttaa

SEQ ID NO: 198035 - DNA, 1587 bp, Artificial Sequence
  derived and/or modified sequence
atggccacccgggtggaggaggccgcccggggccggggcggcggcgctgaggaagcaacagaagcgggccgaggcggaaggcgccggagcccccgacagaagtttgaaatcgggactatggaagaagcggggatctgtgggcttggggtgaaggccgatatgctgtgtaatagccagagcaacgatatcctgcagcaccaagggagtaattgcggcggcacatctaacaaacattccttggaagaagacgaagggagcgactttatcactgagaacagaaatctggtctcaccagcctattgtacccaggaatcgagagaggaaattccaggcggcgaagcccggaccgatcctcctgatggacagcaagattccgagtgcaatagaaacaaagagaaaacgctgggtaaggaagttttgctgttgatgcaagcgttaaacactctgagtacccccgaggagaagctagctgccctgtgtaagaagtacgctgacttgctcgaagagagccgctctgtgcaaaaacagatgaagatcctccaaaaaaaacaggcccagatcgtcaaagaaaaagtgcatttacaatcagaacattctaaggcaatattggccaggagcaaattggaaagcctgtgtagagaattgcagcgccacaacaaaactctgaaggaggaaaacatgcagcaagcgagggaagaggaagagaggagaaaagaggccacagcccacttccagatcacgctgaacgaaattcaggcccagctggagcaacacgatattcacaacgctaagctgcgacaggaaaacatagagcttggggaaaaactaaagaaattaattgagcagtacgcattgagggaggagcacattgataaagttttcaagcacaaagaattgcaacaacagctcgtcgatgctaaactgcagcagactacccagctgattaaggaggcagacgagaaacatcaacgagaaagagaattcttgcttaaagaggccaccgaatcccggcacaagtacgaacaaatgaagcaacaggaagtgcaattgaagcagcagctctctttatatatggataagttcgaagagttccagactaccatggccaagagtaacgaactctttaccacctttaggcaggaaatggaaaagatgacaaaaaagatcaaaaaattagagaaggaaactatcatctggcggaccaaatgggagaacaataacaaagccctgttacagatggctgaggaaaagaccgtccgggacaaagagtataaggccctgcaaattaagcttgaacggttggaaaagctgtgcagggctttgcaaaccgaaaggaatgagctcaacgaaaaggtagaggtgctgaaggaacaggtatccatcaaagctgctataaaagcggctaatcgcgatctcgccacgcccgtgatgcaaccatgtactgctctggactctcataaggaactgaatactagttcaaagcgcgccctgggcgcacacttagaagcggaacctaagagccagagatccgccgtgcaaaagccaccatccaccgggtccgcccccgcgatcgagtctgtcgattag

SEQ ID NO: 198036 - DNA, 1587 bp, Artificial Sequence
  derived and/or modified sequence
atggccacccgcgtggaggaggctgccaggggcagaggaggcggagctgaggaagccactgaggcaggcagagggggtcgtcggcgatcaccccgacagaagtttgagatagggacaatggaagaggctggcatctgtggtctgggcgtgaaggccgatatgctctgtaactctcaatccaacgacatcctgcagcatcaaggtagcaattgtggcggaacatctaacaaacattcactagaggaagatgaaggctcagactttattactgagaatcggaacttggtttctccggcttactgcactcaagagtctcgggaggagattcctgggggagaagccagaacggatcccccagatggccagcaggactccgagtgcaatcgcaacaaggagaagactctcgggaaggaggttctgctgcttatgcaagcacttaataccttaagtacccccgaggagaagctggctgccctttgcaaaaaatatgctgaccttttggaggagtctagaagtgtgcagaagcagatgaaaattctgcaaaagaaacaagctcaaattgtgaaggagaaggttcacctgcagagcgagcacagcaaggccatattggcacgcagcaagttggaatcactgtgccgcgaattgcaacgacataataaaacgctgaaggaagagaacatgcagcaggctagagaagaggaggagcgaaggaaggaagccactgcacattttcagatcaccctcaatgagattcaggcccagttggagcaacatgacatccataatgctaaactacggcaagagaatattgagctcggtgagaagttaaaaaagctgatcgaacagtacgctctgcgggaggaacacatcgacaaagtgttcaaacataaagagcttcagcagcagttagtcgatgccaagctgcagcagactactcagttgatcaaagaagccgatgaaaagcatcagagggagagggaattcctcctcaaagaggcgacggaatcccgccataagtacgagcaaatgaagcagcaagaggtgcagttaaaacaacagctgtcactatacatggacaaattcgaggagtttcagaccacaatggctaagtctaatgaactgtttaccacatttcgacaggagatggagaagatgaccaagaaaatcaagaagttggagaaagagaccattatctggcgaaccaaatgggagaataataacaaagctttgctccagatggcggaagaaaagaccgtgcgagataaagaatacaaggctctccagattaagctggagcggctggaaaaactgtgccgggcattacagactgaaaggaatgagcttaatgagaaggtggaagttctaaaagaacaggtttcaatcaaagctgccattaaggcagccaatagagacctcgccactccagtaatgcaaccctgcaccgctctggattcacacaaggagttaaacacctccagtaagagagctctgggagctcacctcgaggctgagcctaagtcgcagcgctctgcggtgcaaaaacctccgagcacagggtccgccccagccatcgagagcgtcgactag

SEQ ID NO: 198037 - DNA, 860 bp, Artificial Sequence
  derived and/or modified sequence
cgtgagggtactctgccggttttgctgcggaagtcacctcgtggcgtaggggagaggtaacaccgagaagaggcagcggcggtggcgccaagacgattggtgccaaacagggcagaacgcaactcagctctgggtttgtgaatagcacaatggaagaagctggactttgtgggttaagagagaaagcagatatgttgtgtaactctgaatcacatgatattcttcaacatcaagactcaaattgcagtgccacaagtaataaacatttattggaagatgaagaaggccgtgactttataacaaagaacaggagttgggtgagcccagtgcactgcacacaagagtcaagaagggagcttcctgagcaagaagtagcccctccgtctggtcagcaagctttacaacaacaggaacaaagaaaaagtcttaggaaaagaagttttattattgatgcaagccctaaacactttcgactccagaggagaagctggcagctctctgtaagaaatatgctgatcttggaaattcacctcttctatagaagagtttgttttgaactatacgatttgaaacaaaattctttttttggagactatggaaacattctcaacagggaaaccctactagactttgtaaagcaaataatggaaaagatacagaactttttgaagaatcatgggaaatttttataattaaataaatgctaaaattctgttttgtgaaacatttatgggaattatcactgacagtttttgtacactttcaaatagtgttaaagcagcaactccatgttgtaaatgcacaaaacaaatatttagttaataatcaactccaagaataaagctgtaacaataatagtt

SEQ ID NO: 198038 - protein, 197 aa, Artificial Sequence
  derived and/or modified sequence
MAALGEPVRLERDICRAIELLEKLQRSGEVPPQKLQALQRVLQSEFCNAVREVYEHVYETVDISSSPEVRANATAKATVAAFAASEGHSHPRVVELPKTEEGLGFNIMGGKEQNSPIYISRIIPGGIADRHGGLKRGDQLLSVNGVSVEGEHHEKAVELLKAAQGKVKLVVRYTPKVLEEMESRFEKMRSAKRRQQT

SEQ ID NO: 198039 - DNA, 594 bp, Artificial Sequence
  derived and/or modified sequence
atggctgcattaggcgaacctgtgaggctcgaacgggacatttgccgcgccatcgagctgcttgagaaactccagaggagcggtgaggttcctccccagaagcttcaggcattacagcgagtccttcaaagcgagttttgcaacgccgtacgggaagtctatgagcatgtctatgagactgttgatatttcatccagtcctgaggtgcgtgccaacgccacagccaaggcaacagtggccgcgtttgcagcgtctgaagggcattcccacccccgggtggtggagcttccaaaaaccgaggaaggcctcggatttaacattatgggagggaaagaacagaattctccaatctacatctcacggatcatacctggcggcatcgctgataggcatgggggactgaagagaggtgatcagctcctgtctgtgaacggggtgtctgtcgaaggtgaacatcatgagaaagccgtcgagttgttaaaagccgctcaaggaaaagtcaagctggtggtcagatatactccgaaggtgctggaggagatggagtcacgtttcgagaaaatgagaagcgctaagagacggcagcaaacatag

SEQ ID NO: 198040 - DNA, 594 bp, Artificial Sequence
  derived and/or modified sequence
atggccgccctgggggagcctgtgcggctggagcgggacatctgccgggccatcgagctgctggagaagctgcagaggtctggagaggtgcccccccagaagctgcaggccctgcagagggtgctgcagagcgagttctgcaatgctgtgcgggaggtgtatgagcacgtgtatgagaccgtggacatcagcagcagccctgaggtgcgggccaatgccacagccaaggccaccgtggccgcctttgctgccagcgagggccacagccacccccgggtggtggagctgcccaagacagaggagggcctgggcttcaacatcatgggcggcaaggagcagaacagccccatctacatcagccgcatcatccctgggggcattgctgacagacatggaggcctgaagagaggagaccagctgctgtctgtgaatggagtgtctgtggagggggagcaccacgagaaggctgtggagctgctgaaggccgcccagggcaaggtgaagctggtggtgcgctacacccccaaggtgctggaggagatggagagcagatttgagaagatgaggtctgccaagaggcggcagcagacctag

SEQ ID NO: 198041 - DNA, 4688 bp, Artificial Sequence
  derived and/or modified sequence
gtctgtaggttaagggagaagatggcggcgctaggggaacccgtgcggctggagagagatatttgtagagcaattgaattattggaaaaactacaaaggagtggagaagtaccaccacagaaacttcaggctttgcaaagagtccttcaaagtgaattctgcaatgctgtgagagaggtatatgaacatgtctatgagactgtggacatcagtagcagtcctgaagtgagagcgaacgctactgcaaaggctactgttgctgcatttgctgccagtgaaggacattctcatcctcgagttgttgagctaccaaaaacagaagagggccttggattcaatattatgggaggcaaagaacaaaactctccaatctatatatcccgaataattccaggtggaattgctgatagacatgggggcctcaaacgtggagatcaactcctctctgttaatggagtgagtgttgaaggagaacatcatgaaaaagctgtagaactgctgaaagccgcacaaggaaaggttaaattagtggtacgatacacacccaaagtcttagaagaaatggagtcgcgctttgaaaaaatgagatcagcaaaacgcaggcaacagacctaatacatttcaaaacttgatatttcattttgcgttttagctagagaagttttccttgtgacttactaatggctgcaatgccaatgattgtaagaaaacaaacaaatttatcatgaaattctccttgtcattttataaatgcctattttaacatcatttatggttccagagatgcatacacttttttctgacaagaaaaagtaaaaggtgatgagggcaattctgtcctactgtttttacaggcctttttcaaatgcagattttgtcataaagttgttatagattttttaaaatgcttttttaatattaaaatgtacttttacattcttaatctttttttagaaaggaaaagttttcttcatttagctgctgatttaaaagtaaagttctccaattctttttttttgcttactctattttttttaacctgtgaaatttctttacagttttccaagaaattaagcataacagtctcatctacggcagttcattacactgtcaatgttaacatcattgctgcattttgtactttgaacacacacataatatatataaccagtggtaaatcatgactcagtacagtgcaagttttttcacttttacttaaacataatatataatggatattcatttatactgatttatgaaagtaagtttttaaacactgaaacaatcattgctaaaatacatattcttaatatttgagcattgaggcaagaggatgtaattgatagcattacttattacatccctatttatgttcaaccgtacatcaaattataaatgcaaaacaggttcagatttcatcttttgtgatttcttttaaatactattcatttttatttaaatgcacagtatttcccctatattttagtccttccattcctagagacaaaccagttatttggtggtgggaagtagctgaagcaaagaaggaaaagtaatacctttaacctcactagcttcaagagtagacattcttactagctcaatttaaataattgattttaaataggaagaaaagaggatatatttaagatacatagaaattatgatgtgaagtattcatgagaatctgtagattccatcaaaataagtaggaactcatactaaaattgttggatttaaagaggcaacttttgtttatgattcaaatatgggaatttgagaaatatttcatttgtccactggatgtcactattttactaaaaggcagctattagtgtgggactgtgactgaggtcttaaagactgaaagagttggggttcattttctgttacaacttacaggaacatttgtactttaagaaaaatttaagtgacaaatgttagaagatgatggattgaaaaatataagtaatttggcatattgaccctatataaaaaagtgggcattttgtaacattccttcaggaagaatagaattgtatgcttttttctgcatgtttgtgatcactgtgagtctcagatgattattccagttttcaatgatttttcaaaataaaagtcaatcagcattgttatttatcattaaggtattgaacactggattgcatggttgaatgtgtctttaatccactacaaaatgtgcttgttattgataggatcatgttgttaaattgtaaattttcaaaattaattgatgttttaaaaatgttgagaccaaagtagtatagaagtatggacttaatttaattgtaaaattattagaggtatttgttgtagagctttatatattaaagagaggtattggtgcatataaaaacagtaatattattgttatgcttgtattcttgcatttcagggtaagtaaaccctgaagaaatcttattttagtatagctacagctgcagtagcttttaagtatgtatcaacatttcattataaattatagcttcctggttctgtgtctcagctgtttcagaactttcagccaagttaaatcttttttggtgttgaaacttttagtaagttgagtaagctatttttttccctacggtaatccacaatctgttctttgtgtgggttgacacctatttataattcttaaaataagggtagctcaaaggagccaagtacagtagtttagcttgctactgttgagcatgaatagcagtaggttgttttcattaatgcagttttcataatgtatcccagaattttaaatcttgaccatagaaaaatacagtcattcattggcaaagatgtacagtggtggtttagtgcagtgaggaaatgatgggaatttttatcttagaaatggatgattcgtgaataaaactaggtacatagtaagtgtatgatagatgtttgatttgtaaattacaaatataaattatcacccccatttccatttattttcttgatatatcaaaatgtgttgacttagtgattctcaatcttagctacatattagcctggcagagctttaaaaaattgatacctgggtcctattccataacaactaaatcaaaatcacccttttttttttttttgtaaagctttccaggtggttctaaaggacacctagggtcaataacccattataaaatgatctgattacactggacactcttaggaagtatcaaaatagaacagttcaatttgcagctacttaatgattaattacatttcttaggttttttttttgttttttttttggtttgtttgttttttgttttaaaagagacaggatcttgctttgtctcccaggctggaacacagtggtgtgatcatagctcactgcagcctgaaactccttggcttccacctcagcctcccaaagcattaggattataggcgtgagccactgcacctggccaagtaatttcttttaggaataaaaggtacttggcattccttatttgggaagtaattacagtcttatctttttttttcttttttcttttttttaataaaatctaccagtaatttaaatgtgagctttttatgtctgtcatcattctgccccctttgcctttaaaacttacaaaaatacgtgtttgttatttgagaaagcatgtttaaaaattgcagatgagaaatattgtcgttaataattatgtactgtcttaatgtgggcacttcatttgttagtataatactagataatagcagcctagttctttaggatttgacgattcaaattttttttttgttttttgtttttgtttttttttgagacagagtcttgctctgttgcccaggctggcgtgcagtggtgtgatctcggctcacttcagcctccgccacctcaaggcagttcaagcaattctcctgcctcagcctcccgagtagctaggactacaggcgtgtgccacctctcccggctaatttttttgtatttttagtagagacggggtttcaccgtgttagccaggatgatctcgatctcctgacctcgtgattcgcccgcctcggcctcccaaagtgctggaattactggcgtgagccaccatgcccagcctcaaatatgtttttaaaaaatatcattgtcctcctcctcttaagatttttttaagttattttgctcaagtacttaagtagtctggctcaagtactttgtttacaattaaaatggatattatagcatttaatagaagaaatggttatggcttatccaaaaagaatgtcagcatgacctggtgtagacttaaaaaactacatgtttgtgaatattttataatgtggaatgatcattgaaatatcaaggattctagtaattgtatttcctgaataaatgtatgtttatgaattttctaacttacattttgttgtgtcctctgccaacaatctggttttataattgttgtctaaagtttgctagtagtgtttcttcaaaggttattccaggtatggttaagtagtgagaaaaatcacttattaattttcaagaactttgagactaatttgtattgactcggttttttaaaataactggcaaatgctatgcttctacttttaaaatttgtggtaatacccagaatggatgtaaaataacatttttcaatagattacttcatttatcaatttaattctgattttaaggcttatttaaaataaatttgtatgagtta

SEQ ID NO: 198042 - DNA, 594 bp, Artificial Sequence
  derived and/or modified sequence
atggccgccctgggcgagcccgtgcggctggagcgggacatctgccgagctattgaattgctcgaaaaactacaaaggagcggcgaggtgcctccccagaaattacaagcattgcagcgggtcctccagtccgagttttgcaatgcagtgcgcgaggtgtatgagcatgtgtacgagacagtggatatcagcagctctcctgaggtacgggccaacgctacggccaaggccaccgtagccgctttcgcggctagtgagggacacagtcacccgcgtgttgttgaactgcctaagacggaggagggcctcggttttaatattatgggtgggaaggagcagaactcaccaatctacatttctagaatcatcccaggaggaattgctgatagacatggcggcctaaaacgcggcgatcagcttctgagtgtgaacggggtctctgtcgagggagagcatcacgaaaaagccgtggaattgcttaaagcagcacagggcaaagtgaagctggttgtccgctacactccaaaggtccttgaagagatggagagcagatttgagaagatgagaagtgccaagagaaggcaacagacgtag

SEQ ID NO: 198043 - DNA, 594 bp, Artificial Sequence
  derived and/or modified sequence
atggccgctctcggtgagccagtacgcctggaacgcgacatctgccgggctatcgagctgttagagaagctgcaaaggagcggcgaagttcctccccagaagctgcaagccctgcagagagtccttcaatcagaattttgtaacgcagtgcgcgaggtttatgaacatgtgtatgagactgttgatattagctcaagcccggaagtgagggccaacgccacagccaaggccaccgtggccgcatttgcagcaagcgagggacactcccacccccgtgttgttgagctgcctaagaccgaggaaggcctaggctttaatattatgggaggaaaagagcaaaactcaccaatttatatctcacgcataatcccaggcggaatcgcagacaggcacggcggactgaaacgaggggatcagctgttgtccgttaatggggtgtccgtggagggcgagcaccacgagaaagctgtagaactcttgaaagccgctcaaggcaaggtcaagctggtggtgcgctacacacctaaggtgctggaagagatggagagcaggtttgaaaaaatgcgttccgctaaaaggaggcaacaaacttag

SEQ ID NO: 198044 - DNA, 594 bp, Artificial Sequence
  derived and/or modified sequence
atggccgccctgggcgagcccgtgagactggagagagacatctgcagagccatcgagctgctggagaagctgcagagaagcggcgaggtgcccccccagaagctgcaggccctgcagagagtgctgcagagcgagttctgcaacgccgtgagagaggtgtacgagcacgtgtacgagaccgtggacatcagcagcagccccgaggtgagagccaacgccaccgccaaggccaccgtggccgccttcgccgccagcgagggccacagccaccccagagtggtggagctgcccaagaccgaggagggcctgggcttcaacatcatgggcggcaaggagcagaacagccccatctacatcagcagaatcatccccggcggcatcgccgacagacacggcggcctgaagagaggcgaccagctgctgagcgtgaacggcgtgagcgtggagggcgagcaccacgagaaggccgtggagctgctgaaggccgcccagggcaaggtgaagctggtggtgagatacacccccaaggtgctggaggagatggagagcagattcgagaagatgagaagcgccaagagaagacagcagacctag

SEQ ID NO: 198045 - protein, 495 aa, Artificial Sequence
  derived and/or modified sequence
MGSKRRNLSCSERHQKLVDENYCKKLHVQALKNVNSQIRNQMVQNENDNRVQRKQFLRLLQNEQFELDMEEAIQKAEENKRLKELQLKQEEKLAMELAKLKHESLKDEKMRQQVRENSIELRELEKKLKAAYMNKERAAQIAEKDAIKYEQMKRDAEIAKTMMEEHKRIIKEENAAEDKRNKAKAQYYLDLEKQLEEQEKKKQEAYEQLLKEKLMIDEIVRKIYEEDQLEKQQKLEKMNAMRRYIEEFQKEQALWRKKKREEMEEENRKIIEFANMQQQREEDRMAKVQENEEKRLQLQNALTQKLEEMLRQREDLEQVRQELYQEEQAEIYKSKLKEEAEKKLRKQKEMKQDFEEQMALKELVLQAAKEEEENFRKTMLAKFAEDDRIELMNAQKQRMKQLEHRRAVEKLIEERRQQFLADKQRELEEWQLQQRRQGFINAIIEEERLKLLKEHATNLLGYLPKGVFKKEDDIDLLGEEFRKVYQQRSEICEEK

SEQ ID NO: 198046 - DNA, 1488 bp, Artificial Sequence
  derived and/or modified sequence
atgggctccaagaggcggaacctgagttgcagtgaaagacaccagaaactggttgacgaaaattattgtaagaaactgcacgtccaggccctgaaaaatgttaattctcaaatacgcaatcaaatggtacagaacgagaatgacaacagagtccagcggaagcagttcctgaggctgctgcagaacgagcagtttgagctggatatggaggaagccatacagaaagcggaggagaacaagcggctgaaagaactccagttgaaacaggaagagaaactcgccatggaactagctaaattgaagcatgagagtttgaaggatgagaaaatgcgtcagcaggtgcgagaaaattccatcgaactgcgcgaactggagaagaagctaaaggcggcatacatgaataaggagagagcagcccagatagccgaaaaggatgccattaagtatgaacagatgaagcgggatgctgagattgcaaaaactatgatggaagagcacaagcgcataatcaaggaagagaacgcagcagaagataaacggaacaaagccaaggcacagtattatctcgatcttgagaaacagcttgaggagcaagaaaaaaaaaaacaggaggcctacgagcagctgctcaaggagaagctgatgatagacgaaatagtaagaaagatctacgaagaagatcagctggaaaagcaacagaagttggagaagatgaacgccatgcgcagatatatcgaggaatttcagaaagagcaggctctctggagaaaaaagaagcgtgaagagatggaggaagagaataggaaaattatcgaattcgctaacatgcagcagcagagagaagaagatcgaatggccaaggtccaggagaatgaagagaaacggctccagctgcaaaacgccttgacgcagaagctggaggagatgttgcgacagagagaggatctggagcaggtcagacaagaactgtaccaggaggaacaggctgagatctacaagtccaaactaaaggaagaagcagaaaagaagctgaggaaacagaaagaaatgaagcaggatttcgaagagcaaatggctctcaaagaactggttctgcaggccgcaaaagaggaagaagagaatttccgtaagacaatgctggccaaattcgccgaagatgaccgtattgagctcatgaacgctcagaagcagcgcatgaagcaactggagcataggagggctgtcgaaaaactgattgaagagcggagacagcagtttctggcagacaagcagagggagctggaggagtggcagctccagcagaggcggcaggggttcatcaatgctataatcgaagaggagagactcaagctcctcaaagagcatgctaccaacctcctgggttacttgcctaagggcgtttttaaaaaggaggacgacattgacctcttgggggaggaatttaggaaagtgtatcaacagcggtcagaaatatgtgaggagaaatag

SEQ ID NO: 198047 - DNA, 1488 bp, Artificial Sequence
  derived and/or modified sequence
atgggcagcaagagaagaaacctgagctgcagcgagcggcaccagaagctggtggatgagaactactgcaagaagctgcacgtgcaggccctgaagaatgtgaacagccagatccggaaccagatggtgcagaatgaaaatgacaacagagtgcagaggaagcagttcctgcggctgctgcagaatgagcagtttgagctggacatggaggaggccatccagaaggccgaggagaacaagaggctgaaggagctgcagctgaagcaggaggagaagctggccatggagctggccaagctgaagcatgagagcctgaaggatgagaagatgaggcagcaggtgcgggagaacagcattgagctgcgggagctggagaagaagctgaaggccgcctacatgaacaaggagcgggccgcccagattgctgagaaggatgccatcaagtatgagcagatgaagagagatgctgagatcgccaagaccatgatggaggagcacaagaggatcatcaaggaggagaatgctgctgaggacaagaggaacaaggccaaggcccagtactacctggacctggagaagcagctggaggagcaggagaagaagaagcaggaggcctatgagcagctgctgaaggagaagctgatgattgatgaaattgtgaggaagatctatgaggaggaccagctggagaagcagcagaagctggagaagatgaatgccatgaggcgctacatcgaggagttccagaaggagcaggccctgtggaggaagaagaagcgggaggagatggaggaggagaacaggaagatcattgaatttgccaacatgcagcagcagcgggaggaggacaggatggccaaggtgcaggagaatgaggagaagaggctgcagctgcagaatgccctgacccagaagctggaggagatgctgcggcagcgggaggacctggagcaggtgcggcaggagctgtaccaggaggagcaggccgagatctacaagagcaagctgaaggaggaggccgagaagaagctgaggaagcagaaggagatgaagcaggactttgaggagcagatggccctgaaggagctggtgctgcaggccgccaaggaggaggaggagaacttcaggaagaccatgctggccaagtttgctgaagatgacagaattgagctgatgaatgcccagaagcagaggatgaagcagctggagcacagaagagctgtggagaagctgattgaggagcggcggcagcagttcctggccgacaagcagcgggagctggaggagtggcagctgcagcagaggcggcagggcttcatcaatgccatcatcgaggaggagcggctgaagctgctgaaggagcacgccaccaacctgctgggctacctgcccaagggcgtcttcaagaaggaggatgacatcgacctgctgggggaggagttcaggaaggtgtaccagcagaggtctgagatctgtgaggagaagtag

SEQ ID NO: 198048 - DNA, 2023 bp, Artificial Sequence
  derived and/or modified sequence
acttttggtcgagcggagggcgcgcagctccaccgttgccaagacgccgcgtaaacacccgagcgcgcgcagccaggtgcgctccttggggctgctggctgctgcgtttgcggcgggaggtggtggccgcggtcccacgagagggggtatttttcgtcagccaagatgggttccaaaaggagaaatttgagctgtagtgaaaggcatcagaaattagtagatgaaaactactgcaaaaaattacatgtccaagctctaaaaaacgtcaacagtcaaatcaggaatcaaatggtgcagaatgaaaatgataaccgtgttcagcgcaagcaatttctcagattattacaaaatgaacaatttgagttggatatggaagaggccattcaaaaggcagaagaaaacaagagattgaaagaactccagctcaaacaagaagaaaaactggctatggaattggcaaaactgaaacatgaaagtctaaaggacgaaaagatgaggcaacaagtaagagaaaacagcattgagcttagagaattggagaagaaattaaaagcagcttacatgaataaagaaagggcagctcagattgctgaaaaggatgccattaaatatgaacaaatgaaacgtgatgctgaaatagccaaaaccatgatggaagaacacaagagaataataaaggaagagaatgctgcagaagacaaacgaaacaaagcgaaagcacagtactatcttgacttagagaaacaacttgaagaacaagaaaaaaaaaagcaggaagcttatgagcagctgctaaaagagaaactcatgattgatgaaattgttaggaagatctatgaagaagatcagttggaaaaacaacaaaagttagaaaaaatgaatgcaatgcgaaggtatatagaagagtttcagaaagagcaggctctctggagaaaaaagaaacgtgaggagatggaagaagaaaacagaaaaatcatagagtttgctaacatgcagcagcaaagagaagaagatcggatggcaaaagttcaagaaaatgaggagaaaaggctacagcttcagaatgcgttgacacagaaattagaagaaatgctgcggcaacgtgaagatttggaacaagtgcgacaagaattataccaggaagaacaagctgaaatatataagagcaagctaaaagaagaagcagaaaagaaattgagaaagcaaaaagagatgaagcaagattttgaagaacaaatggccttgaaggaattagtgctacaggctgcaaaagaggaagaggagaactttagaaaaactatgctagctaaatttgctgaggatgatcgaatagaattaatgaatgctcagaaacaaagaatgaagcagctggaacacaggagggctgtggaaaaacttattgaagagcgtcgccaacaattccttgcagacaaacaacgtgaactagaagagtggcagttgcagcaaaggcggcaaggatttattaatgcaattattgaagaagaaaggctaaaacttcttaaagagcatgctacaaacttactaggctatctccctaaaggagtatttaaaaaagaggatgatattgatctgcttggtgaagagttcaggaaagtatatcaacaaaggagtgaaatttgtgaagagaaatgatatcatcaaaattgggtaaagcatagattttttgcatgttaccactagatgtcagcataacttttgttttacagttcagtggcattaggtatccattgtctgtttggattttgtaaatcatcactgaatttcataacttgtaaacaattatcagatacaaattaattttaatcaagctgttatttttgtactgataatttcaaaatccgatttctacaacactacagagcactgtttgcatccccatcctcaagacagtatatttaccttgactaatacagaactctaccccaaagtgaactgccttctgtctgtgtttacgaactttacttacttgatttagccagggaaataaatatttggaattttc

SEQ ID NO: 198049 - DNA, 1488 bp, Artificial Sequence
  derived and/or modified sequence
atgggcagcaagcggcggaacctgagctgcagcgagcggcaccagaagctggtcgacgagaactactgcaaaaagctccacgtgcaggcccttaagaatgtgaatagtcagattcgcaaccagatggtccaaaatgaaaatgacaatcgtgtccaacgtaaacagttcctcagactgctgcagaacgagcagttcgagctagatatggaagaggcaatccagaaagctgaagaaaataaacggctgaaggaactacagctgaagcaggaggaaaagctggcgatggagttggcaaagctgaagcatgagtctcttaaggatgagaagatgaggcaacaggtgagagagaattccatcgagcttcgcgagctggaaaaaaaactcaaagccgcctatatgaacaaggagagagccgcccaaattgccgaaaaagacgctattaagtatgagcagatgaagagagacgccgagattgccaagacaatgatggaggagcataagcgtatcattaaggaggaaaacgccgccgaggacaaacggaacaaagctaaggcacagtattatctggacctggagaagcaactggaggaacaggagaagaagaagcaggaggcctacgaacaactgctgaaggaaaaactgatgattgatgaaatagtgagaaagatctacgaagaggatcagcttgaaaaacagcagaagcttgaaaagatgaacgctatgcgacgatatatcgaggagttccagaaagaacaagccctctggcgtaaaaaaaaacgagaggagatggaggaggagaacagaaagatcatcgagtttgccaatatgcaacagcagagggaggaggatagaatggccaaagtccaagagaatgaagagaaaagattgcaactgcagaacgctctcacccagaagttagaggagatgcttcgacaaagagaagatctcgaacaagtgaggcaggaactataccaggaggaacaagccgagatttataagtctaaactgaaggaggaagcagaaaaaaaattaaggaaacagaaggagatgaagcaggatttcgaggagcagatggcactcaaggaacttgtgctacaggcggcaaaggaagaggaagaaaactttcgtaaaaccatgttagccaagttcgccgaagacgataggatcgaactcatgaacgcgcagaaacagcgtatgaaacagctggaacaccgtagagccgtagagaagctgatcgaggagcggcgccaacagtttctggctgataagcagcgcgagcttgaagagtggcagctccagcagcgacggcagggcttcatcaatgctataattgaggaagagaggcttaaactcctcaaagaacacgccacgaatctcctgggatacctgcctaagggtgtatttaaaaaagaggacgatattgacttgctgggggaggaattcaggaaggtctaccagcagcgcagtgagatctgcgaggagaagtag

SEQ ID NO: 198050 - DNA, 1488 bp, Artificial Sequence
  derived and/or modified sequence
atgggatctaaaagaaggaacctgagttgctctgaaaggcatcagaagctagttgacgagaactattgtaagaaactccacgtgcaagcactgaagaatgtgaattctcagatccggaatcaaatggtccagaatgagaatgacaatcgggtgcagcgcaaacagtttttacgtctgcttcagaatgaacagttcgaattggatatggaagaggcgatacagaaggctgaggaaaacaaaaggctcaaggagctccagttgaagcaagaggagaagttggctatggaacttgccaagctgaaacacgagagtctgaaggacgagaagatgaggcaacaggtgcgggaaaatagtatcgaactgagggagttggagaagaaactcaaagccgcttacatgaacaaggaacgggcagcacaaattgcagagaaggatgccattaaatatgaacagatgaagagggatgccgagattgcaaagacgatgatggaggaacataaacggataattaaggaggagaatgcagccgaggacaagcggaacaaggctaaggcccaatattatctggacctggaaaagcaactagaagagcaggagaagaagaaacaggaggcctacgaacagctcctcaaggagaaactcatgatagacgagatcgttcggaagatttacgaggaggaccaactggagaaacaacagaagctagaaaaaatgaacgccatgcggagatacatcgaagaattccaaaaggagcaagccttgtggagaaagaagaaacgagaagaaatggaggaggagaaccgaaaaatcattgaattcgccaatatgcagcagcaacgggaagaagaccgcatggccaaggtacaggaaaatgaagagaagcgactgcagctgcaaaacgcccttacacagaaactcgaggaaatgctccggcagagagaggacctggaacaagttaggcaggaactgtaccaggaggagcaggcagagatatataaatccaagctgaaggaagaagccgagaagaaattgcgaaagcagaaagaaatgaaacaagactttgaagagcagatggccttgaaggaacttgtcctgcaggcagctaaagaggaagaagagaacttccgcaaaactatgctggccaagttcgctgaggacgacagaattgagttaatgaatgcacagaaacagcgcatgaagcaacttgagcatcggagagcagtcgagaagttgattgaagaacgtagacagcagttcctcgctgacaagcagagagagctcgaagaatggcagcttcagcagcggcgacagggcttcataaatgccataattgaggaagagaggctcaagctgcttaaagaacatgctacgaacctgctgggctatctccctaagggagtgttcaagaaagaggacgatatcgacctcctgggtgaagaatttcggaaggtgtaccagcagaggtccgagatctgtgaagagaagtag

SEQ ID NO: 198051 - DNA, 1488 bp, Artificial Sequence
  derived and/or modified sequence
atgggcagcaagagaagaaacctgagctgcagcgagagacaccagaagctggtggacgagaactactgcaagaagctgcacgtgcaggccctgaagaacgtgaacagccagatcagaaaccagatggtgcagaacgagaacgacaacagagtgcagagaaagcagttcctgagactgctgcagaacgagcagttcgagctggacatggaggaggccatccagaaggccgaggagaacaagagactgaaggagctgcagctgaagcaggaggagaagctggccatggagctggccaagctgaagcacgagagcctgaaggacgagaagatgagacagcaggtgagagagaacagcatcgagctgagagagctggagaagaagctgaaggccgcctacatgaacaaggagagagccgcccagatcgccgagaaggacgccatcaagtacgagcagatgaagagagacgccgagatcgccaagaccatgatggaggagcacaagagaatcatcaaggaggagaacgccgccgaggacaagagaaacaaggccaaggcccagtactacctggacctggagaagcagctggaggagcaggagaagaagaagcaggaggcctacgagcagctgctgaaggagaagctgatgatcgacgagatcgtgagaaagatctacgaggaggaccagctggagaagcagcagaagctggagaagatgaacgccatgagaagatacatcgaggagttccagaaggagcaggccctgtggagaaagaagaagagagaggagatggaggaggagaacagaaagatcatcgagttcgccaacatgcagcagcagagagaggaggacagaatggccaaggtgcaggagaacgaggagaagagactgcagctgcagaacgccctgacccagaagctggaggagatgctgagacagagagaggacctggagcaggtgagacaggagctgtaccaggaggagcaggccgagatctacaagagcaagctgaaggaggaggccgagaagaagctgagaaagcagaaggagatgaagcaggacttcgaggagcagatggccctgaaggagctggtgctgcaggccgccaaggaggaggaggagaacttcagaaagaccatgctggccaagttcgccgaggacgacagaatcgagctgatgaacgcccagaagcagagaatgaagcagctggagcacagaagagccgtggagaagctgatcgaggagagaagacagcagttcctggccgacaagcagagagagctggaggagtggcagctgcagcagagaagacagggcttcatcaacgccatcatcgaggaggagagactgaagctgctgaaggagcacgccaccaacctgctgggctacctgcccaagggcgtgttcaagaaggaggacgacatcgacctgctgggcgaggagttcagaaaggtgtaccagcagagaagcgagatctgcgaggagaagtag

SEQ ID NO: 198052 - protein, 217 aa, Artificial Sequence
  derived and/or modified sequence
MEGSFSDGGALPEGLAEEAEPQGAAWSGDSGTVSQSHSSASGPWEDEGAEDGAPGRDLPLLRRAAAGYAACLLPGAGARPEVEALDASLEDLLTRVDEFVGMLDMLRGDSSHVVSEGVPRIHAKAAEMRRIYSRIDRLEAFVRMVGGRVARMEEQVTKAEAELGTFPRAFKKLLHTMNVPSLFSKSAPSRPQQAGYEAPVLFRTEDYFPCCSERPQL

SEQ ID NO: 198053 - DNA, 654 bp, Artificial Sequence
  derived and/or modified sequence
atggagggtagcttcagcgatgggggcgcactgcccgaaggcctggcggaagaggccgaaccacaaggtgccgcttggagcggagatagtggcaccgtgtctcagtctcattctagcgcatctggcccgtgggaggatgagggggccgaggatggggcaccagggcgggacttgcctcttctgaggagggccgcggccggttatgcagcgtgcctgctgcccggagccggagccagacccgaggttgaggcgcttgacgcctctctggaagatctgctgacccgggtggatgagttcgtgggcatgctggatatgttgcggggcgattctagtcatgttgtgtccgagggggtgcctaggattcatgcaaaggcggctgaaatgcggcgtatctacagccgaatcgaccggctcgaggcctttgtccgcatggtgggagggcgcgtggccagaatggaggagcaggtcacaaaggccgaagcagagctgggcacgttcccccgtgccttcaagaagctgctgcatacgatgaatgtcccatctctctttagcaagagcgcgccaagccgcccgcagcaggcaggttacgaggcacctgtgctgtttaggacggaagattacttcccatgctgcagtgaacggccacagctgtag

SEQ ID NO: 198054 - DNA, 654 bp, Artificial Sequence
  derived and/or modified sequence
atggagggcagcttcagtgatggaggagccctgcctgagggcctggccgaggaggccgagccccagggcgccgcctggagcggggacagcggcaccgtgtcccagagccacagcagcgccagcggcccctgggaggatgagggcgcagaagatggagcccctggccgggacctgcccctgctgcggcgggctgctgctggctatgctgcctgcctgctgcccggggccggggcccggcctgaggtggaggccctggatgccagcctggaggacctgctgaccagggtggatgaatttgtgggcatgctggacatgctgcggggggacagcagccacgtggtgtctgaaggagtgccccgcatccacgccaaggctgctgagatgaggcgcatctacagcagaattgaccggctggaggcctttgtgaggatggtgggcggccgggtggccaggatggaggagcaggtgaccaaggccgaggccgagctgggcaccttcccccgggccttcaagaagctgctgcacaccatgaatgtgcccagcctcttcagcaagagcgcccccagccggccccagcaggccggctatgaggcccctgtgctcttcagaacagaggactacttcccctgctgcagcgagcggccccagctgtag

SEQ ID NO: 198055 - DNA, 654 bp, Artificial Sequence
  derived and/or modified sequence
atggagggcagcttcagcgacggcggcgccctgcccgagggcctggcggaggaggccgagcctcagggtgctgcctggtctggcgattccggaaccgtttcccagagccactctagtgccagtgggccatgggaagatgaaggcgctgaggacggagctcctgggcgagacctgcctttacttcgccgtgctgctgcaggttacgcggcatgcctcctccccggtgctggcgcccgacctgaagtggaggcccttgatgctagccttgaggaccttctcacaagggtcgacgaattcgttggaatgcttgacatgctgagaggggacagctcacatgtcgtttctgagggcgtacctcgcatccacgcaaaggcagccgaaatgagaaggatctatagtaggatagaccgcctcgaagcgttcgtgagaatggttggtggacgggtggcaagaatggaggagcaggtcactaaggcggaggcggaactgggtacattcccgcgtgccttcaagaagcttttgcatacaatgaacgtccccagcctattttcgaaatcggccccatcacgtcctcagcaagccggctatgaggctccagtgctgttccgcacagaggattattttccatgctgctcagagaggcctcagctgtag

SEQ ID NO: 198056 - DNA, 654 bp, Artificial Sequence
  derived and/or modified sequence
atggaaggcagtttctccgatggtggtgcacttccggagggactggccgaggaagctgagccacaaggggcagcctggtcaggtgactcagggacagtttcccagagtcactcctcggcctctggcccatgggaagatgaaggagccgaggacggcgctcccggtcgcgacctcccgttattaaggagagctgccgctggctacgctgcctgtttgctccctggcgctggagcacgcccagaagtagaggcgcttgatgcttctttggaagacctgcttaccagagttgatgagttcgtgggaatgttggatatgttaaggggcgactctagccatgtcgtgtccgaaggggtgccaagaatccacgccaaagcagctgagatgcgaagaatttattcaaggatcgaccggctggaggcatttgtcaggatggttggtggtcgtgtcgctagaatggaggaacaggtgactaaggctgaggctgagctgggaacttttcctcgtgcattcaagaagttgctccacaccatgaatgttccatctctgttcagcaagagcgccccatctcgaccccagcaagccggatacgaagctccggtactgtttaggacggaggactatttcccatgctgttctgagagaccacagctatag

SEQ ID NO: 198057 - DNA, 1546 bp, Artificial Sequence
  derived and/or modified sequence
aaaggcgtgagcgcgcgtgcgtgcgtgtgcgggtgcgtgagcgtgagcgcgcggaggccggaagcgagcgctgcgcagtcgggtggtcgcgggccatggagggtagcttttcggatggcggagcgctgccggaggggctcgcggaagaggccgagccgcagggcgccgcctggagcggggacagtggcactgtttcccagagccacagcagcgcctcggggccgtgggaggacgagggcgcggaggacggcgcgccgggccgcgacctgccgctgcttcgccgcgccgctgcgggctacgccgcctgcctgctgcccggggccggggcgcggcccgaggtcgaggccctggacgcgagcctagaggacctgcttaccagagtggacgagttcgtgggcatgctggacatgcttcgcggcgactcgtcccacgtcgtcagcgagggcgtgccgcgcatccacgcgaaggccgccgagatgcggcgcatctacagcaggatcgaccggctggaggccttcgtgaggatggtggggggccgcgtggccaggatggaggagcaggtcaccaaggccgaggccgagctgggcaccttccccagggcgttcaagaagctcctgcacacgatgaacgtgccctcgctctttagcaagtctgctccctcgaggccacagcaagccggctacgaagcccccgtcctgtttcggaccgaagactacttcccttgttgcagtgaaaggcctcagctctgacggcctgaccactgcggcaagaggaccccagctggggtgcttacctccagtatgaagtgaattgcaaatcctgcttatggacatatatgatgttggagtgtgggattttaaagtttactttctacaaactctccgtagtatattcatgattcagtgtagaatgtatagactttatgtcttccaagtttaaaaaaagagacagggtcttggtatgttgcccagactgttcggaaactcctgggctcaagtgatccttccacctcagcctccccagtagctgggactacggggtcgccactgcacccagcctgtgtcttccagctctaatcagaaagctgcttgtcgagggcatggggaatcaaactgaatgaacttttctctgcactgtggcaaaactgttatttttatggattttactaaatggcgttaccttttcaagatttatatgtttgtataatcataagaaaattgagccattaaagccttgttattcaatcctaatagtcagttttctagaacctacttttagggtaaatggtacattatttaatattatattaaacctcctatagcgtggattgtagaccaaaggaaatggtacaatttctgagaatatatgttgattttttgtgactaattccaaagttgtatttgaaagtatgacctcacagtcttcatttgtccatagcaaacatatgtgtgtgtgtgtgtatatatatatgtgggttgccaatgtttggtttataatttaaatgttaatagaaattttgagttttattggaaatgatttccttctg

SEQ ID NO: 198058 - DNA, 654 bp, Artificial Sequence
  derived and/or modified sequence
atggagggcagcttcagcgacggcggcgccctgcccgagggcctggccgaggaggccgagccccagggcgccgcctggagcggcgacagcggcaccgtgagccagagccacagcagcgccagcggcccctgggaggacgagggcgccgaggacggcgcccccggcagagacctgcccctgctgagaagagccgccgccggctacgccgcctgcctgctgcccggcgccggcgccagacccgaggtggaggccctggacgccagcctggaggacctgctgaccagagtggacgagttcgtgggcatgctggacatgctgagaggcgacagcagccacgtggtgagcgagggcgtgcccagaatccacgccaaggccgccgagatgagaagaatctacagcagaatcgacagactggaggccttcgtgagaatggtgggcggcagagtggccagaatggaggagcaggtgaccaaggccgaggccgagctgggcaccttccccagagccttcaagaagctgctgcacaccatgaacgtgcccagcctgttcagcaagagcgcccccagcagaccccagcaggccggctacgaggcccccgtgctgttcagaaccgaggactacttcccctgctgcagcgagagaccccagctgtag

SEQ ID NO: 198059 - protein, 267 aa, Artificial Sequence [sequence omitted]

SEQ ID NO: 198060 - protein, 225 aa, Artificial Sequence
  derived and/or modified sequence
MIIPPMFGAVQSVRDGLEKRYIASYLALTVVGMGSWCFHMTLKYEMQLLDELPMIYSCCIFVYCMFECFKIKNSVNYHLLFTLVLFSLIVTTVYLKVKEPIFHQVMYGMLVFTLVLRSIYIVTWVYPWLRGLGYTSLGIFLLGFLFWNIDNIFCESLRNFRKKVPPIIGITTQFHAWWHILTGLGSYLHILFSLYTRTLYLRYRPKVKFLFGIWPVILFEPLRKH

SEQ ID NO: 198061 - DNA, 804 bp, Artificial Sequence
  derived and/or modified sequence
atggcccccgccgccgacagagagggctactggggccccaccaccagcaccctggactggtgcgaggagaactacagcgtgacctggtacatcgccgagttctggaacaccgtgagcaacctgatcatgatcatcccccccatgttcggcgccgtgcagagcgtgagagacggcctggagaagagatacatcgccagctacctggccctgaccgtggtgggcatgggcagctggtgcttccacatgaccctgaagtacgagatgcagctgctggacgagctgcccatgatctacagctgctgcatcttcgtgtactgcatgttcgagtgcttcaagatcaagaacagcgtgaactaccacctgctgttcaccctggtgctgttcagcctgatcgtgaccaccgtgtacctgaaggtgaaggagcccatcttccaccaggtgatgtacggcatgctggtgttcaccctggtgctgagaagcatctacatcgtgacctgggtgtacccctggctgagaggcctgggctacaccagcctgggcatcttcctgctgggcttcctgttctggaacatcgacaacatcttctgcgagagcctgagaaacttcagaaagaaggtgccccccatcatcggcatcaccacccagttccacgcctggtggcacatcctgaccggcctgggcagctacctgcacatcctgttcagcctgtacaccagaaccctgtacctgagatacagacccaaggtgaagttcctgttcggcatctggcccgtgatcctgttcgagcccctgagaaagcactag

SEQ ID NO: 198062 - DNA, 804 bp, Artificial Sequence
  derived and/or modified sequence
atggctcccgccgcagatcgagagggctattgggggccaacaacctctaccctcgactggtgcgaagagaattatagcgtcacctggtacatcgcggaattctggaacactgtgtctaacctgataatgattattccacctatgtttggtgccgtacagtctgtgagagacggtctggagaagcggtatatagcaagttacctggctctgacagtggttggaatgggctcctggtgcttccacatgacgctgaaatatgagatgcagctgctcgatgagctgcctatgatctactcgtgctgcattttcgtatactgcatgtttgaatgcttcaagatcaaaaatagtgtgaattaccatctgctgtttaccctggttttattctccctaatagtcacaaccgtgtacttgaaggttaaggaaccaattttccatcaggttatgtacgggatgcttgtgttcacactggtattgcggtctatttatatcgttacatgggtttatccctggttgcgcggactcggatatacttccctcggaattttcctgttaggatttctcttctggaacatcgataacatcttttgtgaatcactgcggaacttccgcaaaaaggttccacctattattggcataacaacccaattccacgcctggtggcacatcctcacaggactgggaagttacttacacattcttttcagcctgtatacaagaacactgtatctgagatacaggccaaaagtgaagttccttttcggcatctggccagtgatattgtttgagccccttcggaagcactag

SEQ ID NO: 198063 - DNA, 804 bp, Artificial Sequence
  derived and/or modified sequence
atggccccagctgctgaccgggagggctactggggccccaccaccagcaccctggactggtgtgaggagaactacagcgtgacctggtacatcgccgagttctggaacacagtgagcaacctgatcatgatcatcccccccatgtttggagctgtgcagagcgtgagagatggcctggagaagcgctacatcgccagctacctggccctgactgtggtgggcatgggctcctggtgcttccacatgaccctgaagtatgagatgcagctgctggatgagctgcccatgatctacagctgctgcatctttgtgtactgcatgtttgagtgcttcaagatcaagaacagcgtgaactaccacctgctcttcaccctggtgctcttcagcctgattgtgaccaccgtgtacctgaaggtgaaggagcccatcttccaccaggtgatgtatggcatgctggtgttcaccctggtgctgcggagcatctacatcgtgacctgggtgtacccctggctgcggggcctgggctacaccagcctgggcatcttcctgctgggcttcctgttctggaacatcgacaacatcttctgtgagagcctgaggaacttcaggaagaaggtgccccccatcatcggcatcaccacccagttccacgcctggtggcacatcctgaccggcctgggcagctacctgcacatcctcttcagcctgtacaccaggaccctgtacctgcgctaccggcccaaggtgaagttcctgtttggcatctggcctgtgatcctgtttgagcccctgaggaagcactag

SEQ ID NO: 198064 - DNA, 1269 bp, Artificial Sequence
  derived and/or modified sequence
agtgagcggagcgcctgggcggcggcggcggcggcgtgatggctccggccgcggaccgagagggctactggggccccacgacctccacgctggactggtgcgaggagaactactccgtgacctgggaatacagtgagtaacctgatcatgattatacctccaatgttcggtgcagttcagagtgttagagacggtctggaaaagcggtacattgcttcttatttagcactcacagaagtacttcagatttgagaaaagagcacataactatggctaaaagatgggatttgtaatctctggagttttttacttcaagtctgaggatccaaactgactaagtgaagtaaagaaataagcagctattggatgaactcccaatgatatacagctgttgcatatttgtgtactgcatgtttgaatgtttcaagatcaagaactcagtaaactaccatctgctttttaccttagttctattcagtttaatagtaaccacagtttaccttaaggtaaaagagccgatattccatcaggtcatgtatggaatgttggtctttacattagtacttcgatctatttatattgttacatgggtttatccatggcttagaggactgggttatacatcattgggtatatttttattgggatttttattttggaatatagataacatattttgtgagtcactgaggaactttcgaaagaaggtaccacctatcataggtattaccacacaatttcatgcatggtggcatattttaactggccttggttcctatcttcacatccttttcagtttgtatacaagaacactttacctgagatataggccaaaagtgaagtttctctttggaatctggccagtgatcctgtttgagcctctcaggaagcattgatgaatcattccaccaagaaaacaaacaagcacctaccatagacctggcagaataaataaggaaatccttaaagatctacaagttcaaatatgtcatgaccatcacagcagaggagtgactttctgactaatgctgccacccacacagagaataaggagtagggcctgctgggtgtttagctcatggctttatcttatttgtccccctcctcctttcacgctccagtttataaagaaacagagatgatgtgtgtgtatgcctcaaatgcagaaacagttgggcttttcttaacaggttaacagtttgtgctggttataagaaattaaccttcttttctttttgccaagggttgcatgtgaattatacctttctt

SEQ ID NO: 198065 - DNA, 7378 bp, Artificial Sequence
  derived and/or modified sequence
gggcggggcgcgagcgagcgcgcgggctgggccggagccggcctggtcgccagcctaacccggcacagtgagcggagcgcctgggcggcggcggcggcggcgtgatggctccggccgcggaccgagagggctactggggccccacgacctccacgctggactggtgcgaggagaactactccgtgacctggtacatcgccgagttctggaatacagtgagtaacctgatcatgattatacctccaatgttcggtgcagttcagagtgttagagacggtctggaaaagcggtacattgcttcttatttagcactcacagtggtaggaatgggatcctggtgcttccacatgactctgaaatatgaaatgcagctattggatgaactcccaatgatatacagctgttgcatatttgtgtactgcatgtttgaatgtttcaagatcaagaactcagtaaactaccatctgctttttaccttagttctattcagtttaatagtaaccacagtttaccttaaggtaaaagagccgatattccatcaggtcatgtatggaatgttggtctttacattagtacttcgatctatttatattgttacatgggtttatccatggcttagaggactgggttatacatcattgggtatatttttattgggatttttattttggaatatagataacatattttgtgagtcactgaggaactttcgaaagaaggtaccacctatcataggtattaccacacaatttcatgcatggtggcatattttaactggccttggttcctatcttcacatccttttcagtttgtatacaagaacactttacctgagatataggccaaaagtgaagtttctctttggaatctggccagtgatcctgtttgagcctctcaggaagcattgatgaatcattccaccaagaaaacaaacaagcacctaccatagacctggcagaataaataaggaaatccttaaagatctacaagttcaaatatgtcatgaccatcacagcagaggagtgactttctgactaatgctgccacccacacagagaataaggagtagggcctgctgggtgtttagctcatggctttatcttatttgtccccctcctcctttcacgctccagtttataaagaaacagagatgatgtgtgtgtatgcctcaaatgcagaaacagttgggcttttcttaacaggttaacagtttgtgctggttataagaaattaaccttcttttctttttgccaagggttgcatgtgaattatacctttcttaatatttgattaaataatgcagtcagctaagagccaacaaaaccccatatccagatagttagctgtgagccagcactcagctgtgtcagatttgattaatattgtattaatctcatggatggttctcaaaggtaaaaaaagagagagaaagagagagagctagctgtgggattctgtgtagttcttcactatctgttccagggctagtcggaggatcataagcaagctcagacctgcccccagttcagtacttgaccacatcccaggatttatggtgtctgtctatggccacagccaaccagaatgagtgggtcatcttataacctttctgaagctccatgaggacatgtatagaatgctgcaccttcagccagctctgctctgatctttgcagatctttaagttgtcactgtttctacggctagacaaatatgactggtggtctagactacccatagttcatcctcctcacataacttatttgaagttgtcagggaatgtcattacactctgatttttaaaattatgcagtattttccagttctcagagaggtcatggttgtgcccagggaagtgtgttgcattaactaaagctaaaattatcagaatcctatttacataaagcatattaaaatatctgctccttaattttctgaaggaaatagatgtaagtttctgctacttgaaacctacagaaccgacaaaaattagggtgctaaaaaaatgacagtgaaatctcatcgtaaggcagctagttctaatttgcatttgaatgtataacaaattgcatcacttttcacaaacttaacacctgcctggagtaaaaatctgatttgacccctctgctcatgtttcatcatatttgtagctctgcatcatttagcatttttatgactttttttgctttatataaattattgtaaaatccagattgtttttaccacatgatgacgtgactcaggattaaatcctgagctacagtttcaaaaggaaaatcatttttttcttatgcaaagatggtaaaacactgttgtcattttttccagtattcaataagtagcctttgtacaaatttaaaaccaaaaactattctgttgtttttcttcacctactagccttagtttttaaccaagtatccaaggatgtcaacttgacatccttcccttagcatgccaacaagccattagactgattcttccacctatttttatgaacctccaggaagaaaaacacttgccaaaacattaagagaactttgattctgccttaagagggtataaaactaaaccatttgaaggcacagcccataagactatacttgattttgccccaagattctgacttctggctacatttcacctgcagttacctgggctatcggccgtgatacattttttaattcatttgttttccaccattatatttttatacttttcagttagatatacttctgcataaagagtatatatacagtgtaggataaaggcatatcgtacatggcaatgctgttaaacatggtaagactgaggttctgcaggattaaagtcagattaagggtacagaaagcacaccttgatactgaggccatttagagcaatttgtttaatgagtggttcagccatcaccaccagtggccacctgttcaataaaattgcctagcaccacagtggagagtcatctacaccccaaggtgagctgtaagactggccaattctttgaagacctttttttctgttgggagaatggaaagcagaaagggaagccaggctctttaatgttccaagtcagctgtgcctcacacaaggctctctttttagctactaagtaacatactcaagactttgtatctgtgcagcattttatggaaatcactggtgacctataggatattactaaattatttcaatagctttatttttttcctacttggattctaggtggacattacagagttgaattcctcactaccccctcccgctgtcatttgttttattggaaaacttcatgttaactagagtgtacaaaaagtctgtttcctgctgagccaatagtgatttgtttgcatatcacctaatgtgaaaagtgctcatctgtgaactctacagcaaattatattttagaaaatactttgtgaggccgggcatggtggcagagcgagactccgtctcaaaaaaaaaaaaaaaaaaaaaaaagaaaagaaaagaaaatataaggatgtaaaagaagcaatttgcttgcacatctgaatatccttcttgtgcctccattttcactcttgaaaactgaaagcaatttgacttttatttttgtttttctaaagaacagctaggtgaaaggaggttaagctgattgtcactctgcctgcccactacctactccccaccatggtgtttcatgaaacatccccaccacctgaagtgatctttttaatccttgtgatagtaaatgcattgataattaacaggaaaaacatgtttttaaataatctacaaatgagaacccaaatagtagtgttttgtttgacagaagtaaatcaaatattatggtttaaatataatgcaaaatttcaggacagttaatttggacttcccttaccctaagagggtttttcttataataaggagaagaggtgtggttcaaagaaaattaagagacaaaaccttcaggtacataatgcatgaaaatctttaaatgcctgcaaaaattaagttctgttataataccagccaattctgaattagccaatgccctaaaagcatctaacaatttaaggttatcttatgagtcctatgaaaacaattatttgttgctaaatttgagttttagctaccaacgccatgtttacgtgacaagaaattgttttggccctgtggtttatgacgtgctgctggataagcatttatgtaaaactgagtatttcaaagagaaccatttacaattggaatttccacctgtgtggctgtttgcagacctacctctgtcttccattttgcatcctgtcagtgctataattagtttgatcactttgtcttgtttttcagtgtctacaattatagcttattcactatgttctaactatttaaaaataatgggccgggcgcggtggctcatgcctgtaatcccagcactttgggaggccgaggtgagcagatcacaaggtcaggagatcgagaccatcctggctaacacagtgaaaccccgtctctactaaaaatacaaaaaaattagtcgggcatggtggcgggcgcctgtagtcccagctactcgggaggctgaggcaggagaatggcgtgaacctgggaggcagagcttgcagtgagccaagattgtgccactgcactccagcctgggcaacagagcgagactctgtctcaaaaaaaaaaaaaaaaaaaaaaaaaaaagactaaaatttgatttaaagtagttaaacccctttatggaaggagctgcaaaatgaaaaaaaaaaaaaaaaggaatcatgtcatcttgacccagctgactggaaattttcaatactgtcttttaactgttgtactccagccagcctgggcaacagagtgagaccctgtctcaaaaaaaaaaaaaaaaaaaaaaaaaaaaagaattaggaaatacttgttaaaatatctaactacgtaattgctacatgggggagctgctggtgttgttgaggtccttgggagcattccactggacttcaccatttctccaaaattatcagcccagtcagcttcatatacccagatatggacacttctacacgtgaaattcaaactgaagataaaactctgactttggagtataaacttttgccttgagtatgaaaccttgacattgctgaaagaaaagtggaaactgtaagggacaacaagtttcaccaaggcacagtcttctctgataggccagcagagcagctaaggagaagacagatcattcaagaacttaagtcgtttgttagctacagcatttccattgctgtgatacacattcagccattttggaggaaagctaagcaggttctgaccacccattttcatgtactttaaataacaaatattatttctcaaggtcttcattttatcattaaattcagctaattactacctgatttcaaaggcagctagtgtagaagactggtcacaagaatttttttttaaatagaaaaccctaaaatgcaaatcaagaaattcagttacaggctgcaagtgacctaaaattcccctactctagctcagcagccatcagtcagtatagcatcagccacaggtcactgctctgcatacagttccttttcaacccttacaagacctgcttcattgctttaaaaatgtagtgttgatacttgaactgaatttagtcattggtaacttaaatattcacaaaattgtcataaagcttctgaaacatctggcaatgccagatctgtaatcatcacttttaaattgaatttgcagaattaactctaaagttgcagcaaccatatttattagagaaatctttaagcatatacatatggttccctataagcattcattcagagatcatctgtgcctaaaagaaaatgataaaaatgtgtcataatatcaaaggggtctagatcaggggttggtaaactacaacccatgggccaaattcaggctgcgttgtatggcctgcaaggtaagaatggttattttattttattttattctttatatatatatatatatatttatttatttttttgagacagagtctctctctgtcacccacgctggagtgcagtggcaggatctcaactcattgcaacctccgcctcccaaggttcaagcgattctcctgcctcagcctcccgagtagctgggactacaggcacatgccaccatgccaccatgcctggctgatttttgtatttttagtagagctgggttggccaggctggtcttgaactcctgacctcaagtgattcacctgccttggcctcccaaagtcctggaattacaggcgtgagctaccgtgcccagctggtttttacattttaaaaacgtttagagaaagaagaatatgcaacagaaactgtatgtagcctgcaaagcctaaaatgtttactctctggcttgggagtttgtctcccctgctctagactgtcagcaagtggtacagtggtacagtacagtggtactgcccaactgcacttctctgcaaggtgattctagtgtgcacttgtcagaatgaaaatatgttattcatttaagacatctcatgtctttgaatgtaatcacatgatttgtatttaatatttacatgacctaattattttttcacgtcagtttttctagattggcaatagcctgttgcaaagtgcctaaacctttgagaaaaattactatgagcaaggtccatgatttagttttcaatataaagggaattccattctatactgtaaaatccaaaaatgctagttgccctcagcttttgagttgacttccagaaagttgagatcttttgaccattttttctcatgtcatataaaatgtgccacatggtagttgtcaagctgtggtagtcatgtacactttttttcttttttttaactttctaaaaggaaaagttcaaagtcctttccacagttagtcttcgcttcttttggatttttctttttagagctaaattattcataccaatgaataagtgagtctgttctaagatataggggccattatctatttttgcttaatggactcatgtggcattgttcactatcatgcctttccatacttgtaatatttctgagtcacttattaatgtgaccaacagataaactgttcaagctaatacagcatttcctaacttcatagttgtcgcagatgtttgttctagtagcgattatttaataaacatacattgtactgaatcttactagcaactaactattttcaggtaatctcagtctgcttattcactttttccatttgatttgctaatgccacaatcatttttctagaaaatagtaggataatgtattttttcctgtctgctataatggagactatatttctgcattcattacctctcataggtgaaaatattaaattaaataatattgttttgaataaga

SEQ ID NO: 198066 - DNA, 1346 bp, Artificial Sequence
  derived and/or modified sequence
agcggagcgcctgggcggcggcggcggcggcgtgatggctccggccgcggaccgagagggctactggggccccacgacctccacgctggactggtgcgaggagaactactccgtgacctggtacatcgccgagttctgttccttcctaccatcctccctgaagagcaacctcaaggaatacagtgagtaacctgatcatgattatacctccaatgttcggtgcagttcagagtgttagagacggtctggaaaagcggtacattgcttcttatttagcactcacagtggtaggaatgggatcctggtgcttccacatgactctgaaatatgaaatgcagctattggatgaactcccaatgatatacagctgttgcatatttgtgtactgcatgtttgaatgtttcaagatcaagaactcagtaaactaccatctgctttttaccttagttctattcagtttaatagtaaccacagtttaccttaaggtaaaagagccgatattccatcaggtcatgtatggaatgttggtctttacattagtacttcgatctatttatattgttacatgggtttatccatggcttagaggactgggttatacatcattgggtatatttttattgggatttttattttggaatatagataacatattttgtgagtcactgaggaactttcgaaagaaggtaccacctatcataggtattaccacacaatttcatgcatggtggcatattttaactggccttggttcctatcttcacatccttttcagtttgtatacaagaacactttacctgagatataggccaaaagtgaagtttctctttggaatctggccagtgatcctgtttgagcctctcaggaagcattgatgaatcattccaccaagaaaacaaacaagcacctaccatagacctggcagaataaataaggaaatccttaaagatctacaagttcaaatatgtcatgaccatcacagcagaggagtgactttctgactaatgctgccacccacacagagaataaggagtagggcctgctgggtgtttagctcatggctttatcttatttgtccccctcctcctttcacgctccagtttataaagaaacagagatgatgtgtgtgtatgcctcaaatgcagaaacagttgggcttttcttaacaggttaacagtttgtgctggttataagaaattaaccttcttttctttttgccaagggttgcatgtgaattatacctttcttaatatttgattaaataatgcagtcagctaagagccaacaaaaccccatatccagatagttagctgtgagccagcactcagctgtgtcagatttgatta

SEQ ID NO: 198067 - DNA, 804 bp, Artificial Sequence
  derived and/or modified sequence
atggcccccgccgccgaccgggagggctactggggccccaccaccagcaccctggattggtgtgaagagaactactctgtaacatggtatattgctgagttctggaatactgtgagcaaccttatcatgataattccccccatgtttggcgcggttcagagtgtgcgcgatggactcgagaaacgttatattgcatcctatctggcgctgactgtcgtgggtatgggttcgtggtgctttcacatgaccctcaagtacgaaatgcagttgttagatgaactacctatgatttattcttgctgtatattcgtgtactgcatgtttgagtgctttaaaattaaaaattctgttaattatcacctgctttttactctggtactgttttcgctcattgtgaccacagtctacctgaaggtgaaagaaccgatattccaccaggttatgtacggaatgctggtcttcactctcgtactgcgctcaatatacatcgtcacctgggtctacccatggcttagagggcttggctacacttcgctgggaatattcctactgggcttcctattttggaatattgataatatcttttgtgaatccctgagaaattttcgcaaaaaagtgcctccgattattggcattactacccagttccacgcgtggtggcacatccttaccggtttaggctcgtacctccatattctttttagtctatacacccggaccctatacttaagatacagacccaaggtgaagttcttgttcggcatctggcccgttattctgttcgagccgctgagaaagcactag

SEQ ID NO: 198068 - DNA, 804 bp, Artificial Sequence
  derived and/or modified sequence
atggcgccagctgcggatcgggagggttattggggtcccactaccagcactcttgactggtgcgaggagaattactccgtgacatggtacatcgctgagttttggaatacagtgagtaatctgattatgattatccctccgatgtttggtgctgtgcagagtgtcagagacggactagagaagcgctatatcgcttcatacctcgcgctgaccgttgtggggatgggttcttggtgctttcatatgactctgaaatacgaaatgcagctgctagatgagttgcctatgatatacagctgctgtatcttcgtgtactgtatgttcgagtgcttcaaaattaaaaactcggttaattaccaccttctctttacactggtgttgttcagcttgatcgtcactacagtgtatctgaaggtaaaggagcctatttttcaccaggtgatgtatgggatgctcgtctttacgctcgtgcttcgttccatctacatcgtgacctgggtgtacccatggttaagggggctcggttacacatcccttggcatattccttttgggcttcctgttctggaatatagacaatattttttgcgaatcactccgcaactttcgtaaaaaggtgccacctattataggcatcactacccagtttcacgcatggtggcatattcttaccgggctgggcagctaccttcatatactcttctcgttatatacacgtactctgtacttgagatatcgccctaaagtgaaatttctttttgggatttggccagtcattttgtttgaacctctccgtaagcactag

SEQ ID NO: 198069 - protein, 467 aa, Artificial Sequence
  derived and/or modified sequence
MKNQNGTFKDWANANVSRQIEDTVLYGYYTLYSVILFCVFFWIPFVYFYYEEKDDDDTSKCTQIKTALKYTLGFVVICALLLLVGAFVPLNVPNNKNSTEWEKVKSLFEELGSSHGLAALSFSISSLTLIGMLAAITYTAYGMSALPLNLIKGTRSAAYERLENTEDIEEVEQHIQTIKSKSKDGRPLPARDKRALKQFEERLRTLKKRERHLEFIENSWWTKFCGALRPLKIVWGIFFILVALLFVISLFLSNLDKALHSAGIDSGFIIFGANLSNPLNMLLPLLQTVFPLDYILITIIIMYFIFTSMAGIRNIGIWFFWIRLYKIRRGRTRPQALLFLCMILLLIVLHTSYMIYSLAPQYVMYGSQNYLIETNITSDNHKGNSTLSVPKRCDADAPEDQCTVTRTYLFLHKFWFFSAAYYFGNWAFLGVFLIGLIVSCCKGKKSVIEGVDEDSDISDDEPSVYSA

SEQ ID NO: 198070 - protein, 540 aa, Artificial Sequence
  derived and/or modified sequence
MATSGAASAELVIGWCIFGLLLLAILAFCWIYVRKYQSRRESEVVSTITAIFSLAIALITSALLPVDIFLVSYMKNQNGTFKDWANANVSRQIEDTVLYGYYTLYSVILFCVFFWIPFVYFYYEEKDDDDTSKCTQIKTALKYTLGFVVICALLLLVGAFVPLNVPNNKNSTEWEKVKSLFEELGSSHGLAALSFSISSLTLIGMLAAITYTAYGMSALPLNLIKGTRSAAYERLENTEDIEEVEQHIQTIKSKSKDGRPLPARDKRALKQFEERLRTLKKRERHLEFIENSWWTKFCGALRPLKIVWGIFFILVALLFVISLFLSNLDKALHSAGIDSGFIIFGANLSNPLNMLLPLLQTVFPLDYILITIIIMYFIFTSMAGIRNIGIWFFWIRLYKIRRGRTRPQALLFLCMILLLIVLHTSYMIYSLAPQYVMYGSQNYLIETNITSDNHKGNSTLSVPKRCDADAPEDQCTVTRTYLFLHKFWFFSAAYYFGNWAFLGVFLIGLIVSCCKGKKSVIEGVDEDSDISDDEPSVYSA

SEQ ID NO: 198071 - DNA, 1623 bp, Artificial Sequence
  derived and/or modified sequence
atggctacaagcggagcagccagtgctgaactcgtgatcggctggtgcatcttcggcctgctgctcttggcgatacttgctttctgttggatttatgttaggaaataccagagtcggagagaaagcgaggtcgtgtccacaattaccgcaatcttttcgttggccatcgctcttattacatccgccttgctgcctgtggacattttcctggtgtcttatatgaagaatcagaacggtacgttcaaggattgggcaaatgccaacgtgtcacgacagatcgaggacactgttttgtacggctactacaccctctacagcgttattttgttttgcgtgttcttctggatcccatttgtttacttctattacgaagagaaagatgacgacgacactagcaaatgcacgcaaatcaagaccgcactcaaatacaccctggggttcgtagttatctgcgccctgttattactggtaggagcctttgtcccccttaatgtgcccaataataagaattctaccgaatgggaaaaagtgaagagtctttttgaggagttgggcagttcccacgggctcgccgccctctccttttcaatttcatcattaactttgattggaatgctggccgctatcacttatacagcttacggaatgagcgctttaccactcaacctgatcaagggcacccgaagtgcagcctatgaaaggctcgaaaataccgaggatatagaggaagtagagcaacacattcagacaatcaagtccaagagtaaagacggccgccctttgcctgcccgcgacaaacgggccctgaagcagttcgaagaacggctaaggaccttgaaaaagcgcgaaagacacctggagttcattgagaattcttggtggacaaagttctgtggagccttgcggccgttgaaaatcgtttggggtatcttttttatcctggtggccctgctcttcgttattagtctcttcctgtccaatttggataaggcactgcactccgccgggatcgattctggattcattattttcggcgccaatctcagcaacccattaaatatgttgctgccactcctacaaaccgttttccccctcgattacatactcatcaccattataatcatgtatttcatcttcacatcaatggcaggtattcgcaacatagggatctggttcttctggatacgcttgtacaaaatacgacgagggagaaccaggccccaagccctgctcttcctgtgcatgatcctgctcctaatcgtcctccacacttcttacatgatttactctctggccccacagtacgtcatgtatggcagccagaactatctgatagagaccaacatcacctcggacaaccacaaaggtaactcaaccttgagcgtgcccaaacggtgtgacgccgacgccccagaagaccagtgcacagtgacacggacgtacttgttcctacacaagttttggttcttctcggctgcttattattttggtaattgggcttttctgggagtgtttttgatcggtttgattgtctcttgttgtaaaggaaagaaaagtgtcattgaaggagtggacgaagatagtgatatctctgacgatgaaccctcagtttactccgcgtag

SEQ ID NO: 198072 - DNA, 1623 bp, Artificial Sequence
  derived and/or modified sequence
atggccaccagcggggccgccagcgctgagctggtgattggctggtgcatcttcggcctgctgctgctggccatcctggccttctgctggatctacgtgaggaagtaccagagcagaagagagagcgaggtggtgtccaccatcacagccatcttcagcctggccatcgccctgatcaccagcgccctgctgcctgtggacatcttcctggtgtcctacatgaagaaccagaatggcaccttcaaggactgggccaatgccaacgtgtcccggcagatcgaggacacagtgctgtatggctactacaccctgtacagcgtcatcctcttctgtgtgttcttctggatcccctttgtgtacttctactatgaggagaaggatgatgatgacaccagcaagtgcacccagatcaagacagccctgaagtacaccctgggctttgtggtgatctgtgccctgctgctgctggtgggcgcctttgtgcccctgaatgtgcccaacaacaagaacagcacagagtgggagaaggtgaagagcctgtttgaggagctgggcagcagccacggcctggccgccctgtccttcagcatcagcagcctgaccctgattggcatgctggccgccatcacctacacagcctacggcatgtctgccctgcccctgaacctgatcaagggcaccaggtctgctgcctatgaaaggctggagaacacagaagatattgaggaggtggagcagcacatccagaccatcaagagcaagagcaaggatggccggcccctgcctgcccgggacaagagggccctgaagcagtttgaggagcggctgcggaccctgaagaagcgggagcggcacctggagttcatcgagaacagctggtggaccaagttctgtggggccctgcggcccctgaagatcgtgtggggcatcttcttcatcctggtggccctgctgtttgtgatcagcctcttcctgagcaacctggacaaggccctgcacagcgctggcattgattctggcttcatcatctttggagccaacctgagcaaccccctgaacatgctgctgcccctgctgcagacagtgttccccctggactacatcctgatcaccatcatcatcatgtacttcatcttcacctccatggccggcatccggaacatcggcatctggttcttctggatccggctgtacaagatcagaagaggccgcacccggccccaggccctgctcttcctgtgcatgatcctgctgctgattgtgctgcacaccagctacatgatctacagcctggccccccagtatgtgatgtatggcagccagaactacctgattgagaccaacatcaccagtgacaaccacaagggcaacagcaccctgtctgtgcccaagagatgtgatgctgatgcccctgaggaccagtgcaccgtgaccaggacctacctgttcctgcacaagttctggttcttctctgctgcctactacttcggcaactgggccttcctgggcgtcttcctgattggcctcatcgtgtcctgctgcaagggcaagaagtctgtgattgaaggagtggatgaggacagcgacatcagtgatgatgagcccagcgtgtacagcgcctag

SEQ ID NO: 198073 - DNA, 2099 bp, Artificial Sequence
  derived and/or modified sequence
gtactgcattcatgaagtaggctttgaaaattatacatcttggacaagtttttaagggatagtgggctttccttacacaactaaaataacctttacttcacataaggtttcctgctagaaactttcaaacacatacaaaaatcagagaaaatacactgggtagtaacaaacatctctttttgttctatttcaggctattttggcattctgctggatatatgttcgtaaataccaaagtcggcgggaaagtgaagttgtctccaccataacagcaattttttctctagcaattgcacttatcacatcagcacttctaccagtggatatatttttggtttcttacatgaaaaatcaaaatggtacatttaaggactgggctaatgctaatgtcagcagacagattgaggacactgtattatacggttactatactttatattctgttatattgttctgtgtgttcttctggatcccttttgtctacttctattatgaagaaaaggatgatgatgatactagtaaatgtactcaaattaaaacggcactcaagtatactttgggatttgttgtgatttgtgcactgcttcttttagttggtgcctttgttccattgaatgttcccaataacaaaaattctacagagtgggaaaaagtgaagtccctatttgaagaacttggaagtagtcatggtttagctgcattgtcattttctatcagttctctgaccttgattggaatgttggcagctataacttacacagcctatggcatgtctgcgttacctttaaatctgataaaaggcactagaagcgctgcttatgaacgtttggaaaacactgaagacattgaagaagtagaacaacacattcaaacgattaaatcaaaaagcaaagatggtcgacctttgccagcaagggataaacgcgccttaaaacaatttgaagaaaggttacgaacacttaagaagagagagaggcatttagaattcattgaaaacagctggtggacaaaattttgtggcgctctgcgtcccctgaagatcgtctggggaatatttttcatcttagttgcattgctgtttgtaatttctctcttcttgtcaaatttagataaagctcttcattcagctggaatagattctggtttcataatttttggagctaacctgagtaatccactgaatatgcttttgcctttactacaaacagttttccctcttgattatattcttataacaattattattatgtactttatttttacttcaatggcaggaattcgaaatattggcatatggttcttttggattagattatataaaatcagaagaggtagaaccaggccccaagcactcctttttctctgcatgatacttctgcttattgtccttcacactagctacatgatttatagtcttgctccccaatatgttatgtatggaagccaaaattacttaatagagactaatataacttctgataatcataaaggcaattcaaccctttctgtgccaaagagatgtgatgcagatgctcctgaagatcagtgtactgttacccggacatacctattccttcacaagttctggttcttcagtgctgcttactattttggtaactgggcctttcttggggtatttttgattggattaattgtatcctgttgtaaagggaagaaatcggttattgaaggagtagatgaagattcagacataagtgatgatgagccctctgtctattctgcttgacagccttctgtcttaaaggttttataatgctgactgaatatctgttatgcatttttaaagtattaaactaacattaggatttgctaactagctttcatcaaaaatgggagcatggctataagacaactatattttattatatgttttctgaagtaacattgtatcatagattaacattttaaattaccataatcatgctatgtaaatataagactactggctttgtgagggaatgtttgtgcaaaattttttcctctaatgtataatagtgttaaattgattaaaaatcttccagaattaatattcccttttgtcactttttgaaaacataataaatcatctgtatctgtgc

SEQ ID NO: 198074 - DNA, 2209 bp, Artificial Sequence
  derived and/or modified sequence
actgcgtccgcacgcgccccgcccctgagcagtccttgctgccccgcccccgctcggctcgccgccaggggacgctagtgggtccagtctccttggcaaccacttgctcctccccctccgcccctttaacctttagggtgcgcgggtgcagtatatctcgcgctctctcccctttccccctcccctttccccaccccgggcgctcaggttggtctggaccggaagcgaagatggcgacttctggcgcggcctcggcggagctggtgatcggctggtgcatattcggcctcttactactggctattttggcattctgctggatatatgttcgtaaataccaaagtcggcgggaaagtgaagttgtctccaccataacagcaattttttctctagcaattgcacttatcacatcagcacttctaccagtggatatatttttggtttcttacatgaaaaatcaaaatggtacatttaaggactgggctaatgctaatgtcagcagacagattgaggacactgtattatacggttactatactttatattctgttatattgttctgtgtgttcttctggatcccttttgtctacttctattatgaagaaaaggatgatgatgatactagtaaatgtactcaaattaaaacggcactcaagtatactttgggatttgttgtgatttgtgcactgcttcttttagttggtgcctttgttccattgaatgttcccaataacaaaaattctacagagtgggaaaaagtgaagtccctatttgaagaacttggaagtagtcatggtttagctgcattgtcattttctatcagttctctgaccttgattggaatgttggcagctataacttacacagcctatggcatgtctgcgttacctttaaatctgataaaaggcactagaagcgctgcttatgaacgtttggaaaacactgaagacattgaagaagtagaacaacacattcaaacgattaaatcaaaaagcaaagatggtcgacctttgccagcaagggataaacgcgccttaaaacaatttgaagaaaggttacgaacacttaagaagagagagaggcatttagaattcattgaaaacagctggtggacaaaattttgtggcgctctgcgtcccctgaagatcgtctggggaatatttttcatcttagttgcattgctgtttgtaatttctctcttcttgtcaaatttagataaagctcttcattcagctggaatagattctggtttcataatttttggagctaacctgagtaatccactgaatatgcttttgcctttactacaaacagttttccctcttgattatattcttataacaattattattatgtactttatttttacttcaatggcaggaattcgaaatattggcatatggttcttttggattagattatataaaatcagaagaggtagaaccaggccccaagcactcctttttctctgcatgatacttctgcttattgtccttcacactagctacatgatttatagtcttgctccccaatatgttatgtatggaagccaaaattacttaatagagactaatataacttctgataatcataaaggcaattcaaccctttctgtgccaaagagatgtgatgcagatgctcctgaagatcagtgtactgttacccggacatacctattccttcacaagttctggttcttcagtgctgcttactattttggtaactgggcctttcttggggtatttttgattggattaattgtatcctgttgtaaagggaagaaatcggttattgaaggagtagatgaagattcagacataagtgatgatgagccctctgtctattctgcttgacagccttctgtcttaaaggttttataatgctgactgaatatctgttatgcatttttaaagtattaaactaacattaggatttgctaactagctttcatcaaaaatgggagcatggctataagacaactatattttattatatgttttctgaagtaacattgtatcatagattaacattttaaattaccataatcatgctatgtaaatataagactactggctttgtgagggaatgtttgtgcaaaattttttcctctaatgtataatagtgttaaattgattaaaaatcttccagaattaatattcccttttgtcactttttgaaaacataataaatcatctgtatctgtgcctta

SEQ ID NO: 198075 - DNA, 1623 bp, Artificial Sequence
  derived and/or modified sequence
atggccaccagcggcgccgccagcgccgagctggtgatcggctggtgtatcttcgggctcctcctgctcgccattctagctttctgctggatctacgttcgcaaataccagtcccgacgggagtcagaggtggtctctacaatcactgcaatattctcattggccatcgccttgatcacatctgcgttacttccagttgatatcttcctggtctcttatatgaagaatcagaatggtacattcaaggattgggccaacgctaacgtatctcggcagatagaagataccgtcctgtacggctattatacactgtactccgtgattctgttctgcgtctttttctggatcccgtttgtctacttctattacgaggaaaaagacgacgacgacacgtcaaagtgcacccagatcaaaacggctcttaagtacacgttaggcttcgttgttatatgtgctctcctgttgctcgtgggcgcctttgtcccattaaacgtccctaataacaaaaactctaccgaatgggaaaaggtgaagtctctctttgaggagctggggagtagccacggactcgcggccctgtccttttcgatcagctctctgacactcattggaatgctcgctgctatcacttatacagcctacggcatgtccgccctgcctctcaacctgattaaggggaccaggtcagcggcctacgagcgcctcgagaacactgaggatattgaggaagtcgagcagcacatacagacaataaaatctaaaagcaaagatggtagaccactgcctgcgcgggacaaaagagccctgaagcagtttgaggagcgtctcaggacactgaagaagagagaacggcatctggagttcattgagaatagctggtggactaaattttgtggcgcgctccgaccactgaagatcgtgtgggggatcttcttcatacttgttgcgctcctttttgttataagcctctttctctccaatttggataaggctctccacagtgcgggcattgattctggttttatcatctttggcgctaatctgagcaatcctctgaacatgctcctccccctgctgcagaccgtgttccccctggactatatcctgatcacgatcattattatgtacttcatattcacctcaatggctggcatcagaaatatcggtatatggttcttttggatccggttgtacaaaatcagaagagggagaacgcgcccccaagcattgctgtttctttgtatgatcctgttgcttattgtcctgcatacatcctatatgatttacagtctggccccccagtacgtgatgtatggcagtcaaaactacctcatagaaaccaatataacatctgacaaccacaagggtaactccacgttgagcgtaccaaaaagatgcgacgccgatgctccggaagaccagtgcacagtgacgagaacatatctctttctgcacaaattctggtttttctctgccgcctattactttggcaattgggcgttcctgggcgtttttctgattggcctgatcgtgtcttgctgtaagggtaagaagtccgtgatcgaaggcgtggatgaggatagcgacatttctgacgacgagccctctgtctatagtgcttag

SEQ ID NO: 198076 - DNA, 1623 bp, Artificial Sequence
  derived and/or modified sequence
atggccacatcaggggcagcaagcgcagagctggtcattgggtggtgtatctttggattactccttctggccatcttagcattctgttggatctacgtcaggaagtaccagagtcggagagaatcagaggtcgtgtcaacaattaccgctatctttagccttgcaatcgccctcattacatccgctctcttgccagtggacatctttctcgtgagctatatgaagaatcaaaatggcacctttaaggactgggctaatgcgaacgtcagcaggcagattgaggacacagtactctacggttactacaccttgtattcagtgatcctgttttgcgttttcttctggatccccttcgtgtacttctattacgaggagaaggatgatgacgacactagcaaatgcactcagattaagacagccctcaagtataccctgggcttcgtggtgatatgtgccctgctccttctggtgggggctttcgtgcctttaaacgttccaaacaataaaaattcaacagaatgggagaaggttaaaagcttattcgaggagctggggagcagccatggcctggctgccttgtcattctccatttctagtcttactctcattggtatgctcgcggcaattacctacacagcatacggaatgtcagctctgcctctcaacctcatcaaggggacacgatccgcagcttacgagcgtctggaaaacactgaagacatcgaagaggtggagcagcacattcagaccattaagtccaagtcaaaagacgggcgtcctcttcctgcgagagacaaaagggcacttaaacagttcgaggagagactccgcacattgaaaaagagagagcgccacctggaattcattgagaatagctggtggactaaattctgcggggcactacgacccttgaaaattgtgtggggcatcttcttcatcctggttgcgctactgttcgtaatctccctgttcctttccaacctagacaaagcactgcactctgccggaatagactctgggtttattattttcggcgcaaatctgtccaatcctctgaatatgctgctgccactgctgcagaccgtattccccttagactacatacttatcaccatcataatcatgtatttcatcttcacaagcatggccggtattaggaacatcgggatttggttcttttggatcaggttatataagatccggagaggcagaacacgcccacaggcacttctttttctgtgtatgatcctcttgctgatcgtgctgcatacatcctatatgatatactcactggcgcctcagtacgtaatgtacgggagtcagaattatcttatcgagaccaatataacatcagataatcataaaggcaattcaacactctcagtccccaagagatgcgacgccgacgctccggaggaccagtgcacagtcacaaggacctacttatttctccacaaattctggtttttttcggcagcttattatttcgggaactgggcctttttaggtgtgttcctaataggccttatagtgtcttgttgcaaggggaagaagagcgtgatcgagggcgtagatgaagacagcgacatttccgacgatgagccatcagtgtatagtgcatag

SEQ ID NO: 198077 - DNA, 1623 bp, Artificial Sequence
  derived and/or modified sequence
atggccaccagcggcgccgccagcgccgagctggtgatcggctggtgcatcttcggcctgctgctgctggccatcctggccttctgctggatctacgtgagaaagtaccagagcagaagagagagcgaggtggtgagcaccatcaccgccatcttcagcctggccatcgccctgatcaccagcgccctgctgcccgtggacatcttcctggtgagctacatgaagaaccagaacggcaccttcaaggactgggccaacgccaacgtgagcagacagatcgaggacaccgtgctgtacggctactacaccctgtacagcgtgatcctgttctgcgtgttcttctggatccccttcgtgtacttctactacgaggagaaggacgacgacgacaccagcaagtgcacccagatcaagaccgccctgaagtacaccctgggcttcgtggtgatctgcgccctgctgctgctggtgggcgccttcgtgcccctgaacgtgcccaacaacaagaacagcaccgagtgggagaaggtgaagagcctgttcgaggagctgggcagcagccacggcctggccgccctgagcttcagcatcagcagcctgaccctgatcggcatgctggccgccatcacctacaccgcctacggcatgagcgccctgcccctgaacctgatcaagggcaccagaagcgccgcctacgagagactggagaacaccgaggacatcgaggaggtggagcagcacatccagaccatcaagagcaagagcaaggacggcagacccctgcccgccagagacaagagagccctgaagcagttcgaggagagactgagaaccctgaagaagagagagagacacctggagttcatcgagaacagctggtggaccaagttctgcggcgccctgagacccctgaagatcgtgtggggcatcttcttcatcctggtggccctgctgttcgtgatcagcctgttcctgagcaacctggacaaggccctgcacagcgccggcatcgacagcggcttcatcatcttcggcgccaacctgagcaaccccctgaacatgctgctgcccctgctgcagaccgtgttccccctggactacatcctgatcaccatcatcatcatgtacttcatcttcaccagcatggccggcatcagaaacatcggcatctggttcttctggatcagactgtacaagatcagaagaggcagaaccagaccccaggccctgctgttcctgtgcatgatcctgctgctgatcgtgctgcacaccagctacatgatctacagcctggccccccagtacgtgatgtacggcagccagaactacctgatcgagaccaacatcaccagcgacaaccacaagggcaacagcaccctgagcgtgcccaagagatgcgacgccgacgcccccgaggaccagtgcaccgtgaccagaacctacctgttcctgcacaagttctggttcttcagcgccgcctactacttcggcaactgggccttcctgggcgtgttcctgatcggcctgatcgtgagctgctgcaagggcaagaagagcgtgatcgagggcgtggacgaggacagcgacatcagcgacgacgagcccagcgtgtacagcgcctag

SEQ ID NO: 198078 - protein, 529 aa, Artificial Sequence
  derived and/or modified sequence
MEHRIVGPGPYRATRLWNETVELFRAKMPLRKHRCRFKSYEHCFTAAEAVDWLHELLRCSQNFGPEVTRKQTVQLLKKFLKNHVIEDIKGKWGEEDFEDNRHLYRFPPSSPLKPYPKKPPNQKDVIKFPEWNDLPPGTSQENIPVRPVVMNSEMWYKRHSIAIGEVPACRLVHRRQLTEANVEEIWKSMTLSYLQKILGLDSLEEVLDVKLVNSKFIIHNVYSVSKQGVVILDDKSKELPHWVLSAMKCLANWPNCSDLKQPMYLGFEKDVFKTIADYYGHLKEPLLTFHLFDAFVSVLGLLQKEKVAVEAFQICCLLLPPENRRKLQLLMRMMARICLNKEMPPLCDGFGTRTLMVQTFSRCILCSKDEVDLDELLAARLVTFLMDNYQEILKVPLALQTSIEERVAHLRRVQIKYPGADMDITLSAPSFCRQISPEEFEYQRSYGSQEPLAALLEEVITDAKLSNKEKKKKLKQFQKSYPEVYQERFPTPESAALLFPEKPKPKPQLLMWALKKPFQPFQRTRSFRM

SEQ ID NO: 198079 - DNA, 1590 bp, Artificial Sequence
  derived and/or modified sequence
atggaacatcgaatcgtcggcccaggcccatatagagcaaccagactttggaatgagactgttgaactcttccgagccaagatgccattaaggaaacaccggtgtcggttcaagagttacgaacactgtttcacagcagcggaagctgttgattggctccacgaactgctgaggtgttcacagaacttcggccctgaggtgaccaggaagcagaccgtccaactgttaaagaaattcctgaagaaccacgtgatcgaagatatcaaggggaagtggggcgaagaagactttgaggataaccggcacttgtaccgatttccaccgagctctccactgaaaccgtatccgaagaagcctcccaaccagaaggacgtgatcaagtttccagagtggaatgacttgccaccaggtacaagtcaagagaacattccggtgaggccagtagtgatgaattcggagatgtggtacaaaagacacagcatagccatcggcgaggtgcctgcatgccgattagtacatcgcaggcaacttactgaggccaacgttgaagagatctggaaatccatgacactgtcatatctccagaaaattctgggactggacagccttgaggaagtgctggatgtgaagctggtgaactcaaaattcatcatacacaatgtctactctgtgagtaaacagggtgtggttatcctggacgacaagtccaaggagttaccgcattgggtcctgtctgccatgaagtgtctcgcaaactggcctaattgttctgacctcaaacagccaatgtatttgggattcgagaaagatgtgtttaaaacaattgccgattactacgggcacctcaaagagcccctgcttactttccatctatttgacgctttcgtttcagttctgggactgctacagaaagagaaggtcgctgtagaggccttccagatttgttgccttctgctcccacctgagaatagacgaaagctgcagcttctgatgcggatgatggcccgaatctgcctgaacaaggaaatgcctccactgtgcgacggcttcggaacaaggaccctcatggttcagactttttctcgctgtatcctctgtagtaaggacgaggtggatctcgatgagcttctcgctgccagactggtcaccttcttaatggacaactatcaagaaatcctcaaggttcctctagcgcttcagacctctattgaagaacgcgtggcccacctgcgcagggtgcagatcaagtacccaggggccgatatggatattaccctaagcgcgccatctttctgcaggcaaatctcaccagaggagttcgaataccagagaagttatggttcacaggaacccctggctgctttgctggaggaggtgatcacagacgctaagttatcgaacaaagagaaaaaaaagaagctcaaacagtttcaaaaatcctaccccgaggtatatcaggagagatttcccacccctgagtctgccgccctgctgttcccggaaaagccaaagccaaagccgcagctactgatgtgggcccttaaaaaacccttccagcccttccagcgcacccgttcttttcgaatgtag

SEQ ID NO: 198080 - DNA, 1590 bp, Artificial Sequence
  derived and/or modified sequence
atggagcacagaattgtgggccctggcccctaccgggccacccggctgtggaatgagaccgtggagctgttccgggccaagatgcccctgaggaagcaccgctgccgcttcaagagctatgagcactgcttcaccgctgctgaggccgtggactggctgcacgagctgctgcgctgcagccagaactttggacctgaggtgaccaggaagcagacagtgcagctgctgaagaagttcctgaagaaccacgtgattgaggacatcaagggcaagtggggcgaggaggactttgaggacaacagacacctgtaccgcttcccccccagcagccccctgaagccctaccccaagaagccacccaaccagaaggatgtgatcaagtttcctgagtggaatgacctgcccccaggcaccagccaggagaacatccctgtgcggcctgtggtgatgaacagcgagatgtggtacaagaggcacagcatcgccatcggggaggtgcctgcctgccgcctggtgcaccggcggcagctgacagaggccaacgtggaggagatctggaagtccatgaccctgagctacctgcagaagatcctgggcctggacagcctggaggaggtgctggatgtgaagctggtgaacagcaagttcatcatccacaacgtgtacagcgtgtccaagcagggcgtggtgatcctggatgacaagagcaaggagctgccccactgggtgctgagcgccatgaagtgcctggccaactggcccaactgcagcgacctgaagcagcccatgtacctgggctttgagaaggatgtgttcaagaccatcgctgactactacggccacctgaaggagcccctgctgaccttccacctgtttgatgcctttgtgtctgtgctgggcctgctgcagaaggagaaggtggccgtggaggccttccagatctgctgcctgctgctgcccccagagaacagaaggaagctgcagctgctgatgaggatgatggcccgcatctgcctgaacaaggagatgccacccctgtgtgatggcttcggcaccaggaccctgatggtgcagaccttcagccgctgcatcctgtgcagcaaggatgaggtggacctggatgagctgctggccgcccggctggtgaccttcctgatggacaactaccaggagatcctgaaggtgcccctggccctgcagaccagcattgaggagcgggtggcccacctgcggcgggtgcagatcaagtacccaggagctgacatggacatcaccctgagcgcccccagcttctgccggcagatcagccctgaggagtttgagtaccagaggagctatggcagccaggagcccctggccgccctgctggaggaggtgatcacagatgccaagctgagcaacaaggagaagaagaagaagctgaagcagttccagaagagctacccagaggtgtaccaggagcgcttccccaccccagagagcgctgccctgctcttccctgagaagcccaagcccaagccccagctgctgatgtgggccctgaagaagcccttccagcccttccagaggaccaggagcttcaggatgtag

SEQ ID NO: 198081 - DNA, 1590 bp, Artificial Sequence
  derived and/or modified sequence
atggagcaccggatcgtgggccccggcccctaccgggccacccggctgtggaacgaaacagtcgaactgtttagagcaaagatgcctcttagaaagcatcggtgtcgatttaagagttacgagcattgtttcacagcagcagaagccgtggactggctgcatgagctgctgcgttgtagtcagaactttggacctgaagtcacccgtaagcagactgtccaactgttgaagaaattcttaaagaaccatgtgatcgaggatattaaaggcaaatggggggaagaggactttgaggacaaccgccacttatacagattccccccctcatcaccactgaagccataccctaaaaaaccgcctaatcagaaagacgtgattaaattccccgaatggaacgacctcccccccggaacctcccaggagaatattcctgtcaggccggtcgtgatgaatagtgagatgtggtataaacggcactccatcgcaattggagaggttccagcctgtaggctagtgcacaggagacagctgaccgaggcaaacgttgaggagatctggaagtccatgactctatcctacctgcagaagattctaggcctggattccttggaagaagtgcttgacgtgaaactagtaaatagcaaattcataattcataatgtctacagcgtgtccaaacagggcgttgtcattttagatgataagtctaaagaattgcctcactgggtcctttccgccatgaagtgcttagcaaactggcctaattgttccgatttgaaacagcctatgtatctagggtttgagaaagatgtgtttaagactatcgctgactattacggacacctcaaggagcccctgctaacctttcacctgttcgacgcttttgtctctgtgctaggattgcttcaaaaagagaaggtggccgttgaagcctttcaaatttgttgcctcctacttccccccgagaaccgtcggaaactccagttgctgatgcgcatgatggcgcggatctgtttaaataaggaaatgcctccgctatgcgacggattcgggacgcgaactctaatggtgcagacttttagtagatgtatcctgtgtagcaaagacgaagtggatctggacgaattgctcgcagctcgacttgtgacattcctgatggataactatcaagagatacttaaagtgcccttggcgctacagaccagcatcgaggagcgcgttgctcacttacgtcgtgtgcaaatcaaatatccaggcgcagatatggatataaccctatcagcacccagcttctgcagacagattagcccagaggaatttgaataccagaggagttacggatcccaggagccccttgccgccttattggaagaggtgatcacagatgctaaactgtccaataaggaaaagaagaagaagctgaaacaattccagaagtcgtatcccgaagtgtatcaagaacgattccctacccccgaatcagcagcgttgctgtttcccgaaaaaccaaagcctaaaccccagttactgatgtgggcacttaaaaaacctttccagccctttcagcgcacccggtcctttcggatgtag

SEQ ID NO: 198082 - DNA, 1590 bp, Artificial Sequence
  derived and/or modified sequence
atggagcatcgtattgtcggacctggaccttacagagctacaagactttggaacgagactgtggagctgtttagagcaaagatgccactcaggaagcaccggtgtcgatttaagtcctacgagcactgttttaccgccgctgaggctgtcgactggttgcatgagttactgaggtgcagtcagaattttggtcccgaggtcacacgtaagcagacagtccaactgctcaagaaatttcttaagaaccatgtgattgaagatatcaaaggcaagtggggtgaagaagattttgaggataacaggcacctatacagatttcccccttctagccccttaaaaccttatcctaaaaagcctcccaaccaaaaagatgtcataaaattccccgagtggaatgatcttccgccaggcacaagtcaggagaacatacctgtgcggccagttgtgatgaacagcgaaatgtggtacaagcggcatagtatagcaatcggcgaagtgcctgcatgccggctggtccaccgcaggcagctgaccgaagcaaatgtggaggagatctggaaaagcatgacactgtcatatctccagaagatcctgggactggatagtctggaggaggttctggacgtaaaactggtgaattctaagttcatcatccacaatgtatactccgtcagcaagcagggagttgttattctggacgataagagcaaagaacttcctcactgggtgctgtctgccatgaagtgccttgcaaattggccgaattgttctgacctcaagcagcctatgtatcttggtttcgaaaaggacgtgttcaaaacgatagccgactattatggacaccttaaggagccacttctcacattccatctatttgatgcctttgtctctgtgctggggctgcttcagaaggagaaggtggctgtggaagccttccaaatttgttgcctgctcctgccgccagagaacaggagaaagctgcagctgttgatgcggatgatggcccgaatttgtttgaacaaggagatgccaccgctctgtgatggattcggaaccaggacacttatggttcaaactttttcccggtgcatcctctgcagcaaggatgaagtcgatttagacgaactgcttgctgcaagactggtgacttttcttatggataactaccaggaaatcctgaaagtgccactggccctgcaaacatcaattgaggagagggtggcacacctgaggcgcgtacagatcaaatatcccggtgcagatatggatatcaccctgtccgccccttcattttgccggcagatctctccagaggagtttgagtaccagagatcatatgggagtcaggaacctctggcggctctcctggaagaggtgattactgacgcaaagctgagcaacaaggagaagaagaaaaagctgaagcagttccaaaaatcctaccctgaggtataccaggagcgattccccacgcctgagtccgccgcacttttattccctgaaaaaccaaaacccaagccccagctcctgatgtgggcgctgaagaaaccgtttcagcccttccagaggacccgtagcttccgcatgtag

SEQ ID NO: 198083 - DNA, 1590 bp, Artificial Sequence
  derived and/or modified sequence
atggagcacagaatcgtgggccccggcccctacagagccaccagactgtggaacgagaccgtggagctgttcagagccaagatgcccctgagaaagcacagatgcagattcaagagctacgagcactgcttcaccgccgccgaggccgtggactggctgcacgagctgctgagatgcagccagaacttcggccccgaggtgaccagaaagcagaccgtgcagctgctgaagaagttcctgaagaaccacgtgatcgaggacatcaagggcaagtggggcgaggaggacttcgaggacaacagacacctgtacagattcccccccagcagccccctgaagccctaccccaagaagccccccaaccagaaggacgtgatcaagttccccgagtggaacgacctgccccccggcaccagccaggagaacatccccgtgagacccgtggtgatgaacagcgagatgtggtacaagagacacagcatcgccatcggcgaggtgcccgcctgcagactggtgcacagaagacagctgaccgaggccaacgtggaggagatctggaagagcatgaccctgagctacctgcagaagatcctgggcctggacagcctggaggaggtgctggacgtgaagctggtgaacagcaagttcatcatccacaacgtgtacagcgtgagcaagcagggcgtggtgatcctggacgacaagagcaaggagctgccccactgggtgctgagcgccatgaagtgcctggccaactggcccaactgcagcgacctgaagcagcccatgtacctgggcttcgagaaggacgtgttcaagaccatcgccgactactacggccacctgaaggagcccctgctgaccttccacctgttcgacgccttcgtgagcgtgctgggcctgctgcagaaggagaaggtggccgtggaggccttccagatctgctgcctgctgctgccccccgagaacagaagaaagctgcagctgctgatgagaatgatggccagaatctgcctgaacaaggagatgccccccctgtgcgacggcttcggcaccagaaccctgatggtgcagaccttcagcagatgcatcctgtgcagcaaggacgaggtggacctggacgagctgctggccgccagactggtgaccttcctgatggacaactaccaggagatcctgaaggtgcccctggccctgcagaccagcatcgaggagagagtggcccacctgagaagagtgcagatcaagtaccccggcgccgacatggacatcaccctgagcgcccccagcttctgcagacagatcagccccgaggagttcgagtaccagagaagctacggcagccaggagcccctggccgccctgctggaggaggtgatcaccgacgccaagctgagcaacaaggagaagaagaagaagctgaagcagttccagaagagctaccccgaggtgtaccaggagagattccccacccccgagagcgccgccctgctgttccccgagaagcccaagcccaagccccagctgctgatgtgggccctgaagaagcccttccagcccttccagagaaccagaagcttcagaatgtag

SEQ ID NO: 198084 - DNA, 2499 bp, Artificial Sequence
  derived and/or modified sequence
aaactgctgctcctccggctggcggggatcagcgctggcgcggctgcggccgctgctgcctacgcgccatggagcatcgcatcgtggggcccgggccgtaccgagctaccaggctgtggaatgagaccgtggagctttttcgtgctaagatgccgttacggaaacatcgctgtcgtttcaagagctatgagcattgtttcacagcggccgaagctgtggattggctgcatgagctgctgaggtgcagtcaaaacttcggccctgaagtgacccgcaaacaaacggtccagctgctaaaaaaattcctgaagaatcacgttattgaagacatcaagggaaaatggggtgaggaagattttgaagacaatcgtcacttatacagatttcctccttcttcacccctgaaaccatatccaaagaagcccccaaaccaaaaggatgttattaaatttccagaatggaatgatctcccaccaggcacttcacaagagaacatcccagtgaggccagttgtgatgaattctgagatgtggtacaagcgtcacagtattgcaattggagaggtgccagcttgccgtcttgtccaccgcagacagctgacagaggccaatgtagaagagatatggaagtctatgacattatcatacttacagaaaattcttggcctggattccttagaagaagttttagacgtcaaacttgtcaattcgaagttcatcatccataatgtatatagtgttagcaagcagggagttgttattcttgatgacaagtcaaaagaacttcctcattgggtgctgtcagctatgaagtgtttggcaaattggcccaactgttctgatttgaagcagcctatgtacttgggatttgaaaaagatgtctttaaaaccatagctgattactatggtcacttgaaagagcctctacttacatttcatctttttgatgcttttgtcagtgtactgggtttgttacagaaggagaaagtggcagttgaagcatttcagatttgctgccttctcctacctcctgaaaataggagaaagttacagctattgatgaggatgatggcaaggatttgcttaaacaaagagatgccacccctgtgtgatggctttggtacccgaacactgatggttcagacattttcccgttgcatcttgtgttccaaggatgaagtggacttggatgagttattagctgctagattggtaacgtttctgatggacaattaccaggaaattctgaaagtccctttggccttgcagacctctatagaggagcgtgtggctcatctacgaagagtccagataaaatacccaggagctgatatggatatcactttatctgctccatcattttgccgtcaaattagtccagaggaatttgaatatcaaagatcatatggctctcaggaacctctggcagccttgttggaggaagtcataacagatgccaaactctccaacaaagagaaaaagaagaaactgaagcagtttcagaaatcctatcctgaagtctatcaagaacgatttcctacaccagaaagtgcagcacttctgtttcctgaaaaacccaaaccgaaaccacagctgctaatgtgggcactaaagaagcctttccaaccatttcaaagaactagaagttttcgaatgtaataatacttccacagcaacaggtgctagagaccactgttgttgttttgagtgaatggtggttaggagaaagactttggtggtggaagaaagaaaagcataaaacaaagactactgaaatatagataaagattgccttagtttttaaaaatgtttggccattagtatttttataaaactcaatgctagttttaaagtgtataaattggttaaaatttatgagtcaaatatatagtgataatgttaacatgtttgtaattgctacagaatttaagggtatttttatctctgtgctttctttttcatggtgtttattaaataattgtgtatatacatcctagctactgatatctttattatagccttaagacttaattttaagtcttaaaaatagcgtgtatacttgaataagaaagacactgggtactgttactgtgatgctattgacttagtagccaattatcatttctcctgtataaattccagtttttattgctgcacataaattttttaatgtcttatattgtgatagctatgtcttttattgcagatttattggatgttatgacagattttactaaagctagtgtttttataacatatatattagttgatgtttacctataagtggagtagattttcatctgcctgcaatggtataatttcagtcttagctaaaaatggaaagttgaactggataaattctttgggtacccttagacctctgattctaagtcaaatgcaaatgggttaaataaaatgagactacttcctttataaatatattttcatccttttgaaagtaagtgaaatgtaaataaacttattttttttaaaaatgcca

SEQ ID NO: 198085 - protein, 238 aa, Artificial Sequence
  derived and/or modified sequence
MLCFLRGMAFVPFLLVTWSSAAFIISYVVAVLSGHVNPFLPYISDTGTTPPESGIFGFMINFSAFLGAATMYTRYKIVQKQNQTCYFSTPVFNLVSLVLGLVGCFGMGIVANFQELAVPVVHDGGALLAFVCGVVYTLLQSIISYKSCPQWNSLSTCHIRMVISAVSCAAVIPMIVCASLISITKLEWNPREKDYVYHVVSAICEWTVAFGFIFYFLTFIQDFQSVTLRISTEINGDI

SEQ ID NO: 198086 - DNA, 717 bp, Artificial Sequence
  derived and/or modified sequence
atgttatgtttcctgcgcggaatggccttcgtcccatttctcctggtgacgtggagctcggccgcgtttattatctcctacgttgtggcagtgctgtccggacatgtcaatccctttctgccttatatctccgatacaggcaccactccacctgagagtggaatatttggctttatgatcaatttcagtgcctttttgggggcagccaccatgtatacacgctataaaattgtgcagaaacagaaccagacttgttatttctccacacctgtgtttaaccttgtgagcctagtgctcgggctggtggggtgcttcggtatgggcattgttgcaaattttcaagaactagcagtgccagtcgtccatgatggcggagccctgctggcctttgtttgcggcgtggtgtacactctgcttcagtccattatttcgtacaagtcttgcccacagtggaattcactctcaacctgccatatcaggatggtgattagcgcggtgtcctgcgccgctgttattcccatgattgtgtgtgcatcgctcatctccatcactaagctagagtggaatccgcgtgaaaaagactatgtgtaccatgtggtgtctgcgatctgcgaatggaccgttgcttttggatttattttttacttcctcaccttcatccaagatttccagtctgtgacgctgcgtatcagcaccgagatcaacggggacatctag

SEQ ID NO: 198087 - DNA, 717 bp, Artificial Sequence
  derived and/or modified sequence
atgctgtgcttcctgcggggcatggcctttgtgcccttcctgctggtgacctggagcagcgctgccttcatcatctcctatgtggtggccgtgctgagcggccacgtgaaccccttcctgccctacatcagtgacaccggcaccaccccacctgagagcggcatcttcggcttcatgatcaacttcagcgccttcctgggcgccgccaccatgtacacccgctacaagatcgtgcagaagcagaaccagacctgctacttcagcacccctgtgttcaacctggtgtccctggtgctgggcctggtgggctgcttcggcatgggcatcgtggccaacttccaggagctggccgtgcctgtggtgcatgatggaggagccctgctggcctttgtgtgtggggtggtgtacaccctgctgcagagcatcatctcctacaagagctgcccccagtggaacagcctgagcacctgccacatccgcatggtgatctctgctgtgtcctgtgccgccgtcatccccatgattgtgtgtgccagcctcatcagcatcaccaagctggagtggaacccccgggagaaggactatgtgtaccacgtggtgtctgccatctgtgagtggacagtggccttcggcttcatcttctacttcctgaccttcatccaggacttccagagcgtgaccctgcgcatcagcacagagatcaatggagacatctag

SEQ ID NO: 198088 - DNA, 717 bp, Artificial Sequence
  derived and/or modified sequence
atgctgtgcttcctgcggggcatggccttcgtgcccttcctgctggtgacctggtcatccgccgccttcatcatcagttacgttgtggccgtgctgagtggacacgtgaacccattcctcccctatatcagcgataccggcaccactccgcctgaaagtgggatatttggatttatgatcaatttcagcgcctttttgggcgccgctacgatgtatacacgctataagattgtgcagaaacagaaccagacatgttacttcagtactcccgtgtttaacctggtttctctcgttcttgggctggttgggtgctttggaatgggcattgtggcaaactttcaggagctggcagtgccagtcgtgcacgatgggggagccctgttggctttcgtgtgtggcgtggtctatacactacttcaaagtattatctcttataagagctgtccccagtggaatagcctgtccacatgtcacattagaatggtgatatctgcggtgtcgtgcgctgctgtgattcctatgattgtgtgtgcctccctgatttcaataaccaagctcgaatggaaccctcgagagaaagactacgtgtatcacgttgtgtctgctatttgcgaatggactgtggcttttgggttcatcttttactttttgaccttcattcaggactttcagtcagtcaccctgagaattagcacggaaattaatggggatatctag

SEQ ID NO: 198089 - DNA, 717 bp, Artificial Sequence
  derived and/or modified sequence
atgctgtgctttctcaggggcatggcctttgttccgttcttgttagtcacgtggagctcagcggctttcatcataagctacgtcgtggccgtgctgtcaggtcacgtcaatccttttcttccttacattagcgacaccggaaccacacctccggagtctggtatttttgggttcatgattaatttcagcgcatttctgggcgctgccacaatgtacactcgctacaaaatcgtgcagaagcagaaccagacatgttacttctccactccagtgttcaacttggtgagtctcgttctcggtttggtagggtgcttcgggatgggcatcgttgccaattttcaggaactggctgtgccagtggttcacgacggaggcgctctgctggcattcgtatgcggcgtcgtatacacccttctgcagagtataataagctataagtcatgcccccagtggaactccctctcaacctgccacataaggatggtcatcagtgccgtatcctgcgctgcagttatcccgatgattgtgtgtgccagcctgattagcatcactaagctcgaatggaaccccagagaaaaagactacgtttatcacgtggttagcgctatttgtgagtggacggtggccttcgggtttattttttactttctgaccttcatacaggacttccaaagcgtgactctgcgcataagtaccgagattaacggggatatctag

SEQ ID NO: 198090 - DNA, 717 bp, Artificial Sequence
  derived and/or modified sequence
atgctgtgcttcctgagaggcatggccttcgtgcccttcctgctggtgacctggagcagcgccgccttcatcatcagctacgtggtggccgtgctgagcggccacgtgaaccccttcctgccctacatcagcgacaccggcaccaccccccccgagagcggcatcttcggcttcatgatcaacttcagcgccttcctgggcgccgccaccatgtacaccagatacaagatcgtgcagaagcagaaccagacctgctacttcagcacccccgtgttcaacctggtgagcctggtgctgggcctggtgggctgcttcggcatgggcatcgtggccaacttccaggagctggccgtgcccgtggtgcacgacggcggcgccctgctggccttcgtgtgcggcgtggtgtacaccctgctgcagagcatcatcagctacaagagctgcccccagtggaacagcctgagcacctgccacatcagaatggtgatcagcgccgtgagctgcgccgccgtgatccccatgatcgtgtgcgccagcctgatcagcatcaccaagctggagtggaaccccagagagaaggactacgtgtaccacgtggtgagcgccatctgcgagtggaccgtggccttcggcttcatcttctacttcctgaccttcatccaggacttccagagcgtgaccctgagaatcagcaccgagatcaacggcgacatctag

SEQ ID NO: 198091 - DNA, 3519 bp, Artificial Sequence
  derived and/or modified sequence
gggaaggccagagcgggcgtccccgccagtgaccccacgccgcccgtccgcgcccaacccggcctccgccgagtgtccaaaccaaaagcgaaaggaacccgaccccgcgtcccctccggcggctccgtagtcgcgtccgcttggagctcgccgggcgcctccgaccctgccgggccgctttgtgacttcactcgtttcgcaacaagcccgggcagcccgcgccccacccactctggcccggcagcctcgccgcccgcagcctcgctccgctcctcgcgcttcccctccctccggggctgggcctgccccggccgtcgcggagcctcccctcccaccgtccgtgagtgtacgcgcccggccgccgcctccaggcagcccggagcaacccggcgcccggccccgctgggcgcagcactccgtcggcggcggcggcggcgcgatgctgtgcttcctgaggggaatggctttcgtccccttcctcttggtgacctggtcgtcagccgccttcattatctcctacgtggtcgccgtgctctccgggcacgtcaaccccttcctcccgtatatcagtgatacgggaacaacacctccagagagtggtatttttggatttatgataaacttctctgcatttcttggtgcagccacgatgtatacaagatacaaaatagtacagaagcaaaatcaaacctgctatttcagcactcctgtttttaacttggtgtctttagtgcttggattggtgggatgtttcggaatgggcattgtcgccaattttcaggagttagctgtgccagtggttcatgacgggggcgctcttttggcctttgtctgtggtgtcgtgtacacgctcctacagtccatcatctcttacaaatcatgtccccagtggaacagtctctcgacatgccacatacggatggtcatctctgccgtttcttgcgcagctgtcatccccatgattgtctgtgcttcactaatttccataaccaagctggagtggaatccaagagaaaaggattatgtatatcacgtagtgagtgcgatctgtgaatggacagtggcctttggttttattttctacttcctaactttcatccaagatttccagagtgtcaccctaaggatatccacagaaatcaatggtgatatttgaagaaagaagaattcagtctcactcagtgaatgtcgcaggccatttctaaaagtgctacagaggacagacagggttttgaggccaccctgattattgggatgcatctgcagcacatccaggacttgaatttcattacgagttcctaatagttgtatttctaaagatgtgtttcctagagaatgtacagccttatgacactgtagtgatgtttttataattttctaagtagatttttttatattaacaaattcatatacagaaaaaataaggtgttacaaaaaatggagagctcttatttttgtacagattctgtcgtttttgttttatttgtgtgagatttatggaaatacactaaatgagtaattcaggttcagtacatttattacaaagtgaaatcaggggatattcatttgtaaattttattcttagtgaatgaactgtataattttttttatcaggagagcacttataaaattcaatttataaagatcatatacccaaatcataaagatttagttgatacattaacactaagatactctgatttttagccgaactaaacaaagtgcttctactgagaggcctttataccaccatgtacagtaactctaagtgaatacggaagaccttggttttgaaattctgccaccttgtttctccctgctcatgaggtcgcaccttttgctcttgctgctaattgcccattcgtagtgggtgtaatgccaggtggaatggtttcaacaagtcaggtgaaaaccatcctttattgttgctggcacaacttgatatatagtctgactcagaactgaagctcacatctcaaattcatttcatgccagtaaatgtggcaaagagaagaaaggcccaagagcgagacaagaagaatggagaagggggcagccaagaagaacttctgggttcagggtactgtttatttgctccttctcttcatgcctgtggctggatgtcccacaacactataagaaatataagtcaagccctttgtgttaagcaagaactacagactccatcttttcacccaaatcatgaatgaccaataaaaagcaagttattccagaggaagaagcagcccttgaaatgttaaggcttaggcttgaaaggtgaagagcaggaattctctctttcaaatcctagagcataaacccatgtgtggccaagtgagatcagccctcaagggcacatgccaagggcagagcagcccatgtagacagcttcggagggcatgggggtgtagggagttcggggtagctcctcattaactatttgttgggtgagtaaaggggtgaggctcagtggcaggtacctctgcaatgacaagctgcctcccctctatgtgtttagcatatgttattagaacatgtccgacacccctaccgctgccatttgggccctttaataaagccaagtagagaaatctggcaataaaaggcaaatgtaagcatgctttctttaagacgcatcataaatggttttctttaagtgaatggaagagtttgacagagatacacctttgtaagaaaacattaagaatgctggctggctgtggtggctcacacctgtattcccagcactttgggaggcctaggcaggaggattgcttgagcctgggacttcgagaccagactgggaaacatggcaaaatcccatctctacaacaaaaatacaaaaattagccaagtgcggtggtgtgcctgtagtcctagttacttgggaggctgaggtgggagaatcacctgagcccaggaggtggaggctgcagtgagccatgccaatgcactccagtctgggcaacagagtgagaccctgtctcaaaaataaataaataaataaatgaataaagagaatgctaatcatttctgggttcactgcgactcactgtagtgctggggatcccccttgtaacactggaactgaaagacagtgatgaaagctatgtcaagcattcattattctgaagaggaggagaaatgccacatacctttcccatgggacctgtggtggaatgaatccatacttctgcctcacttcgagcagacttttgttctcggcgctcctcacgatggagtttcatgcttcattttcacatctctctgcacaattagattgggagctccttgagggcagagtacgtgccttaatctttatctttgtaatgccacaatgaacagagtgcctcctggtacactgtaggagcttaagaaatactcactgaatgcatgaatgaatgaatgaacaaatgaaggaatgactaaggatgtttgtagtgctataatatagaatgggatttactctgctttaccagttagtttcataataaacaaatagtctgtatcgcctggtaa

SEQ ID NO: 198092 - protein, 145 aa, Artificial Sequence
  derived and/or modified sequence
MNGRVDYLVTEEEINLTRGPSGLGFNIVGGTDQQYVSNDSGIYVSRIKENGAAALDGRLQEGDKILSVNGQDLKNLLHQDAVDLFRNAGYAVSLRVQHRLQVQNGPIGHRGEGDPSGIPIFMVLVPVFALTMVAAWAFMRYRQQL

SEQ ID NO: 198093 - DNA, 438 bp, Artificial Sequence
  derived and/or modified sequence
atgaacggcagagtggactacctggtgaccgaggaggagatcaacctgaccagaggccccagcggcctgggcttcaacatcgtgggcggcaccgaccagcagtacgtgagcaacgacagcggcatctacgtgagcagaatcaaggagaacggcgccgccgccctggacggcagactgcaggagggcgacaagatcctgagcgtgaacggccaggacctgaagaacctgctgcaccaggacgccgtggacctgttcagaaacgccggctacgccgtgagcctgagagtgcagcacagactgcaggtgcagaacggccccatcggccacagaggcgagggcgaccccagcggcatccccatcttcatggtgctggtgcccgtgttcgccctgaccatggtggccgcctgggccttcatgagatacagacagcagctgtag

SEQ ID NO: 198094 - DNA, 438 bp, Artificial Sequence
  derived and/or modified sequence
atgaatggcagggtggactacctcgtgacagaagaagaaattaatcttacccgtggccccagcgggttaggtttcaacatcgttggaggcacagatcagcagtacgtgtccaacgactccgggatctatgtcagtaggataaaggaaaacggggcagctgccttggatggcagactgcaggagggcgacaaaatcttaagcgtcaatgggcaggatctgaagaacttactgcaccaggatgctgtggacttattccgcaatgccggatatgccgtaagcctccgcgtgcagcatcgcctgcaggttcaaaacggacctattggccataggggagaaggggacccttcaggcattcccatcttcatggttctggtcccagtttttgccttaaccatggtggccgcatgggccttcatgcgataccgccagcagttgtag

SEQ ID NO: 198095 - DNA, 438 bp, Artificial Sequence
  derived and/or modified sequence
atgaatggccgggtggactacctggtgacagaggaggagatcaacctgacccggggccccagcggcctgggcttcaacatcgtgggcggcacagaccagcagtatgtgtccaatgacagcggcatctacgtgagccgcatcaaggaaaatggagctgctgccctggatggccgcctgcaggagggggacaagatcctgtctgtgaatggccaggacctgaagaacctgctgcaccaggatgctgtggacctcttcagaaatgccggctatgctgtgtccctgcgggtgcagcaccggctgcaggtgcagaatggccccatcggccacagaggagagggggaccccagcggcatccccatcttcatggtgctggtgcctgtgtttgccctgaccatggtggccgcctgggccttcatgagataccggcagcagctgtag

SEQ ID NO: 198096 - DNA, 438 bp, Artificial Sequence
  derived and/or modified sequence
atgaacggccgggtggactacctggtgaccgaggaggagatcaaccttacccgcgggccttcgggcctcggttttaatatagtggggggaaccgatcagcagtatgtctctaatgatagtggaatctacgtcagcaggatcaaagaaaatggggccgccgcattagatgggaggcttcaggagggcgacaagatcctttcggttaacggtcaggacctcaaaaatctcctccatcaagacgccgtggatctgtttcgaaacgcaggttatgccgtatcgctgagggtgcaacaccggcttcaggtgcagaatgggcctatcggccatcgcggcgagggcgacccctccggtattccaatcttcatggttttggtgccagtctttgctctgaccatggtggcagcttgggccttcatgcggtaccgtcagcagttgtag

SEQ ID NO: 198097 - DNA, 438 bp, Artificial Sequence
  derived and/or modified sequence
atgaatggacgagtggactatctggtgacagaagaagagatcaacttgacccgcggtccaagtggattaggcttcaatatcgtagggggaaccgatcagcagtacgtgagtaatgattcaggcatctatgtgtcgcgcattaaagagaacggtgccgctgccctggacggacgtctgcaggaaggcgacaaaatcctttcagtgaacggacaggacctgaaaaacctgcttcaccaggatgcggtagacctgtttcggaatgctggctacgctgtgtccctgagggttcagcatcgcctccaggtacagaatggcccaataggccacaggggcgaaggggacccatctggaataccgatattcatggttctagtgcctgtcttcgccttgacaatggtcgctgcgtgggcttttatgaggtataggcagcagctgtag

SEQ ID NO: 198098 - DNA, 2080 bp, Artificial Sequence
  derived and/or modified sequence
gggcgcagcgccgagattgattcaccttcacctgtgctgcactccagctgacccaagtaggaagccagacgagctgtaaaacatgaacggaagagtggattatttggtcactgaggaagagatcaatcttaccagagggccctcagggctgggcttcaacatcgtcggtgggacagatcagcagtatgtctccaacgacagtggcatctacgtcagccgcatcaaagaaaatggggctgcggccctggatgggcggctccaggagggtgataagatcctttcggtaaatggccaagacctaaagaacctgctgcaccaggatgctgtagacctctttcgtaatgcaggctatgctgtgtctctgagagtgcagcacaggttacaggtgcagaatggacctataggacatcgaggtgaaggggacccaagtggtattcccatatttatggtgctggtgccagtgtttgccctcaccatggtagcagcctgggctttcatgagataccggcaacaactttgaaaaacttgctctctttcaatactcccaatgaagatacatttcactcaccctccacccctgctattctgccatgtctttccctctctctgcatagccagatttgaagtgactgatacccaccccaaaccttgctgttcacagtctccaattcttcatattctaatgggaaagtaaaggtattgtttgaaggaaaactgaagaaaagacttggcttagaacaaatgaggagttatatattttactaggacttttgatagaaattcagctacaacccaaagagagaaagattgagtcttcctgtcaccataggcaataccttttttcttagctggcatgccataaaggccagctatgtgatattagaggaagaaaggatttttctttttaatgatcttccttgggaaattattgtggcctttatttaatttctaactacgtacctgggtgcctatatcgacaaagagtgagaagagcatttttacttttttaaaaaagcaaatacatatatacacatacgtatgcaaatattatagtataatagtgatccctatggagaattaaaggtgagaaagctactttgtggtgtctaggtttctgataaaagggatgatcttaactgaagaatttaaagagatacttaaacagagcaaatgtagtaggaacaagggagtgagccttataagaggacgttcagtctcatttattaaaataataactgagactgggagaggtggctcatgcctgtaaatcccagcactttggtagcctgaagtgggagattgcttgagtccaggagaccagcctgggcaacatagcaaaacctcatctctatttaaaaaaaaaatagaaaaaaatgtaataactgaagcaactaattaaaaatcttagaagaacaatatttattcttataacagccaactatggtgagttattataaggtaaattgccataatccagcgctgctcacatctaaaaaactttgaggtgtaaaggtaaatcgtaccaatctctgggctgccctagtgacttttttgatacctcagagtcctattgaagaaccaggtggaatgattgtggtaagggctatagtgctggagccaaacaccccagcaagaaaactctaaaaggacaaaagataaggtagtgcctccaaggtggcacctgaaccctctcaggctactttttggtttctactaacaaacctgagggaaggaactgcctccctggcaggatgggcatcaaatcaactctggcttcagatttagttaaaatgaggccgggtgcagcggctcacacctgtcatctcagcactttgggaggccgaggcaggcagatcacaaggtcaggagttcaagaccagcctggccaacatggtgaaaccccatgtctactgaaaatacaaaaattacctggacatggtggcgcgttcctgtaattccagctactcaggaggctgaggcaggagaactgtttgaaccaggacctgggagacggaggttgcagtgagccaagatcacgccactgcactccagcctgggctacagagcaagactccatctc

SEQ ID NO: 198099 - protein, 307 aa, Artificial Sequence
  derived and/or modified sequence
MDDFISISLLSLAMLVGCYVAGIIPLAVNFSEERLKLVTVLGAGLLCGTALAVIVPEGVHALYEDILEGKHHQASETHNVIASDKAAEKSVVHEHEHSHDHTQLHAYIGVSLVLGFVFMLLVDQIGNSHVHSTDDPEAARSSNSKITTTLGLVVHAAADGVALGAAASTSQTSVQLIVFVAIMLHKAPAAFGLVSFLMHAGLERNRIRKHLLVFALAAPVMSMVTYLGLSKSSKEALSEVNATGVAMLFSAGTFLYVATVHVLPEVGGIGHSHKPDATGGRGLSRLEVAALVLGCLIPLILSVGHQH

SEQ ID NO: 198100 - DNA, 924 bp, Artificial Sequence
  derived and/or modified sequence
atggacgacttcatcagcatcagcctgctgagcctggccatgctggtgggctgctacgtggccggcatcatccccctggccgtgaacttcagcgaggagagactgaagctggtgaccgtgctgggcgccggcctgctgtgcggcaccgccctggccgtgatcgtgcccgagggcgtgcacgccctgtacgaggacatcctggagggcaagcaccaccaggccagcgagacccacaacgtgatcgccagcgacaaggccgccgagaagagcgtggtgcacgagcacgagcacagccacgaccacacccagctgcacgcctacatcggcgtgagcctggtgctgggcttcgtgttcatgctgctggtggaccagatcggcaacagccacgtgcacagcaccgacgaccccgaggccgccagaagcagcaacagcaagatcaccaccaccctgggcctggtggtgcacgccgccgccgacggcgtggccctgggcgccgccgccagcaccagccagaccagcgtgcagctgatcgtgttcgtggccatcatgctgcacaaggcccccgccgccttcggcctggtgagcttcctgatgcacgccggcctggagagaaacagaatcagaaagcacctgctggtgttcgccctggccgcccccgtgatgagcatggtgacctacctgggcctgagcaagagcagcaaggaggccctgagcgaggtgaacgccaccggcgtggccatgctgttcagcgccggcaccttcctgtacgtggccaccgtgcacgtgctgcccgaggtgggcggcatcggccacagccacaagcccgacgccaccggcggcagaggcctgagcagactggaggtggccgccctggtgctgggctgcctgatccccctgatcctgagcgtgggccaccagcactag

SEQ ID NO: 198101 - DNA, 924 bp, Artificial Sequence
  derived and/or modified sequence
atggatgacttcatttctatctctctcctgtccttagctatgttggttggttgttacgtggctgggatcatcccattggcagtgaatttcagcgaggaacgtcttaagttagtgactgtgctgggcgcaggactgctttgcggcaccgccttggctgtgattgtaccagaaggggtgcacgcactgtatgaagacatcctggaaggtaaacaccaccaggcctctgagacacacaacgttatagccagcgacaaggctgccgaaaagtctgttgttcacgaacacgagcatagccacgaccatacacagttgcacgcatacattggtgttagtcttgtgctaggattcgtgtttatgctgctggtggaccagataggcaactcccacgtgcactctactgacgacccagaggccgcccgatcaagcaattctaagattaccacaacccttggactggttgtgcacgccgctgctgacggggtggctctcggtgcagctgcgtccacttctcaaactagcgttcagctgatcgtttttgtggctatcatgctgcacaaggctcccgctgcgttcggcctggtatcattcctgatgcacgcagggcttgaacgcaataggattcggaagcatctgctagtgttcgccttggctgcccccgtcatgtcgatggtcacttacctcgggctatcaaagtcctccaaagaagcattatcagaggtaaacgctacaggggtggcgatgctgttttcagccggcacgtttctctacgtggctacagtgcatgtcctgcccgaggttggcggcataggccatagccataagcccgatgctactggcggtagagggttgtctaggttagaagttgccgccctggtactgggttgcctaataccgcttattctgagcgtgggacatcagcactag

SEQ ID NO: 198102 - DNA, 924 bp, Artificial Sequence
  derived and/or modified sequence
atggacgactttatctcgatatctctactgagtctcgctatgctggtaggttgttatgtggccggcattatcccgttagccgtgaattttagcgaggaaaggctcaagctggtaactgtgttgggtgccggccttctatgtggcactgcccttgctgtcattgtgccggagggcgtccatgctttgtatgaggacatattagaggggaagcaccaccaggccagcgagacacacaacgtgattgcttccgacaaagccgccgagaagtctgtcgtgcatgagcatgagcactcacatgaccacactcagctccatgcgtacataggagtgtctctggtgctgggctttgtgtttatgctgctggtggaccaaatcgggaatagccacgtgcacagcaccgatgaccccgaggcagcccgaagtagtaacagcaaaattaccacaacactggggctcgtggttcatgccgctgcagatggagtagccttgggggccgccgccagcacctcccaaacgtcagtgcagcttatcgtctttgtggcaataatgctgcacaaggcacctgccgcgttcggacttgtctcatttttgatgcacgcaggcctggagagaaaccggattagaaagcatctgctggtgtttgcgctggcagccccggtgatgtccatggttacgtatctgggcttgagcaaatcttctaaggaggccctgtccgaagttaatgccacgggcgtggctatgcttttcagcgccggaactttcctttacgtagcgaccgtgcacgtcctgcccgaagttggaggtattggccattcacacaagccagacgcgaccggggggaggggcctttcacggctggaggtcgccgcactggtactgggatgtctgatcccactaatattgagtgtgggacaccaacactag

SEQ ID NO: 198103 - DNA, 924 bp, Artificial Sequence
  derived and/or modified sequence
atggatgacttcatcagcatcagcctgctgagcctggccatgctggtgggctgctacgtggccggcatcatccccctggccgtgaacttcagcgaggagcggctgaagctggtgacagtgctgggcgccggcctgctgtgtggcacagccctggccgtcatcgtgcctgagggcgtgcacgccctgtatgaggacatcctggagggcaagcaccaccaggccagcgagacccacaacgtgattgccagtgacaaggctgctgagaagtctgtggtgcatgaacatgagcacagccatgaccacacccagctgcacgcctacatcggcgtgtccctggtgctgggctttgtgttcatgctgctggtggaccagatcggcaacagccacgtgcacagcacagatgatcctgaggccgcccggagcagcaacagcaagatcaccaccaccctgggcctggtggtgcacgccgctgctgatggagtggccctgggcgccgccgccagcaccagccagacctctgtgcagctgattgtgtttgtggccatcatgctgcacaaggccccagctgccttcggcctggtgtccttcctgatgcacgccggcctggagaggaaccgcatcaggaagcacctgctggtgtttgccctggccgcccctgtgatgtccatggtgacctacctgggcctgagcaagagcagcaaggaggccctgtctgaggtgaatgccactggagtggccatgctgttctctgctggcaccttcctgtatgtggccaccgtgcacgtgctgcctgaggtgggcggcatcggccacagccacaagccagatgccaccggcggccggggcctgagccggctggaggtggccgccctggtgctgggctgcctgatccccctcatcctgtctgtgggccaccagcactag

SEQ ID NO: 198104 - DNA, 924 bp, Artificial Sequence
  derived and/or modified sequence
atggacgacttcatcagcatcagcctgctgagcctggccatgctggtaggctgctacgtggctggaattatccccctcgctgtgaatttctccgaagaacgcctgaaactcgtgaccgtattgggcgcaggattgttgtgtggcactgccctggctgtgatagtgccagagggggtgcatgcgctctacgaggacatactggaaggcaagcaccaccaggcaagcgagactcataacgttatcgcatctgacaaagctgctgagaagtctgtggtgcacgagcatgagcactcccacgaccatacacagctccatgcgtacatcggcgtctcgttggtgctgggttttgtttttatgctgttggttgatcaaattggcaacagtcacgtccatagtacagatgatcctgaagccgcgcgatcctctaactccaaaatcacaactaccctgggtttagtcgtgcacgcagccgccgacggtgtggccctgggagctgcagcctccacaagccagacgtcagttcagctcatcgtgtttgtggccattatgctgcataaggctcctgctgctttcggtttagtatcattcttgatgcatgccggactcgagcgcaaccggattagaaagcaccttctggtgtttgcactggcggccccagtgatgtccatggttacctatttagggctgtcaaagtcatcgaaggaggccttgagtgaagtgaacgccacaggcgtcgctatgctgttttcagcagggaccttcctctacgtggcaactgtacacgtactgcccgaggtagggggaatcggacatagtcacaagcccgatgctaccggcgggagagggttgtccagactagaggtggccgcactagtactggggtgtctaattccacttatcctgagcgtcggtcaccagcactag

SEQ ID NO: 198105 - DNA, 924 bp, Artificial Sequence
  derived and/or modified sequence
atggacgacttcatcagcatcagcctgctgagcctggccatgctggtaggctgttacgtagccggaattattccgctcgctgtcaacttcagcgaagaaaggctgaagctggttactgttttaggcgcaggcctcctgtgtgggaccgccttagcggtgatcgtgcccgagggcgtccacgccctgtacgaagatattctggagggaaagcaccaccaggctagtgagactcacaacgttatcgcttcagataaagccgccgagaaatcagttgtccacgagcacgaacactcacacgaccacacacaactgcatgcctatataggcgtgagcctcgtactgggttttgtgtttatgctgctggtcgatcaaatcggtaactcccatgtgcattccaccgacgatcctgaggctgcccggtcaagtaatagcaagattacgacaaccctgggattggttgtccacgctgctgcggatggtgtggcgcttggggctgccgcaagcactagtcagacgagcgtccagctgattgtttttgtggccatcatgctccataaggctcccgccgctttcggtcttgtgtcatttctgatgcacgcaggccttgagagaaacaggattcgaaaacaccttctggtgtttgcgctggccgcgcccgttatgtccatggttacctatttaggtctgagcaagtcgtccaaggaggcactctctgaagttaacgccactggggtcgcgatgttgtttagcgctgggacgttcctgtacgtcgcaaccgtgcatgtactcccggaggtaggtggcattggccactcacataaacctgatgccactggaggtcgaggcctaagccggctggaggttgctgcattggtgttaggctgcttgattcccttaattctgtcggtaggtcaccagcactag

SEQ ID NO: 198106 - DNA, 924 bp, Artificial Sequence
  derived and/or modified sequence
atggatgactttattagcataagcctgttatcattggctatgctggtcggatgttacgtagccggaatcatccctctggctgtgaacttctccgaagagagacttaagctggtcacagtgttaggggcaggcctgctgtgtgggaccgccctagcagttatcgtaccggagggggtgcacgctttatacgaagacatactggagggcaaacatcaccaagcgtctgaaacccacaacgtaatcgcatcagataaggccgcagaaaagtctgtggtgcatgagcacgagcattcacacgatcacacccagttgcacgcttacattggggtcagtctcgtgctggggtttgtgtttatgttactcgtcgatcagatcggtaactcccatgtgcattctacagatgaccccgaagcagccaggtcatcaaatagtaaaattactactactctgggcctggtggtccatgcagcagccgacggggtcgccctcggagcggcagccagtacgtcccaaacttcagtacagctcatagtttttgtggccattatgcttcacaaagccccagctgccttcggcctggtgagcttcctgatgcatgcgggtctagagaggaaccgcatccgaaagcatctcctcgtattcgctctggccgcaccggtgatgtcaatggtgacctaccttggtctcagcaagtcttctaaagaagcactttccgaggtgaacgccacaggagtcgctatgctgttctctgccggaacttttctctacgtggcaaccgtgcacgtgctgccagaagtgggcggaatcggacactctcataaacctgatgcaacaggcggacggggtctgtctcgcctggaagtggctgcactggtcctggggtgtctaattccacttatactcagcgttggccatcagcattag

SEQ ID NO: 198107 - DNA, 924 bp, Artificial Sequence
  derived and/or modified sequence
atggatgatttcatttcaatatctttactgtctctggcaatgctcgtgggttgttacgtggccggaataatcccactagctgtgaacttcagcgaagaacggttgaagctggttaccgtgttgggcgctggcctgttgtgcggcacagccttggccgtgattgtccccgagggtgttcacgctctgtatgaagacatactcgagggcaagcatcaccaggcttccgaaacacataatgtgatcgcaagtgacaaggcagcagaaaagtctgttgtgcacgagcacgaacactcccatgatcatacccagcttcatgcgtacatcggagtgagccttgttctggggttcgtgtttatgttattagtcgaccagatcggaaattctcatgttcacagcactgacgaccctgaggccgcaaggagctctaattccaaaatcaccactaccttgggattggtcgttcatgccgcagccgacggtgtggctcttggggcagcggctagtacgagccaaacgagcgtccaactgattgtgttcgtcgcaattatgctgcacaaagcacccgcagcatttggcctcgtgtccttcctgatgcacgctggactggagagaaaccggattcgcaaacacttgttagtgttcgctttggctgcacccgtaatgtctatggttacatacctaggcctgtctaaatcctccaaggaagcattaagcgaagtcaacgctaccggggtggctatgctattctccgcagggacattcctgtacgtggctacagtgcacgtgctgccggaggtggggggaatcggtcatagccacaagcctgatgcaaccggcggacgaggcctgagtaggcttgaggtggctgccctggtcctggggtgtctgattcccctgatcctttccgtcggacaccagcattag

SEQ ID NO: 198108 - DNA, 3560 bp, Artificial Sequence
  derived and/or modified sequence
gaagagatgccacttggcggccatggcagctgtagtatcggcgactccgggtcaaggcccggtcgagtgcagtaccatgggcagcaccgggtatagggcagagacagctttgtgtcaactttgctgctgaacccctaggacccatcgttagagacctgcaggactcctttcctcatcccaggctcggaggagagtttgctgggactggtgggctggtttcctgctctggggggcggatcaccttcggggccgcctcttggagacaggggcgcctagggaacgaacaggttcgcttgagtcacttacccgccgccgcctaagacattgtgccaccctcaatccgacaatcgaagaaatcgatcattcgcacattttccccattgacttttcccatctctgttaacccacgagaatctaatgactggcatctgagaacccagagcctgggaccttagattgctgtaagctttctctggtgctaatatcagcaaaaagggtctgttgccgggtacgttcaagaggaaggtgcctcgtgaacacatctgctggtgggaaggcctaaagaactggaaagcccactctcttggaaccaccacacctgtttaaagaacctaagcaccatttaaagccactggaaatttgttgtctagtggttgtgggtgaataaaggagggcagaatggatgatttcatctccattagcctgctgtctctggctatgttggtgggatgttacgtggccggaatcattcccttggctgttaatttctcagaggaacgactgaagctggtgactgttttgggtgctggccttctctgtggaactgctctggcagtcatcgtgcctgaaggagtacatgccctttatgaagatattcttgagggaaaacaccaccaagcaagtgaaacacataatgtgattgcatcagacaaagcagcagaaaaatcagttgtccatgaacatgagcacagccacgaccacacacagctgcatgcctatattggtgtttccctcgttctgggcttcgttttcatgttgctggtggaccagattggtaactcccatgtgcattctactgacgatccagaagcagcaaggtctagcaattccaaaatcaccaccacgctgggtctggttgtccatgctgcagctgatggtgttgctttgggagcagcagcatctacttcacagaccagtgtccagttaattgtgtttgtggcaatcatgctacataaggcaccagctgcttttggactggtttccttcttgatgcatgctggcttagagcggaatcgaatcagaaagcacttgctggtctttgcattggcagcaccagttatgtccatggtgacatacttaggactgagtaagagcagtaaagaagccctttcagaggtgaacgccacgggagtggccatgcttttctctgccgggacatttctttatgttgccacagtacatgtcctccctgaggtgggcggaatagggcacagccacaagcccgatgccacgggagggagaggcctcagccgcctggaagtggcagccctggttctgggttgcctcatccctctcatcctgtcagtaggacaccagcattaaatgttcaaggtccagccttggtccagggccgtttgccatccagtgagaacagccggcacgtgacagctactcacttcctcagtctcttgtctcaccttgcgcatctctacatgtattcctagagtccagaggggaggtgaggttaaaacctgagtaatggaaaagcttttagagtagaaacacatttacgttgcagttagctatagacatcccattgtgttatcttttaaaaggcccttgacattttgcgttttaatatttctcttaaccctattctcagggaagatggaatttagttttaaggaaaagaggagaacttcatactcacaatgaaatagtgattatgaaaatacagtgttctgtaattaagctatgtctctttcttcttagtttagaggctctgctactttatccattgatttttaacatggttcccaccatgtaagactggtgctttagcatctatgccacatgcgttgatggaaggtcatagcacccactcacttagatgctaaaggtgattctagttaatctgggattagggtcaggaaaatgatagcaagacacattgaaagctctctttatactcaaaagagatatccattgaaaagggatgtctagagggatttaaacagctcctttggcacgtgcctctctgaatccagcctgccattccatcaaatggagcaggagaggtgggaggagcttctaaagaggtgactggtattttgtagcattccttgtcaagttctcctttgcagaatacctgtctccacattcctagagaggagccaagttctagtagtttcagttctaggctttccttcaagaacagtcagatcacaaagtgtctttggaaattaagggatattaaattttaagtgatttttggatggttattgatatctttgtagtagctttttttaaaagactaccaaaatgtatggttgtcctttttttttgttttttttttttttaattatttctcttagcagatcagcaatccctctagggacctaaatactaggtcagctttggcgacactgtgtcttctcacataaccacctgtagcaagatggatcataaatgagaagtgtttgcctattgatttaaagcttattggaatcatgtctcttgtctcttcgtcttttctttgcttttcttctaacttttccctctagcctctcctcgccacaatttgctgcttactgctggtgttaatatttgtgtgggatgaattcttatcaggacaaccacttctcgaactgtaataatgaagataataatatctttattctttatcccccttcaaagaaattacctttgtgtcaaatgccgctttgttgagcccttaaaataccacctcctcatgtgtaaattgacacaatcactaatctggtaatttaaacaattgagatagcaaaagtgtttaacagactaggataatttttttttcatatttgccaaaatttttgtaaaccctgtcttgtcaaataagtgtataatattgtattattaatttatttttactttctataccatttcaaaacacattacactaagggggaaccaagactagtttcttcagggcagtggacgtagtagtttgtaaaaacgttttctatgacgcataagctagcatgcctatgatttatttccttcatgaatttgtcactggatcagcagctgtggaaataaagcttgtgagccctctgctggccacagtgaggaaagtagcacaaataggatacagttgtatgtagtcattggcaacaattgcatacaattttactaccaagagaaggtatagtatggaaagtccaaatgacttccttgattggatgttaacagctgactggtgtgagacttgaggtttcatctagtccttcaaaactatatggttgcctagattctctctggaaactgactttgtcaaataaatagcagattgtagtgtc

SEQ ID NO: 198109 - DNA, 2377 bp, Artificial Sequence
  derived and/or modified sequence
ccgggtcaaggcccggtcgagtgcagtaccatgggcagcaccgggtatagggcagagacagctttgtgtcaactttgctgctgaacccctaggacccatcgttagagacctgcaggactcctttcctcatcccaggctcggaggagagtttgctgggactggtgggctggtttcctgctctggggggcggatcaccttcggggccgcctcttggagacaggggcgcctagggaacgaacaggttcgcttgagtcacttacccgccgccgcctaagacattgtgccaccctcaatccgacaatcgaagaaatcgatcattcgcacattttccccattgacttttcccatctctgttaacccacgagaatctaatgactggcatctgagaacccagagcctgggaccttagattgctgtaagctttctctggtgctaatatcagcaaaaagggtctgttgccgggtacgttcaagaggaaggtgcctcgtgaacacatctgctggtgggaaggcctaaagaactggaaagcccactctcttggaaccaccacacctgtttaaagaacctaagcaccatttaaagccactggaaatttgttgtctagtggttgtgggtgaataaaggagggcagaatggatgatttcatctccattagcctgctgtctctggctatgttggtgggatgttacgtggccggaatcattcccttggctgttaatttctcagaggaacgactgaagctggtgactgttttgggtgctggccttctctgtggaactgctctggcagtcatcgtgcctgaaggagtacatgccctttatgaagatattcttgagggaaaacaccaccaagcaagtgaaacacataatgtgattgcatcagacaaagcagcagaaaaatcagttgtccatgaacatgagcacagccacgaccacacacagctgcatgcctatattggtgtttccctcgttctgggcttcgttttcatgttgctggtggaccagattggtaactcccatgtgcattctactgacgatccagaagcagcaaggtctagcaattccaaaatcaccaccacgctgggtctggttgtccatgctgcagctgatggtgttgctttgggagcagcagcatctacttcacagaccagtgtccagttaattgtgtttgtggcaatcatgctacataaggcaccagctgcttttggactggtttccttcttgatgcatgctggcttagagcggaatcgaatcagaaagcacttgctggtctttgcattggcagcaccagttatgtccatggtgacatacttaggactgagtaagagcagtaaagaagccctttcagaggtgaacgccacgggagtggccatgcttttctctgccgggacatttctttatgttgccacagtacatgtcctccctgaggtgggcggaatagggcacagccacaagcccgatgccacgggagggagaggcctcagccgcctggaagtggcagccctggttctgggttgcctcatccctctcatcctgtcagtaggacaccagcattaaatgttcaaggtccagccttggtccagggccgtttgccatccagtgagaacagccggcacgtgacagctactcacttcctcagtctcttgtctcaccttgcgcatctctacatgtattcctagagtccagaggggaggattagaactaagaggacacaccagcatcggagtgtattaagcccctgaaacacatggtagctagggactgaacacaggaaccgtatgacagcagcacaaacccccaaaggatgttcctgccttgtgggcccctgagccccttgggagactgagaatcatgaccagattcatccagaactgctgcagtgttaagtgaaaatcctctgtagttgttctgcagaggaaccttccttccattagaaaatttctgctcaatacagaatggtccacatcacccaaagtgcactgttggagatgctgtgaaattaaaacctctttgtacctgagacatctagattcacctcaggaggcctgaaggaaatgtgtaacttgtgggaaagaactagacaaccatttaggaattctctagatatactcagcctaacccagtggcttaacacaaggagattggctttgatctttttttcttgtggcatcttccagcaagttagaagtctcatgggataagactgcagttcccctggttcaatagctggaacagtgattttaaatgtccctttttctggatcccttgtaaacatgaaatcattccatggatggctgccttataattttgtctctttccactttaattgtgaatggttaaaaaaatgctgttttctgatattaaatttttattagtgc

SEQ ID NO: 198110 - protein, 247 aa, Artificial Sequence
  derived and/or modified sequence
MLVLRSGLTKALASRTLAPQVCSSFATGPRQYDGTFYEFRTYYLKPSNMNAFMENLKKNIHLRTSYSELVGFWSVEFGGRTNKVFHIWKYDNFAHRAEVRKALANCKEWQEQSIIPNLARIDKQETEITYLIPWSKLEKPPKEGVYELAVFQMKPGGPALWGDAFERAINAHVNLGYTKVVGVFHTEYGELNRVHVLWWNESADSRAAGRHKSHEDPRVVAAVRESVNYLVSQQNMLLIPASFSPLK

SEQ ID NO: 198111 - DNA, 744 bp, Artificial Sequence
  derived and/or modified sequence
atgctggtgctgagaagcggcctgaccaaggccctggccagcagaaccctggccccccaggtgtgcagcagcttcgccaccggccccagacagtacgacggcaccttctacgagttcagaacctactacctgaagcccagcaacatgaacgccttcatggagaacctgaagaagaacatccacctgagaaccagctacagcgagctggtgggcttctggagcgtggagttcggcggcagaaccaacaaggtgttccacatctggaagtacgacaacttcgcccacagagccgaggtgagaaaggccctggccaactgcaaggagtggcaggagcagagcatcatccccaacctggccagaatcgacaagcaggagaccgagatcacctacctgatcccctggagcaagctggagaagccccccaaggagggcgtgtacgagctggccgtgttccagatgaagcccggcggccccgccctgtggggcgacgccttcgagagagccatcaacgcccacgtgaacctgggctacaccaaggtggtgggcgtgttccacaccgagtacggcgagctgaacagagtgcacgtgctgtggtggaacgagagcgccgacagcagagccgccggcagacacaagagccacgaggaccccagagtggtggccgccgtgagagagagcgtgaactacctggtgagccagcagaacatgctgctgatccccgccagcttcagccccctgaagtag

SEQ ID NO: 198112 - DNA, 744 bp, Artificial Sequence
  derived and/or modified sequence
atgctcgtgctgcggtcaggccttacaaaggcccttgcttcaaggaccctggcgccccaggtgtgttcctcctttgcaaccggccctcgccagtatgatggcacattttatgaattccgcacatactaccttaagccaagcaacatgaatgcattcatggagaacctgaagaagaatattcatttgaggacctcttactccgagttggtgggattttggtcggtggaatttgggggacggacaaataaggtttttcacatctggaagtatgacaactttgctcacagggccgaggtacgtaaggccttagccaattgcaaagaatggcaggagcaatctattatcccaaacttggccagaattgataagcaagagaccgaaatcacctacctgatcccgtggtccaaattggaaaagcccccaaaagagggggtctatgagctggccgtgtttcagatgaagcccggcgggccagccttgtggggggatgcgttcgagcgcgccatcaatgctcatgtgaacctgggatatactaaagtggtcggcgttttccatacagaatacggcgaactgaacagagtgcatgtcttgtggtggaatgaatcagctgactctcgagccgcaggccgacataaaagccacgaagacccgcgcgtggtcgcagcagtgagagagtccgtaaattacctcgtatctcagcagaacatgctgttgatcccggccagcttctcacctctcaagtag

SEQ ID NO: 198113 - DNA, 744 bp, Artificial Sequence
  derived and/or modified sequence
atgctggtgctgcggagcggcctgaccaaggccctggccagcaggaccctggccccccaggtgtgcagcagctttgccaccggcccccggcagtatgatggcaccttctatgagttccgcacctactacctgaagcccagcaacatgaatgccttcatggagaacctgaagaagaacatccacctgcggaccagctacagcgagctggtgggcttctggagcgtggagtttggaggccgcaccaacaaggtgttccacatctggaagtatgacaactttgcccacagagctgaggtgaggaaggccctggccaactgcaaggagtggcaggagcagagcatcatccccaacctggccagaattgacaagcaggagacagagatcacctacctgatcccctggagcaagctggagaagccacccaaggagggcgtgtatgagctggccgtgttccagatgaagccaggcggccctgccctgtggggagatgcctttgagcgggccatcaatgcccacgtgaacctgggctacaccaaggtggtgggcgtcttccacacagaatatggagagctgaacagagtgcacgtgctgtggtggaatgaatctgctgacagcagagctgctggccgccacaagagccatgaggacccccgggtggtggccgctgtgcgggagagcgtgaactacctggtgtcccagcagaacatgctgctgatcccagccagcttcagccccctgaagtag

SEQ ID NO: 198114 - DNA, 744 bp, Artificial Sequence
  derived and/or modified sequence
atgctggtgctgcggagcggcctgaccaaggccctggccagccggaccctggccccacaagtctgctctagtttcgctaccggcccaaggcaatacgatggcaccttttatgaattccgcacttactacctaaaaccttccaacatgaacgccttcatggagaatctgaaaaaaaatatccacctgcggacctcttatagtgaattagttggtttttggtcggttgaatttgggggccggaccaataaggtcttccacatttggaagtatgataattttgcccaccgggcggaggtccgtaaggccctggcgaattgcaaagaatggcaggagcagtccataatcccaaacttagcccgtatcgacaagcaggagacagagatcacgtatttgatcccctggtcaaagctggaaaagccccccaaagagggcgtgtacgagcttgctgtctttcaaatgaaaccaggtggccctgctttgtggggagacgctttcgaaagagccatcaacgctcacgttaacctgggctataccaaggttgtgggagtatttcatactgagtacggtgaactcaaccgcgtgcacgtattatggtggaatgagtctgccgacagtagagcagccgggcgccacaagagccatgaagaccctcgagttgtggctgccgtgcgtgagagcgtcaattaccttgttagccagcagaatatgctgctgattcctgcaagcttttcgccattaaagtag

SEQ ID NO: 198115 - DNA, 1752 bp, Artificial Sequence
  derived and/or modified sequence
actcgggaagacttcagagaagtctcacaaaggactcggctggctgcttttctcagtgccgaagccgcgccatgctcgttctcagaagcggcctgaccaaggcgcttgcctcacggacgctcgcgcctcaggtgtgttcatcttttgctacgggccctagacaatacgatggaacgttctatgaatttcgtacttattaccttaaaccttcaaatatgaatgcgttcatggaaaatcttaagaaaaacattcatcttcggacctcttactctgaattggttggattctggagtgtagaatttggaggcagaacgaataaagtgtttcatatttggaagtatgataattttgctcatcgagctgaagttcggaaagccttagccaactgtaaggaatggcaagaacaatctatcattccaaatttggctcgcattgataaacaagagacggaaattacttacctgataccatggtccaaattagaaaagcctccaaaagaaggagtctatgaactagctgtttttcagatgaaacctggtgggccagctctgtggggtgatgcatttgaaagagcaattaatgcccatgtcaatttaggctacacaaaagtagttggtgttttccacacagaatatggagaactcaacagagttcatgttctttggtggaatgagagtgcagatagtcgtgcagctgggagacataagtcccatgaggatcccagagttgtggcggctgttcgggaaagtgtcaactacctagtttctcagcagaatatgcttctgattcctgcatcattttcaccattgaaatagttttctactgaaatacaaaacatttcattaactgctctaagatgtgtctgctaatggtgcttaaattctcccaagaggttctcgcttttatttgaaggaggtggtaagttaattagttaatttgctgtgcttcttgcatttttgaaagttacatattctccactgctttaagaaataattcagttcactttcaccttggcatttcagtatctgttacacattagaagtagttgtcactatttcatcatcttggtttttcatttgttttagaatacctcttctgtattttgataactcattgctttatagcattttcttttactcaaataaggattttacatttccttgcctgacagtatttttgaattatttatataaaatatctatcttttcatcatgtctatagttcctgagattttaaaaaaatttgcttagtaaaggttattttgtgatataaaatgggatttataaaaatattagattgtttatttctttactgtggaaaagtacaatgtcatctgtattaattattgcttttacattcattgattattagtcattctaacttggaaaataatgcaattgggtcacagtgttaaaaatctagaaaagacttgttggtttatatgctgaaattgttcatttataattaattttactaatttctacttagtttggatcactaacagagatcttgggacatttatttgttttaaagaaatatttatggttatggaaacgcttgccctaataaaaatcctgcatattcattgtttttttaaattcacattttatacttatatgatctctaaagctcttgctatgttgctataagacagtaatatagtgataatttaccaactttattgaaaatgttgttacatcaataaaatagcatgctgggaacctgagaaggaaggtttctttagtactgcca

SEQ ID NO: 198116 - DNA, 744 bp, Artificial Sequence
  derived and/or modified sequence
atgctggtcctccggtcaggactcactaaagccctggcgtcccggacactcgccccacaggtgtgctcatcctttgccactggccctaggcagtacgatggcacattctacgaatttcgtacatattaccttaagccaagcaatatgaacgccttcatggaaaacctgaaaaagaatatccacctgcgcacctcatatagcgagttggtcggtttctggtcagtagagtttggcggacgcaccaacaaggtgtttcacatctggaaatacgataactttgcccaccgcgcagaggttcggaaagctctcgccaattgcaaggagtggcaggagcagagtatcatccccaacctcgccagaattgacaaacaggagactgagatcacttacctgatcccatggtccaaactagagaaaccaccaaaagagggtgtgtacgagctggctgtttttcagatgaagccgggagggcctgccctctggggggacgcctttgagagagctatcaatgctcacgtgaacctcggatacaccaaggtggtcggggtgtttcatactgagtacggagagttgaatcgggtgcacgttctgtggtggaatgagagcgcggactctcgcgcagcgggtagacataaaagtcacgaagaccctcgcgtggttgctgcggtccgagaaagcgttaactacttagtgtctcagcagaacatgctcctgatacctgccagctttagcccacttaaatag

SEQ ID NO: 198117 - protein, 540 aa, Artificial Sequence
  derived and/or modified sequence
MALTRPVRLFSLVTRLLLAPRRGLTVRSPDEPLPVVRIPVALQRQLEQRQSRRRNLPRPVLVRPGPLLVSARRPELNQPARLTLGRWERAPLASQGWKSRRARRDHFSIERAQQEAPAVRKLSSKGSFADLGLEPRVLHALQEAAPEVVQPTTVQSSTIPSLLRGRHVVCAAETGSGKTLSYLLPLLQRLLGQPSLDSLPIPAPRGLVLVPSRELAQQVRAVAQPLGRSLGLLVRDLEGGHGMRRIRLQLSRQPSADVLVATPGALWKALKSRLISLEQLSFLVLDEADTLLDESFLELVDYILEKSHIAEGPADLEDPFNPKAQLVLVGATFPEGVGQLLNKVASPDAVTTITSSKLHCIMPHVKQTFLRLKGADKVAELVHILKHRDRAERTGPSGTVLVFCNSSSTVNWLGYILDDHKIQHLRLQGQMPALMRVGIFQSFQKSSRDILLCTDIASRGLDSTGVELVVNYDFPPTLQDYIHRAGRVGRVGSEVPGTVISFVTHPWDVSLVQKIELAARRRRSLPGLASSVKEPLPQAT

SEQ ID NO: 198118 - DNA, 1623 bp, Artificial Sequence
  derived and/or modified sequence
atggctctcacccggccagtcaggctgttctcccttgtcactcgacttttactagcaccaagacggggactgacagtgagaagcccggacgaaccgctgcccgtcgtgcggatacccgtagcccttcagaggcagctcgaacagcgtcagagtaggcgacgcaatctcccccgcccagtattggtgcgtcccggcccactgctggtttccgcacggaggcctgaacttaaccagcccgcccggcttactctgggccgctgggagcgagctcctctcgcgagccagggttggaagtcccgaagggcacgacgcgatcacttttcaatcgaacgggctcaacaggaggctccagccgtgaggaaattgtcatccaaaggcagtttcgccgatttgggactggaaccccgtgtgttacacgctctgcaggaggcggctcccgaagtagtccagccaacaacggttcaatccagtaccattccttctttacttagaggcagacacgttgtgtgtgctgcggagactggctccgggaagaccctttcttacctcctcccactgctccagaggcttctgggacagcctagtctggattccttaccaattcctgccccacgcggactcgtgctggttccatctagagagctcgcccagcaggtgagagctgtggcgcaacctttgggccggtcgctcggtctcttagtgagggaccttgaaggcggacacggcatgcggcgcatcagactgcagttatctcgccagccaagcgccgatgtccttgtggcaacacccggggctctctggaaagccttgaagagtagactgatttctcttgaacaactctcctttctggtgttagacgaagcagacacactcctggatgagagttttttggaactggtggattacatcctcgaaaagagtcacatcgccgaggggcctgctgatttagaagatcctttcaacccaaaggcccagctggtcctcgtgggggctacttttccagagggcgtcggacagctgctcaacaaggtggcgagcccagatgccgtgaccaccattactagctccaagctgcactgcattatgcctcacgttaagcagacatttctcaggctcaagggtgccgataaggttgccgagctggttcatattctgaagcacagggaccgcgccgagcggacggggccatcgggcaccgtacttgtattctgcaattcctccagcacagtcaattggctgggatacatacttgatgaccacaagatacaacatctcagacttcagggacaaatgccagccttgatgagggtcggtatcttccagagttttcagaaaagcagtcgagacatactcctttgcactgacatcgcatcccgggggctagactcgacaggcgtcgagctggtggttaattatgattttccccccacactccaggattacatccaccgcgccggacgagtcggccgtgtcggctctgaggtgcctggcactgttattagcttcgtaacccatccctgggatgtgtctctagttcagaagatcgagctggccgccaggagaagacggtcactgcccggattagccagttctgtgaaggagccccttccccaggccacatag

SEQ ID NO: 198119 - DNA, 1623 bp, Artificial Sequence
  derived and/or modified sequence
atggccctgaccaggcctgtgcggctcttcagcctggtgacccggctgctgctggccccccggcggggcctgactgtgcgcagcccagatgagcccctgcctgtggtgcgcatccctgtggccctgcagaggcagctggagcagaggcagagcagaagaagaaacctgcccaggcctgtgctggtgcggcccggccccctgctggtgtctgcccggcggcctgagctgaaccagcctgcccggctgaccctgggccgctgggagcgggcccccctggccagccagggctggaagagccggcgggcccggcgggaccacttcagcattgagcgggcccagcaggaggccccagctgtgaggaagctgagcagcaagggcagctttgctgacctgggcctggagccccgggtgctgcacgccctgcaggaggccgcccctgaggtggtgcagcccaccaccgtgcagagcagcaccatccccagcctgctgcggggcagacatgtggtgtgtgccgctgagaccggcagcggcaagaccctgagctacctgctgcccctgctgcagaggctgctgggccagcccagcctggacagcctgcccatcccagccccccggggcctggtgctggtgcccagccgggagctggcccagcaggtgcgggctgtggcccagcccctgggccgcagcctgggcctgctggtgcgggacctggagggcggccacggcatgaggcgcatccggctgcagctgagccggcagcccagcgcagatgtgctggtggccacccctggggccctgtggaaggccctgaagagccgcctcatcagcctggagcagctgtccttcctggtgctggatgaggccgacaccctgctggatgagagcttcctggagctggtggactacatcctggagaagagccacatcgccgagggccctgctgacctggaggaccccttcaaccccaaggcccagctggtgctggtgggcgccaccttccctgagggcgtgggccagctgctgaacaaggtggccagcccagatgctgtgaccaccatcaccagcagcaagctgcactgcatcatgccccacgtgaagcagaccttcctgcggctgaagggagctgacaaggtggccgagctggtgcacatcctgaagcaccgggacagagctgagaggacaggccccagcggcaccgtgctggtgttctgcaacagcagcagcacagtgaactggctgggctacatcctggatgaccacaagatccagcacctgcggctgcagggccagatgcctgccctgatgagggtgggcatcttccagagcttccagaagagcagccgggacatcctgctgtgcacagacatcgccagccggggcctggacagcactggagtggagctggtggtgaactatgacttcccccccaccctgcaggactacatccacagagctggccgggtgggccgggtgggcagcgaggtgcccggcaccgtcatcagctttgtgacccacccctgggatgtgtccctggtgcagaagattgagctggccgccaggagaagaagaagcctgcccggcctggccagctctgtgaaggagcccctgccccaggccacctag

SEQ ID NO: 198120 - DNA, 1623 bp, Artificial Sequence
  derived and/or modified sequence
atggccctgacccggcccgtgcggctgttcagcctggtgacccggctcctgttggcccctcggcgaggattgaccgtacgatcaccagacgaaccactgccggtagtccgcataccggtggcattgcagcgacagttagaacagcgtcagtctaggcgacgaaaccttccgcggcccgtgcttgtgaggccaggccctctacttgtctctgccaggcgtcccgagctcaatcagcctgcccggctgactctgggccgctgggaaagagcccctctggcaagccagggttggaagtcaagacgcgcccgtagagatcatttctccatcgagagggctcagcaagaggctcccgccgtcaggaagcttagttccaagggctcatttgctgacttgggtctggaaccacgggtactacacgccctccaggaggcagccccggaggtggtccagcccaccactgtgcagtccagtacaatcccatccctgctgagaggcagacacgtcgtttgcgcagcggaaactggctccggaaagaccctgtcgtatttactgcctctgctgcagcgactcctcgggcaaccctccctagactcactgccaattccggcaccgaggggtctagtgttggtgcccagtcgcgaactggcacagcaagtgcgggctgtggcccagcctctgggtagaagtctcgggctattagtgagagatttggagggcggccacggcatgcggcggattcggttgcagttgagccgccagccttctgctgacgttttggtcgcaactcctggcgctctgtggaaggccctgaagagccggttaatctcgcttgagcagttatctttcttggtattggacgaggcggatacattgttggatgagtcttttctcgaactcgtggattatatcttagagaagagtcatattgcggaagggcccgcagatctggaagatcccttcaaccctaaagcccaactggtacttgtgggagctacgtttccggaaggcgtcggtcagttacttaataaagtggcctcaccagacgccgtcactactataacatctagtaagttacactgcattatgccccacgtaaaacagacttttttgcgactgaaaggcgctgacaaggtagctgagttggtccatatcttgaagcatagagacagggccgagaggactggccctagcggcacagtactggtgttttgcaactcaagctcaaccgtcaactggctagggtatatacttgacgaccacaagattcagcatctgcgactgcaaggccaaatgccagctctaatgagggtaggcatattccagtcatttcagaaaagtagccgggatatcttgctctgtacggacatcgcctccaggggcctggatagcactggtgtagagctcgtggtgaactacgacttcccccccactctgcaggattacatacatcgcgctggcagagtaggccgtgtggggtccgaagtccctggcacagtgatttcgtttgtgacccacccctgggacgtgagcctggttcaaaaaatcgagttagcagccaggaggcgcagatctctgcctgggctggcttccagcgttaaagaacctctcccacaagcgacatag

SEQ ID NO: 198121 - DNA, 1623 bp, Artificial Sequence
  derived and/or modified sequence
atggccctgacccgccctgttcggctgttttccctcgtgacgcgactcctgctggcacctcgccgaggcctgaccgttcgatccccagacgagcccctgccggttgtgagaataccagtggccctgcagagacagctggagcagagacagtcacgcaggaggaacctaccaagacctgtcctagttaggcccggacctctgttggtatccgcccgtcgtcccgagctgaaccagccagcccgtctgacacttggcaggtgggagagggccccactggcttctcagggttggaaaagtcggagagccagacgtgaccacttttcgattgagagagcccagcaggaagcccctgcagtgaggaaattgagttcaaagggctcatttgcggatctgggactggaacccagagttctccacgccctgcaggaggcggctcctgaggtggtgcagccaactaccgtccaatcatcaactattccctcactgctgcgcggacgccacgtagtctgtgccgctgagaccggcagtgggaaaacactaagttacctgcttcccttactgcagaggttactgggacaaccatccctggatagtttacctattcctgccccaagagggctcgttctggtgccatcccgggagctggcccaacaagtgcgtgccgttgcccagcccctggggcgatccctgggattgctagtgagagaccttgagggtgggcacgggatgaggcggatccggcttcagctttcgcgccaacccagtgctgatgtgctggttgctacgcctggcgctctgtggaaggctttgaagtcccggctaatttctctcgaacagctctcctttcttgtgctggatgaggctgatacactgctggatgaatccttcttggagctcgttgactatattttggaaaagagccacatcgccgaaggtcccgctgacctggaagacccttttaatcctaaggcacagcttgtcctggttggggcaacgtttcccgaaggagtgggacagcttctgaataaggtcgcgagcccagacgcggtgacgacgattacatctagcaagctgcattgcatcatgccccacgtgaagcagacatttttgcgcctgaagggggcagataaggttgccgagcttgttcatattctaaagcaccgggatcgggcagagcgaacaggtccaagtgggacagtgctggtgttttgtaacagttcatccactgtgaattggctgggttacatcctggacgatcacaagatccagcacctacgactgcagggacagatgcccgctctgatgcgggtcgggatttttcagagtttccagaaaagcagccgggacattttgttgtgcaccgatatcgcctccaggggtcttgactccacaggcgtcgagttggtggtcaactatgatttcccccctactcttcaggattatatccaccgcgctggacgcgtcgggcgtgtgggtagcgaggttcccggtacagtcatcagcttcgtcacccatccctgggacgtgagcctggtccaaaaaatcgagctagccgcaaggcgacgaaggtccctgcctgggctcgcttcaagcgtcaaggagccgctcccccaggccacatag

SEQ ID NO: 198122 - DNA, 2592 bp, Artificial Sequence
  derived and/or modified sequence
gagtagagagtgaaccttggcttaaaaggaaggaaaataactgtgaagaaaagatgacccaacttgaaataaaacctgaagaccttatctcccacttgagagagagaagaagctgaaagccatcagcttgcactctgggctcacagacagagagggtgaggggttgagcccagatctatgacttcagacccctgtctcggcccctaggcctgatcattcattcaaactctcaataaacacggattaccagaccctgcgcagggaacacatctgggaaaacagctgcaacctcggataccagcacgggacaagctatctcagggcaatgaggaacaactaaagagaatcccaggaaccaggtaaccaatcgccagaagccctccgccctcatggtccattgggtcaaggccccactgccgcctcgtatcgccagcctccagtcctgcctccacgacgcgcccttccccaaggctggccgggtctggatgtcgccatcccctattcggagctacagacctcgcagctgaactcttaaaaagaacctcgcttcttcctcacggtgctccagctccacacaccgtactgagcctcgccagccaccgtacgcgaggtcgcggcgcgtccgtgacgtcactgatgtgcgcttctcccgcactaagggaaacatggctctaacgcggccggtgcggctcttttccctcgtgactcggttgctcctggcgccgcgacggggcctcacggtccgcagtcccgacgaacccctgccggtggtgcgcatcccagtggctctacagcggcagttggaacagcggcagagcaggcggcggaacctcccgaggccggtgctggttcgacccggaccgctgctggtttcggcgcggcggccggagttgaaccagccggcgcgcctcacactgggccgttgggagcgcgcgccgctagcctctcaaggctggaagagtcgacgcgcgcgtcgggaccacttctccatcgagcgcgcgcaacaggaggcgccagcggtgcgaaagctctcgtctaagggcagctttgctgacctgggcctggagccccgtgtgctgcacgcactacaggaggctgcgcctgaagtcgttcagcccacaaccgtgcagtctagcaccatcccctcactacttcgcggccgccatgtcgtttgcgccgcagaaaccggcagtggcaagactctcagctacctcctgccgctgcttcaacggctcttgggccagccaagcctggactcccttcctatccccgcgccccgaggcctggtccttgttccttcccgagaattggcccaacaggtgcgggctgtggcccaacccttgggccgctccttgggcctgctggtgcgggacctggagggaggccacggcatgcgtaggatcaggctgcagctgtccagacagccttcagcagatgtgcttgtggccactccaggggctctgtggaaggccctgaaaagtcgactgatcagtctggagcaactctccttcttggtgttggatgaggcagacacactgctggatgaaagcttcctggaactggtggactacatcttagagaagagccacatagcagaaggcccagctgacttggaagaccccttcaatcccaaagctcagttagtgctggtaggagccacatttcccgaaggtgtaggccagttgctgaataaagtcgccagcccagatgctgtcaccaccatcaccagctccaagctccactgtatcatgcctcatgtgaaacagacatttctgagactgaagggagcagataaggtggccgagctggtgcacatcctcaagcatcgtgacagagcagaaaggactggtccctcaggaactgttctggtgttctgtaatagctccagcactgtgaactggctgggatatattctggatgaccacaaaatccaacacctaaggttgcaggggcaaatgccagccttgatgagggtaggaatcttccagtccttccagaagagctcccgagacatacttctctgcacagacatagcctctcggggcctggacagcactggtgtggagctggttgtcaattatgatttccccccaacgctgcaagattacatccacagagcagggagagtgggccgtgtggggagcgaggtgccaggcaccgtcatcagttttgtgacccatccctgggatgtgagcctggttcagaagattgagctggcggctcgccgaaggagaagtcttccaggactagcatcctcggtgaaagagcctttgccccaagcaacctgattttgacaaatctgattaaaatgtgatgctagaacagggatctttcccagtatcttgagtgggtgaccacacttgtcagtgggaggctctgggctgccctgtcggctccttgagggcgggatgaactgctttgtgacttggaaaggtacgctgctggccagcattggagaagaagctgctgagcatggctttctgtagtctttagcaagacacaagtggattttgactttgtatcatgtcatgatttctaacaataaatgatgtttttatgtgcctcccctaagaataattagcaccggggcgg

SEQ ID NO: 198123 - DNA, 1623 bp, Artificial Sequence
  derived and/or modified sequence
atggccctgaccagacccgtgagactgttcagcctggtgaccagactgctgctggcccccagaagaggcctgaccgtgagaagccccgacgagcccctgcccgtggtgagaatccccgtggccctgcagagacagctggagcagagacagagcagaagaagaaacctgcccagacccgtgctggtgagacccggccccctgctggtgagcgccagaagacccgagctgaaccagcccgccagactgaccctgggcagatgggagagagcccccctggccagccagggctggaagagcagaagagccagaagagaccacttcagcatcgagagagcccagcaggaggcccccgccgtgagaaagctgagcagcaagggcagcttcgccgacctgggcctggagcccagagtgctgcacgccctgcaggaggccgcccccgaggtggtgcagcccaccaccgtgcagagcagcaccatccccagcctgctgagaggcagacacgtggtgtgcgccgccgagaccggcagcggcaagaccctgagctacctgctgcccctgctgcagagactgctgggccagcccagcctggacagcctgcccatccccgcccccagaggcctggtgctggtgcccagcagagagctggcccagcaggtgagagccgtggcccagcccctgggcagaagcctgggcctgctggtgagagacctggagggcggccacggcatgagaagaatcagactgcagctgagcagacagcccagcgccgacgtgctggtggccacccccggcgccctgtggaaggccctgaagagcagactgatcagcctggagcagctgagcttcctggtgctggacgaggccgacaccctgctggacgagagcttcctggagctggtggactacatcctggagaagagccacatcgccgagggccccgccgacctggaggaccccttcaaccccaaggcccagctggtgctggtgggcgccaccttccccgagggcgtgggccagctgctgaacaaggtggccagccccgacgccgtgaccaccatcaccagcagcaagctgcactgcatcatgccccacgtgaagcagaccttcctgagactgaagggcgccgacaaggtggccgagctggtgcacatcctgaagcacagagacagagccgagagaaccggccccagcggcaccgtgctggtgttctgcaacagcagcagcaccgtgaactggctgggctacatcctggacgaccacaagatccagcacctgagactgcagggccagatgcccgccctgatgagagtgggcatcttccagagcttccagaagagcagcagagacatcctgctgtgcaccgacatcgccagcagaggcctggacagcaccggcgtggagctggtggtgaactacgacttcccccccaccctgcaggactacatccacagagccggcagagtgggcagagtgggcagcgaggtgcccggcaccgtgatcagcttcgtgacccacccctgggacgtgagcctggtgcagaagatcgagctggccgccagaagaagaagaagcctgcccggcctggccagcagcgtgaaggagcccctgccccaggccacctag

SEQ ID NO: 198124 - DNA, 924 bp, Artificial Sequence
  derived and/or modified sequence
atgggcggcttccaaagaggaaagtacggcactatggcagaaggcagaagtgaagataacctcagtgctaccccacctgcccttagaatcatcctcgtgggtaaaactggctgtgggaaatccgcaacaggtaacagcatcctgggccagcctgtctttgagtcgaagctccgggctcagtccgtgacgcgtacatgccaagtcaagactggtacttggaatggcagaaaggtcctggttgttgacacgccaagcatctttgagtcacaagcagacacacaggagctgtataaaaatattggagattgttacctcttgagtgctccaggaccacacgtgctcctcttggtgattcagttgggacggttcacagcgcaggacactgtcgccattaggaaagtcaaggaggtgttcggtactggcgccatgaggcacgtagttattctcttcactcacaaagaagacctgggcggccaagctcttgacgattatgtggctaataccgataactgtagtctcaaagaccttgtgcgggaatgcgagcgtaggtattgtgcatttaacaactggggctcagttgaggagcagcgacaacagcaggctgagctcctggctgtgattgagcgactgggccgcgagcgcgagggcagctttcattcgaatgatctctttctggatgcccagctccttcaacgcaccggggccggcgcctgccaagaagactatcgtcagtaccaggccaaggtcgagtggcaagtagagaagcataagcaggagcttcgggagaacgaatccaactgggcctacaaggccctgctgcgtgtaaaacatctaatgcttctgcactacgagatttttgtctttctgttgttatgtagtatattgttcttcataatttttctattcatattccactatatttag

SEQ ID NO: 198125 - DNA, 924 bp, Artificial Sequence
  derived and/or modified sequence
atgggcggcttccagaggggcaagtatggcaccatggccgagggccgctctgaggacaacctgagcgccaccccaccagccctgcgcatcatcctggtgggcaagacaggctgtgggaagagcgccactggaaacagcatcctgggccagcctgtgtttgagagcaagctgcgggcccagagcgtgaccaggacctgccaggtgaagacaggcacctggaatggaaggaaggtgctggtggtggacacccccagcatctttgagagccaggccgacacccaggagctgtacaagaacatcggggactgctacctgctgagcgcccctggcccccacgtgctgctgctggtgatccagctgggccgcttcaccgcccaggacacagtggccatcaggaaggtgaaggaggtgtttggcaccggggccatgagacatgtggtgatcctcttcacccacaaggaggacctgggcggccaggccctggatgattatgtggccaacacagacaactgcagcctgaaggacctggtgagagaatgtgagcggcgctactgtgccttcaacaactggggctctgtggaggagcagaggcagcagcaggccgagctgctggccgtgattgagcggctgggccgggagcgggagggcagcttccacagcaatgacctcttcctggatgcccagctgctgcagaggactggagctggggcctgccaggaggactaccggcagtaccaggccaaggtggagtggcaggtggagaagcacaagcaggagctgcgggagaatgaaagcaactgggcctacaaggccctgctgcgggtgaagcacctgatgctgctgcactatgagatctttgtgttcctgctgctgtgcagcatcctcttcttcatcatcttcctgttcatcttccactacatctag

SEQ ID NO: 198126 - DNA, 924 bp, Artificial Sequence
  derived and/or modified sequence
atgggcggcttccagcggggcaagtacggcaccatggccgagggcagatccgaagataacctctccgctaccccccccgccctgcggatcatactggtaggcaaaacgggatgtggcaaatctgccacgggaaattcgattctgggccagcccgtttttgagtcaaagctcagagcccagagcgtgacccgtacatgtcaggtgaaaactgggacctggaacggcaggaaggtgctggtggtcgatacaccctccatcttcgaaagccaagcagatacacaggaactgtataagaatattggcgactgctatttgctgagcgcccccgggccccacgtgttgctcctggtgatccagttaggtcgcttcactgcccaggacaccgtggccatcagaaaggtcaaagaagtgttcggaactggcgccatgagacatgtcgtgatcctctttacacacaaggaggatcttggtggccaggcgctggacgactacgttgccaacacagacaactgttctctgaaggatttggtgcgggagtgtgaaaggagatattgtgctttcaataattggggctcagtcgaagagcagaggcaacagcaagctgaacttctcgccgttatcgagagactcggcagggaaagggaggggtcgtttcactccaatgacctcttcctggacgcccaactgctgcagcgtacaggcgcaggggcatgccaggaagactaccgtcagtatcaggcaaaggttgagtggcaggtcgagaagcacaagcaggagctgagagagaacgagtctaactgggcttataaggctttactgcgcgttaagcacctaatgctcttacattacgagatctttgtgttcctgctgctgtgctctatcctgttttttattatatttctctttatcttccactacatttag

SEQ ID NO: 198127 - DNA, 924 bp, Artificial Sequence
  derived and/or modified sequence
atgggaggcttccagcggggaaaatacggtactatggctgaggggaggtctgaggataacctcagcgcaacgccacctgcattgaggatcatcctggtaggcaagaccggctgtggaaaaagcgcaacgggtaacagcatcctaggacagcccgtgttcgaatctaaattgcgagcacagagcgtgacccggacgtgtcaggtcaaaaccggcacttggaacggccgtaaggtgttggtcgtggatacaccttctatttttgaatcacaggccgacacacaggaactgtacaaaaacattggagattgttacctgctgtccgcccctggaccacacgtcttgttactggtcatccagttgggaaggttcactgcgcaagatacagtcgcgattcgaaaggtgaaagaggtgtttggcacgggcgcaatgagacatgtggtaattctttttacacacaaggaggacctgggtgggcaggctctggatgactatgtggcgaacactgataactgtagcctgaaggatttggtaagggagtgcgagcgacggtactgcgcctttaataactggggaagcgtcgaagagcagaggcagcagcaggccgagctactcgcggtaatagagagactcggtagggagcgggagggctccttccacagcaatgatctttttctggatgcacagttattacaaaggactggcgcaggcgcttgccaggaagattatcggcaatatcaggcaaaagtggagtggcaggttgaaaaacataagcaggaactccgtgagaacgaatccaattgggcctacaaggccctgctgcgcgtgaagcacttaatgttattgcattatgaaatatttgtattcctccttctgtgtagcattttatttttcataatattcctcttcattttccactatatatag

SEQ ID NO: 198128 - DNA, 924 bp, Artificial Sequence
  derived and/or modified sequence
atgggcggcttccagagaggcaagtacggcaccatggccgagggcagaagcgaggacaacctgagcgccaccccccccgccctgagaatcatcctggtgggcaagaccggctgcggcaagagcgccaccggcaacagcatcctgggccagcccgtgttcgagagcaagctgagagcccagagcgtgaccagaacctgccaggtgaagaccggcacctggaacggcagaaaggtgctggtggtggacacccccagcatcttcgagagccaggccgacacccaggagctgtacaagaacatcggcgactgctacctgctgagcgcccccggcccccacgtgctgctgctggtgatccagctgggcagattcaccgcccaggacaccgtggccatcagaaaggtgaaggaggtgttcggcaccggcgccatgagacacgtggtgatcctgttcacccacaaggaggacctgggcggccaggccctggacgactacgtggccaacaccgacaactgcagcctgaaggacctggtgagagagtgcgagagaagatactgcgccttcaacaactggggcagcgtggaggagcagagacagcagcaggccgagctgctggccgtgatcgagagactgggcagagagagagagggcagcttccacagcaacgacctgttcctggacgcccagctgctgcagagaaccggcgccggcgcctgccaggaggactacagacagtaccaggccaaggtggagtggcaggtggagaagcacaagcaggagctgagagagaacgagagcaactgggcctacaaggccctgctgagagtgaagcacctgatgctgctgcactacgagatcttcgtgttcctgctgctgtgcagcatcctgttcttcatcatcttcctgttcatcttccactacatctag

SEQ ID NO: 198129 - protein, 364 aa, Artificial Sequence
  derived and/or modified sequence
MNRAPLKRSRILHMALTGASDPSAEAEANGEKPFLLRALQIALVVSLYWVTSISMVFLNKYLLDSPSLRLDTPIFVTFYQCLVTTLLCKGLSALAACCPGAVDFPSLRLDLRVARSVLPLSVVFIGMITFNNLCLKYVGVAFYNVGRSLTTVFNVLLSYLLLKQTTSFYALLTCGIIIGGFWLGVDQEGAEGTLSWLGTVFGVLASLCVSLNAIYTTKVLPAVDGSIWRLTFYNNVNACILFLPLLLLLGELQALRDFAQLGSAHFWGMMTLGGLFGFAIGYVTGLQIKFTSPLTHNVSGTAKACAQTVLAVLYYEETKSFLWWTSNMMVLGGSSAYTWVRGWEMKKTPEEPSPKDSEKSAMGV

SEQ ID NO: 198130 - protein, 351 aa, Artificial Sequence
  derived and/or modified sequence
MALTGASDPSAEAEANGEKPFLLRALQIALVVSLYWVTSISMVFLNKYLLDSPSLRLDTPIFVTFYQCLVTTLLCKGLSALAACCPGAVDFPSLRLDLRVARSVLPLSVVFIGMITFNNLCLKYVGVAFYNVGRSLTTVFNVLLSYLLLKQTTSFYALLTCGIIIGGFWLGVDQEGAEGTLSWLGTVFGVLASLCVSLNAIYTTKVLPAVDGSIWRLTFYNNVNACILFLPLLLLLGELQALRDFAQLGSAHFWGMMTLGGLFGFAIGYVTGLQIKFTSPLTHNVSGTAKACAQTVLAVLYYEETKSFLWWTSNMMVLGGSSAYTWVRGWEMKKTPEEPSPKDSEKSAMGV

SEQ ID NO: 198131 - protein, 246 aa, Artificial Sequence
  derived and/or modified sequence
MNRAPLKRSRILHMALTGASDPSAEAEANGEKPFLLRALQIALVVSLYWVTSISMVFLNKYLLDSPSLRLDTPIFVTFYQCLVTTLLCKGLSALAACCPGAVDFPSLRLDLRVARSVLPLSVVFIGMITFNNLCLKYVGVAFYNVGRSLTTVFNVLLSYLLLKQTTSFYALLTCGIIIGGFWLGVDQEGAEGTLSWLGTVFGVLASLCVSLNAIYTTKVLPAVDGSIWRLTFYNNVNACILFLPLL

SEQ ID NO: 198132 - DNA, 1095 bp, Artificial Sequence
  derived and/or modified sequence
atgaatagagcacccctcaaacgatcccgcatccttcacatggctttaaccggcgcgtccgatccgtccgccgaagccgaagctaacggcgagaaaccttttctgctgagggccttgcagatcgccctggttgtgagcctgtactgggtcacaagtatctcaatggtattcctgaataagtacttgttagactctccttctctgcgactcgatacacctatatttgttaccttctatcagtgtttggtcactacactcctttgtaagggcttgtcagctctcgccgcatgctgccccggagccgttgacttccctagcctccgcctggatctgagagtggccaggagcgtacttcccctttcggttgtgttcatcggaatgatcactttcaataacctgtgtttaaagtatgtcggcgtagccttctacaatgtggggagaagccttacaaccgtgttcaatgtactcttatcctatttactgctgaaacagactacctcattttatgctttgctaacatgtggaatcataattgggggcttctggctgggggtcgatcaggaaggtgccgagggaactctcagttggctgggaactgtgttcggagtcttggctagcctctgcgtgagcttaaacgccatttacacgaccaaggtcctgccggccgtggatggctctatttggagactgacattttacaacaacgtgaatgcctgtatacttttcctaccactgctgttgttgctcggggaactacaagcgctccgtgacttcgctcaactcggaagcgctcacttttggggcatgatgaccctggggggcctgtttgggttcgccatcggttatgtaactgggctacagatcaagttcacaagccctctcacacataacgtgtccggtacagccaaggcctgcgctcagactgtgcttgccgttctgtattacgaggaaacaaagagcttcctgtggtggacctctaacatgatggtgctgggagggagcagtgcctatacttgggtcagagggtgggagatgaagaaaaccccagaagagccttcccccaaagatagtgaaaaatccgccatgggtgtgtag

SEQ ID NO: 198133 - DNA, 741 bp, Artificial Sequence
  derived and/or modified sequence
atgaaccgcgcccctcttaagcggagtaggatactgcatatggcattaacgggtgcgtcagatccctctgctgaggccgaggctaacggagagaagcccttcctgctgcgggccttgcaaatcgccctggtggtttcgctatattgggtcactagcattagtatggtatttttgaataaatacctgcttgattcgcccagtctgcggctcgacaccccaatctttgtcactttctaccagtgcctggtcactacactactttgcaagggcttatcggctctggcagcatgctgtccgggggccgttgactttccctccttacgcctggatttgagggtggcacgatcagtattgcctttgtccgtcgtttttattggaatgatcacctttaacaacctttgcctgaagtatgtgggagttgctttctacaatgtcggccgaagtctgaccactgtgttcaacgttctcctctcgtatctgctcctgaaacagaccaccagtttctatgcccttctcacttgtggaattattatcggggggttctggctcggagtggatcaggaaggtgcagaaggaactctgtcttggctgggtaccgtgtttggggtgctggcctccctgtgcgtaagtctgaacgctatatacactaccaaggtgttgcctgcggtggacggcagcatttggagactgacattttataacaacgtgaacgcttgcatcttgtttctccctcttctgtag

SEQ ID NO: 198134 - DNA, 1095 bp, Artificial Sequence
  derived and/or modified sequence
atgaacagagcccccctgaagaggagccgcatcctgcacatggccctgactggagccagtgaccccagcgctgaggccgaggccaatggagagaagcccttcctgctgcgggccctgcagatcgccctggtggtgtccctgtactgggtgaccagcatctccatggtgttcctgaacaagtacctgctggacagccccagcctgcggctggacacccccatctttgtgaccttctaccagtgcctggtgaccaccctgctgtgcaagggcctgagcgccctggccgcctgctgccctggagctgtggacttccccagcctgcggctggacctgcgggtggcccggtctgtgctgcccctgtctgtggtgttcatcggcatgatcaccttcaacaacctgtgcctgaagtatgtgggcgtggccttctacaacgtgggccgcagcctgaccaccgtcttcaacgtgctgctgagctacctgctgctgaagcagaccaccagcttctacgccctgctgacctgtggcatcatcatcggcggcttctggctgggcgtggaccaggagggcgctgagggcaccctgtcctggctgggcaccgtgtttggagtgctggccagcctgtgtgtgtccctgaatgccatctacaccaccaaggtgctgcctgctgtggatggcagcatctggaggctgaccttctacaacaacgtgaatgcctgcatcctcttcctgcccctgctgctgctgctgggggagctgcaggccctgcgggactttgcccagctgggcagcgcccacttctggggcatgatgaccctgggcggcctgtttggatttgccatcggctacgtgacaggcctgcagatcaagttcaccagccccctgacccacaacgtgtctggaacagccaaggcctgtgcccagacagtgctggccgtgctgtactatgaggagaccaagagcttcctgtggtggaccagcaacatgatggtgctgggcggcagcagcgcctacacctgggtgcggggctgggagatgaagaagaccccagaggagcccagccccaaggacagcgagaagagcgccatgggcgtgtag

SEQ ID NO: 198135 - DNA, 741 bp, Artificial Sequence
  derived and/or modified sequence
atgaacagagcccccctgaagaggagccgcatcctgcacatggccctgactggagccagtgaccccagcgctgaggccgaggccaatggagagaagcccttcctgctgcgggccctgcagatcgccctggtggtgtccctgtactgggtgaccagcatctccatggtgttcctgaacaagtacctgctggacagccccagcctgcggctggacacccccatctttgtgaccttctaccagtgcctggtgaccaccctgctgtgcaagggcctgagcgccctggccgcctgctgccctggagctgtggacttccccagcctgcggctggacctgcgggtggcccggtctgtgctgcccctgtctgtggtgttcatcggcatgatcaccttcaacaacctgtgcctgaagtatgtgggcgtggccttctacaacgtgggccgcagcctgaccaccgtcttcaacgtgctgctgagctacctgctgctgaagcagaccaccagcttctacgccctgctgacctgtggcatcatcatcggcggcttctggctgggcgtggaccaggagggcgctgagggcaccctgtcctggctgggcaccgtgtttggagtgctggccagcctgtgtgtgtccctgaatgccatctacaccaccaaggtgctgcctgctgtggatggcagcatctggaggctgaccttctacaacaacgtgaatgcctgcatcctcttcctgcccctgctgtag

SEQ ID NO: 198136 - DNA, 1095 bp, Artificial Sequence
  derived and/or modified sequence
atgaaccgggcccccctgaagcggagccggatcctgcacatggccctgaccggagccagcgatccctcggccgaggccgaagccaatggagagaaaccctttctgcttcgcgcgctgcagatcgcactggtggtgtctctgtattgggtgacctctatatctatggtcttccttaacaagtacttgctcgacagtccttctctaaggctggatacgcccatctttgtcaccttttatcaatgcctcgtcacaaccctgttgtgcaagggcctgtccgctcttgccgcctgctgccccggagctgtggactttcctagtctccgtttagatctccgggttgctaggtccgtcctccccttgagcgttgttttcatcggaatgattacatttaacaatctgtgcttgaagtacgtgggggtggctttctataacgtgggccggtccttaacgacggtgtttaatgttcttctcagttatctcctgctgaagcagacaacatccttttacgctcttctgacttgtggaattattattgggggtttctggcttggggtcgaccaggaaggagcagagggcaccctgtcttggctgggcactgtcttcggcgtgttggcgtccctatgcgtgtccttaaacgccatatacaccacaaaagtgttgcccgctgtggacgggtccatctggcgactgactttctataataatgtgaatgcctgcatactttttttacccttactgcttctgctgggagagctgcaagcgttgcgagattttgctcaactggggtcagcacacttctgggggatgatgactctaggcggcctgtttggcttcgccatcggatatgtgactggactccagattaaatttactagtcccctcacacacaacgtctccggcactgcgaaggcatgtgctcagaccgtcctggctgtcttgtactacgaggaaacaaagtccttcttgtggtggactagtaacatgatggtgctgggtgggtccagcgcttatacctgggtgcgaggttgggagatgaaaaaaactcccgaggagccatccccaaaggattcagaaaaaagcgctatgggcgtgtag

SEQ ID NO: 198137 - DNA, 741 bp, Artificial Sequence
  derived and/or modified sequence
atgaaccgggcccccctgaagcggagccggatcctgcacatggcccttacaggcgccagtgatccttccgccgaagccgaagcaaatggcgagaagccttttctcctaagggcgctacaaattgctcttgtcgtgagcctctattgggtcacttccatctcaatggtgttcttgaataaatatttactggatagcccatctcttcgcctggacacacctattttcgtaacattctaccagtgcctcgttaccacccttctttgcaagggactgtctgcactggcggcgtgttgtccgggcgccgtggatttccccagcctgcgtttggacctacgggttgcacgctcagtgctgccactctctgtggtatttatcgggatgattacgtttaataacctatgcctgaagtatgtcggagtggcattctacaacgtgggtcggagccttacaaccgtatttaacgtcctcctgagctacttacttcttaaacagactacaagtttctacgcgttactcacctgcggaattattatagggggcttttggctgggcgttgaccaggaaggcgcagaagggacactatcttggttgggaaccgtttttggagtgttggcttccctgtgtgtctccctcaatgcaatatatacgacaaaagttttgccggcggttgatggaagcatctggagattgaccttttacaacaacgtgaacgcctgcatcctgtttcttccactgttatag

SEQ ID NO: 198138 - DNA, 1095 bp, Artificial Sequence
  derived and/or modified sequence
atgaacagagcccctttaaagagaagtcggattctgcacatggccctaaccggtgcatccgaccccagcgcagaggccgaggcgaatggcgaaaagccctttctgctccgcgcactgcaaatagccttagtggtcagtttatactgggtgacttctatcagtatggtgtttctgaataagtaccttctggacagcccaagccttcggttggatacccctatttttgtgacattctatcaatgtttagtgactaccctgttatgtaagggccttagcgcccttgccgcttgctgcccaggcgcagttgatttcccaagccttcgcttggatctaagagttgctaggagcgttcttcctctgtctgttgtgtttatagggatgattacatttaataatttatgcctaaagtatgtgggggtcgcattctacaacgtcggccgaagtctcacgaccgtgtttaacgtgctcctctcctacctcctgttgaagcagaccaccagtttctacgctctactgacttgtggaattataatcgggggattctggctgggtgtggaccaggagggcgcagaaggcacactgtcctggttgggtaccgtgttcggagtgttggcatccctgtgcgttagcttaaatgccatatacactactaaagtccttcccgctgttgatggatctatctggaggttgacattttacaataatgtgaacgcatgcattctctttctgcccttgctgttgctgctgggtgagctccaagccctgagagactttgcacaattagggtccgctcacttttggggtatgatgaccctcggcggactgttcggtttcgctataggatatgttaccgggctccagataaaattcacctcccctctcacccacaacgtctcgggcaccgccaaggcctgcgcgcagaccgtgctggcagtgctgtattacgaggagaccaagagcttcctttggtggacgtctaacatgatggtgttaggcggatcttcagcttatacctgggtgcggggatgggagatgaagaagacccccgaagagccatctcccaaagattcagagaaatccgccatgggggtgtag

SEQ ID NO: 198139 - DNA, 741 bp, Artificial Sequence
  derived and/or modified sequence
atgaaccgggctcctctaaagcgatctcgcattctacatatggctctgaccggcgcaagtgacccctcagccgaggccgaggctaacggagaaaagcccttcttattaagggcgctgcagatagcattggttgtgagcctgtactgggtgacaagcatttcaatggtgttccttaacaaatatctgctcgacagcccctctctgagactagatactcccatcttcgtgacattctatcagtgccttgtgacaaccctactgtgcaagggcctctcggccctggctgcttgctgccccggtgctgtagatttcccctctttgcgtcttgatctccgcgtggcaagaagcgtcctgccccttagtgtcgtgttcattgggatgatcactttcaacaacctctgtttgaagtatgtgggcgtcgcattctacaatgtaggcaggtcattgaccacagttttcaatgtgctgttaagttatcttctgctgaagcagaccaccagtttctacgcactgttgacctgtggtattattattggcggattctggctgggcgtcgatcaagagggagccgagggcacactcagctggcttggaacagtattcggtgttctagcttcattgtgcgttagcctgaatgctatttacacaactaaggtattgccggctgtcgacggttccatttggcgactcacattctacaataatgtgaacgcctgcatactcttcctgcccctgctctag

SEQ ID NO: 198140 - DNA, 4171 bp, Artificial Sequence
  derived and/or modified sequence
agtgcaccggaggaggtgagcgccaggtcgccttcgcggcccggggacacaggcagggacgcgggagctgatgcggctggaccggccggggaaacagtattttctggaaggggtaagagatgctgtcttgagcctttggaatctcggatccgggccgcccagaggacctcgacaggagcacagggaggacaaactgaagtccgagagaggcggcgtggcctccggcctcggggagcgctgccgggggtctcgggcttgggagagggcctgggggcggtgaaaatggggggaaaggaggggaccacaacattgttatggaagagtgagctcggattggcagagggacgcggggctgcaacgcgagtctccggaggtggaggggtccaggctgatgtagcgccgcccgggtcctgggtcggggttccgggaagtggacctgcgagccaagcctagccaagtcgggggacggaggctccggggcggacggagctgagggtgggcaggcgaggttgatggagcccttccaggaagcagggcgaggctcaagcacccagaaaaacctgtggctgccgaggtcccccgccagcagcgggcagcggagcgcaggggcggggctggggactggcgaactccgcctctctggggctgtcgctttaagggcaaggcggggcgtgcgggccctttaaggccacgtgggggcgtgtcaggaagtgagtccagggcccgcctcccggggagtcggcctcggatgtccggaggctcctgggctgagccggcgacagagcccgggaaggcagcgagacgtgggcgccggcccagccccctcccgcgtccttcagccccaagccccgagcccctctgacccttccgcagccctccctccagccgcgcccggcctccggcagctccctgtacgcctccctccccctgcccgcccctccctcccacagccgcccatgacgccctctcggcacctcttcccactctgccacgcgtccttttcctgcaccttcgccccgcgtacctactcctgccccgccctgccattcctctcccctcccttctctctgcgacccctccctgttaggccccagcctcttctcccctcacaggtcttctctgtcctggcctcaccgccttatcctattcctctcccttgccctgtgtcttgtctcagagccccctcggggtgggagtaggttgtggagcagcacaactgggctcaccccaaagcagaacttctcaatccatgaggacaatggggaggcctttaggccagcccacatgtgacaatggagggctgcggcttccttgcggagagcacaagtgagctcactgccctggactccagggaatcagagttctggccgcggggtgacccagctcctctgctaccatgaatagggcccctctgaagcggtccaggatcctgcacatggcgctgaccggggcctcagacccctctgcagaggcagaggccaacggggagaagccctttctgctgcgggcattgcagatcgcgctggtggtctccctctactgggtcacctccatctccatggtgttccttaataagtacctgctggacagcccctccctgcggctggacacccccatcttcgtcaccttctaccagtgcctggtgaccacgctgctgtgcaaaggcctcagcgctctggccgcctgctgccctggtgccgtggacttccccagcttgcgcctggacctcagggtggcccgcagcgtcctgcccctgtcggtggtcttcatcggcatgatcaccttcaataacctctgcctcaagtacgtcggtgtggccttctacaatgtgggccgctcactcaccaccgtcttcaacgtgctgctctcctacctgctgctcaagcagaccacctccttctatgccctgctcacctgcggtatcatcatcgggggcttctggcttggtgtggaccaggagggggcagaaggcaccctgtcgtggctgggcaccgtcttcggcgtgctggctagcctctgtgtctcgctcaacgccatctacaccacgaaggtgctcccggcggtggacggcagcatctggcgcctgactttctacaacaacgtcaacgcctgcatcctcttcctgcccctgctcctgctgctcggggagcttcaggccctgcgtgactttgcccagctgggcagtgcccacttctgggggatgatgacgctgggcggcctgtttggctttgccatcggctacgtgacaggactgcagatcaagttcaccagtccgctgacccacaatgtgtcgggcacggccaaggcctgtgcccagacagtgctggccgtgctctactacgaggagaccaagagcttcctctggtggacgagcaacatgatggtgctgggcggctcctccgcctacacctgggtcaggggctgggagatgaagaagactccggaggagcccagccccaaagacagcgagaagagcgccatgggggtgtgagcaccacaggcaccctggatggcccggccccggggcccgtacacaggcggggccagcacagtagtgaaggcggtctcctggaccccagaagcgtgctgtggtgtggactgggtgctacttatagacccaatcagaatacggtggttgagaaggaaccagtgtttacaagtaatatcagaaagttgaaggaaccagtgtttacaagtaataccagaaagttgccaaacccttctctatcctctcgtatttctgagtttttgtccttcccgagggagcaccctagtgagagttgaaccccttccttctgcctccagggcctgtctgcctccacatcactctgaggacagggacaggcaacaaccttgaagggacagcaatggcaaagccacaaaggcttcactgtactcaggggagatggccctaccacagccacctggagagggttgggaagccttccgtctgcggtgggcaggcagcctcaccctgggcccacagaccggccttcctttggaggaaagtgtggcctggactgagggaggaaatgagcgagttccctctgacaccagcagatccccaggggctgctgggcagtggcctgggaatggggtggattgtgagaaagtgctcaccatctatacaccctgtatgtccagcttttgaacacaagggaaccatgcttctcttagaggttaagcagggtcattaacatcctcccccagtccctaacatcacattgtcctgcgtggctcctctggccctgagtggcacctgtccctctggtctcccagcacctggcccaggtaacagccttctgaaagcagagccaaggagctgcttctctcttctcccagttctacctccccagaagccttcctccccaggtggggctgatggagcaagggtccagactaggagccttccaccccagctgtgtctggcgcccctagatctctgcaagggaggtgttacagctggttctgagccgcttgccttgtgatggtaagacaccaacctttacattcttccctgaggttgtggctgacagagcctgcttggccccactgttagtccagcgagctcctatatcaaaatgccgtaggccgggtggcttacaaacaacagaaacgtattgctcacagtcctggggggctgggacgcccaagatcaagaggccagcagattcggactccgctgagggctgtttcccgatccatagatggtgccttctcgctgtatcctcaatggtagaagcacaaacaagcaagctccttcctgcctcttttataaggactccaaccctgttcatgagggttccgcccccatgacccaatcagctccaaaggccccacctcctaatactgtcaccttgggggtgagaattccaatgtgaatttgcagggggagtgggggacacacacaaatttcggggccataccacccttcaccacaccctcctgcgctcagggtggcttgcagtccctggcccttctggtgggcatttggtatgtcctttctcttggggtgatttctgatgtttttactctatatagtgaaaagctagggagagcgggtcttctcccccctccctctccagtcccctcacaatcccagatgggttctaatgcagctgctggggcctgatgccctgagttgtttgtgattcaataaagaatccataag

SEQ ID NO: 198141 - DNA, 1756 bp, Artificial Sequence
  derived and/or modified sequence
tccccgcacgcacttctggaagtgcaagccggtagcgcggcgggccagggatacagccaagtcccgggacgtgccagctgcggtaactgaagccgggtcccgggcgggcgggggtaccagggacaggagtagccttggaaagaggagagggcctcctcccacgaccgtccggatcaccgcctctccgccggcacccccggggcccatgccgcgaacaggccggcgaggctggcaaggtgcccgggcccggggcggaaagcaggaagtcgatcccgcgggcgcggcccagggtgcggcgctgcagatgcagcacggggtcgcggggcgggcgcccagtgcaccggaggaggtgagcgccaggtcgccttcgcggcccggggacacaggcagggacgcgggagctgatgcggctggaccggccggggaaacagtattttctggaagggggcccctctgaagcggtccaggatcctgcacatggcgctgaccggggcctcagacccctctgcagaggcagaggccaacggggagaagccctttctgctgcgggcattgcagatcgcgctggtggtctccctctactgggtcacctccatctccatggtgttccttaataagtacctgctggacagcccctccctgcggctggacacccccatcttcgtcaccttctaccagtgcctggtgaccacgctgctgtgcaaaggcctcagcgctctggccgcctgctgccctggtgccgtggacttccccagcttgcgcctggacctcagggtggcccgcagcgtcctgcccctgtcggtggtcttcatcggcatgatcaccttcaataacctctgcctcaagtacgtcggtgtggccttctacaatgtgggccgctcactcaccaccgtcttcaacgtgctgctctcctacctgctgctcaagcagaccacctccttctatgccctgctcacctgcggtatcatcatcgggggcttctggcttggtgtggaccaggagggggcagaaggcaccctgtcgtggctgggcaccgtcttcggcgtgctggctagcctctgtgtctcgctcaacgccatctacaccacgaaggtgctcccggcggtggacggcagcatctggcgcctgactttctacaacaacgtcaacgcctgcatcctcttcctgcccctgctcctgctgctcggggagcttcaggccctgcgtgactttgcccagctgggcagtgcccacttctgggggatgatgacgctgggcggcctgtttggctttgccatcggctacgtgacaggactgcagatcaagttcaccagtccgctgacccacaatgtgtcgggcacggccaaggcctgtgcccagacagtgctggccgtgctctactacgaggagaccaagagcttcctctggtggacgagcaacatgatggtgctgggcggctcctccgcctacacctgggtcaggggctgggagatgaagaagactccggaggagcccagccccaaagacagcgagaagagcgccatgggggtgtgagcaccacaggcaccctggatggcccggccccggggcccgtacacaggcggggccagcacagtagtgaaggcggtctcctggaccccagaagcgtgctgtggtgtggactgggtgctacttatagacccaatcagaatacggtggttgagaaggaaccagtgtttacaagtaatatcagaaagttgaaggaaccagtgtttacaagtaataccagaaagttgcc

SEQ ID NO: 198142 - DNA, 3111 bp, Artificial Sequence
  derived and/or modified sequence
tccccgcacgcacttctggaagtgcaagccggtagcgcggcgggccagggatacagccaagtcccgggacgtgccagctgcggtaactgaagccgggtcccgggcgggcgggggtaccagggacaggagtagccttggaaagaggagagggcctcctcccacgaccgtccggatcaccgcctctccgccggcacccccggggcccatgccgcgaacaggccggcgaggctggcaaggtgcccgggcccggggcggaaagcaggaagtcgatcccgcgggcgcggcccagggtgcggcgctgcagatgcagcacggggtcgcggggcgggcgcccagtgcaccggaggagggcccctctgaagcggtccaggatcctgcacatggcgctgaccggggcctcagacccctctgcagaggcagaggccaacggggagaagccctttctgctgcgggcattgcagatcgcgctggtggtctccctctactgggtcacctccatctccatggtgttccttaataagtacctgctggacagcccctccctgcggctggacacccccatcttcgtcaccttctaccagtgcctggtgaccacgctgctgtgcaaaggcctcagcgctctggccgcctgctgccctggtgccgtggacttccccagcttgcgcctggacctcagggtggcccgcagcgtcctgcccctgtcggtggtcttcatcggcatgatcaccttcaataacctctgcctcaagtacgtcggtgtggccttctacaatgtgggccgctcactcaccaccgtcttcaacgtgctgctctcctacctgctgctcaagcagaccacctccttctatgccctgctcacctgcggtatcatcatcgggggcttctggcttggtgtggaccaggagggggcagaaggcaccctgtcgtggctgggcaccgtcttcggcgtgctggctagcctctgtgtctcgctcaacgccatctacaccacgaaggtgctcccggcggtggacggcagcatctggcgcctgactttctacaacaacgtcaacgcctgcatcctcttcctgcccctgctcctgctgctcggggagcttcaggccctgcgtgactttgcccagctgggcagtgcccacttctgggggatgatgacgctgggcggcctgtttggctttgccatcggctacgtgacaggactgcagatcaagttcaccagtccgctgacccacaatgtgtcgggcacggccaaggcctgtgcccagacagtgctggccgtgctctactacgaggagaccaagagcttcctctggtggacgagcaacatgatggtgctgggcggctcctccgcctacacctgggtcaggggctgggagatgaagaagactccggaggagcccagccccaaagacagcgagaagagcgccatgggggtgtgagcaccacaggcaccctggatggcccggccccggggcccgtacacaggcggggccagcacagtagtgaaggcggtctcctggaccccagaagcgtgctgtggtgtggactgggtgctacttatagacccaatcagaatacggtggttgagaaggaaccagtgtttacaagtaatatcagaaagttgaaggaaccagtgtttacaagtaataccagaaagttgccaaacccttctctatcctctcgtatttctgagtttttgtccttcccgagggagcaccctagtgagagttgaaccccttccttctgcctccagggcctgtctgcctccacatcactctgaggacagggacaggcaacaaccttgaagggacagcaatggcaaagccacaaaggcttcactgtactcaggggagatggccctaccacagccacctggagagggttgggaagccttccgtctgcggtgggcaggcagcctcaccctgggcccacagaccggccttcctttggaggaaagtgtggcctggactgagggaggaaatgagcgagttccctctgacaccagcagatccccaggggctgctgggcagtggcctgggaatggggtggattgtgagaaagtgctcaccatctatacaccctgtatgtccagcttttgaacacaagggaaccatgcttctcttagaggttaagcagggtcattaacatcctcccccagtccctaacatcacattgtcctgcgtggctcctctggccctgagtggcacctgtccctctggtctcccagcacctggcccaggtaacagccttctgaaagcagagccaaggagctgcttctctcttctcccagttctacctccccagaagccttcctccccaggtggggctgatggagcaagggtccagactaggagccttccaccccagctgtgtctggcgcccctagatctctgcaagggaggtgttacagctggttctgagccgcttgccttgtgatggtaagacaccaacctttacattcttccctgaggttgtggctgacagagcctgcttggccccactgttagtccagcgagctcctatatcaaaatgccgtaggccgggtggcttacaaacaacagaaacgtattgctcacagtcctggggggctgggacgcccaagatcaagaggccagcagattcggactccgctgagggctgtttcccgatccatagatggtgccttctcgctgtatcctcaatggtagaagcacaaacaagcaagctccttcctgcctcttttataaggactccaaccctgttcatgagggttccgcccccatgacccaatcagctccaaaggccccacctcctaatactgtcaccttgggggtgagaattccaatgtgaatttgcagggggagtgggggacacacacaaatttcggggccataccacccttcaccacaccctcctgcgctcagggtggcttgcagtccctggcccttctggtgggcatttggtatgtcctttctcttggggtgatttctgatgtttttactctatatagtgaaaagctagggagagcgggtcttctcccccctccctctccagtcccctcacaatcccagatgggttctaatgcagctgctggggcctgatgccctgagttgtttgtgattcaataaagaatcc

SEQ ID NO: 198143 - DNA, 1787 bp, Artificial Sequence
  derived and/or modified sequence
ctcggatgtccggaggctcctgggctgagccggcgacagagcccgggaaggcagcgagacgtgggcgccggcccagccccctcccgcgtccttcagccccaagccccgagcccctctgacccttccgcagccctccctccagccgcgcccggcctccggcagctccctgtacgcctccctccccctgcccgcccctccctcccacagccgcccatgacgccctctcggcacctcttcccactctgccacgcgtccttttcctgcaccttcgccccgcgtacctactcctgccccgccctgccattcctctcccctcccttctctctgcgacccctccctgttaggccccagcctcttctcccctcacaggtcttctctgtcctggcctcaccgccttatcctattcctctcccttgccctgtgtcttgtctcagagccccctcggggtgggagtaggttgtggagcagcacaactgggctcaccccaaagcagaacttctcaatccatgaggacaatggggaggcctttaggccagcccacatgtgacaatggagggctgcggcttccttgcggagagcacaagtgagctcactgccctggactccagggaatcagagttctggccgcggggtgacccagctcctctgctaccatgaatagggcccctctgaagcggtccaggatcctgcacatggcgctgaccggggcctcagacccctctgcagaggcagaggccaacggggagaagccctttctgctgcgggcattgcagatcgcgctggtggtctccctctactgggtcacctccatctccatggtgttccttaataagtacctgctggacagcccctccctgcggctggacacccccatcttcgtcaccttctaccagtgcctggtgaccacgctgctgtgcaaaggcctcagcgctctggccgcctgctgccctggtgccgtggacttccccagcttgcgcctggacctcagggtggcccgcagcgtcctgcccctgtcggtggtcttcatcggcatgatcaccttcaataacctctgcctcaagtacgtcggtgtggccttctacaatgtgggccgctcactcaccaccgtcttcaacgtgctgctctcctacctgctgctcaagcagaccacctccttctatgccctgctcacctgcggtatcatcatcgggggcttctggcttggtgtggaccaggagggggcagaaggcaccctgtcgtggctgggcaccgtcttcggcgtgctggctagcctctgtgtctcgctcaacgccatctacaccacgaaggtgctcccggcggtggacggcagcatctggcgcctgactttctacaacaacgtcaacgcctgcatcctcttcctgccccttttataaggactccaaccctgttcatgagggttccgcccccatgacccaatcagctccaaaggccccacctcctaatactgtcaccttgggggtgagaattccaatgtgaatttgcagggggagtgggggacacacacaaatttcggggccataccacccttcaccacaccctcctgcgctcagggtggcttgcagtccctggcccttctggtgggcatttggtatgtcctttctcttggggtgatttctgatgtttttactctatatagtgaaaagctagggagagcgggtcttctcccccctccctctccagtcccctcacaatcccagatgggttctaatgcagctgctggggcctgatgccctgagttgtttgtgattcaataaagaatccataag

SEQ ID NO: 198144 - DNA, 1095 bp, Artificial Sequence
  derived and/or modified sequence
atgaacagagcccccctgaagagaagcagaatcctgcacatggccctgaccggcgccagcgaccccagcgccgaggccgaggccaacggcgagaagcccttcctgctgagagccctgcagatcgccctggtggtgagcctgtactgggtgaccagcatcagcatggtgttcctgaacaagtacctgctggacagccccagcctgagactggacacccccatcttcgtgaccttctaccagtgcctggtgaccaccctgctgtgcaagggcctgagcgccctggccgcctgctgccccggcgccgtggacttccccagcctgagactggacctgagagtggccagaagcgtgctgcccctgagcgtggtgttcatcggcatgatcaccttcaacaacctgtgcctgaagtacgtgggcgtggccttctacaacgtgggcagaagcctgaccaccgtgttcaacgtgctgctgagctacctgctgctgaagcagaccaccagcttctacgccctgctgacctgcggcatcatcatcggcggcttctggctgggcgtggaccaggagggcgccgagggcaccctgagctggctgggcaccgtgttcggcgtgctggccagcctgtgcgtgagcctgaacgccatctacaccaccaaggtgctgcccgccgtggacggcagcatctggagactgaccttctacaacaacgtgaacgcctgcatcctgttcctgcccctgctgctgctgctgggcgagctgcaggccctgagagacttcgcccagctgggcagcgcccacttctggggcatgatgaccctgggcggcctgttcggcttcgccatcggctacgtgaccggcctgcagatcaagttcaccagccccctgacccacaacgtgagcggcaccgccaaggcctgcgcccagaccgtgctggccgtgctgtactacgaggagaccaagagcttcctgtggtggaccagcaacatgatggtgctgggcggcagcagcgcctacacctgggtgagaggctgggagatgaagaagacccccgaggagcccagccccaaggacagcgagaagagcgccatgggcgtgtag

SEQ ID NO: 198145 - DNA, 741 bp, Artificial Sequence
  derived and/or modified sequence
atgaacagagcccccctgaagagaagcagaatcctgcacatggccctgaccggcgccagcgaccccagcgccgaggccgaggccaacggcgagaagcccttcctgctgagagccctgcagatcgccctggtggtgagcctgtactgggtgaccagcatcagcatggtgttcctgaacaagtacctgctggacagccccagcctgagactggacacccccatcttcgtgaccttctaccagtgcctggtgaccaccctgctgtgcaagggcctgagcgccctggccgcctgctgccccggcgccgtggacttccccagcctgagactggacctgagagtggccagaagcgtgctgcccctgagcgtggtgttcatcggcatgatcaccttcaacaacctgtgcctgaagtacgtgggcgtggccttctacaacgtgggcagaagcctgaccaccgtgttcaacgtgctgctgagctacctgctgctgaagcagaccaccagcttctacgccctgctgacctgcggcatcatcatcggcggcttctggctgggcgtggaccaggagggcgccgagggcaccctgagctggctgggcaccgtgttcggcgtgctggccagcctgtgcgtgagcctgaacgccatctacaccaccaaggtgctgcccgccgtggacggcagcatctggagactgaccttctacaacaacgtgaacgcctgcatcctgttcctgcccctgctgtag

SEQ ID NO: 198146 - protein, 374 aa, Artificial Sequence
  derived and/or modified sequence
MKVDMANFAISSIRPHLMQQSVEYERKKFQEILERQPNSLDFVTQWLEEASEDLMTQKYKHALPVGGMAAGSGDMPRLSPVAVQNYAYLKLLKWDHLQRPFPETVLMDQSRFHELQLQLEQLTILGAVLLVTFSMAAPGISSQADFAEKLKMIVKILLTDMHLPSFHLKDVLTTIGEKVCLEVSSCLSLCGSSPFTTDKETVLKGQIQAVASPDDPIRRIMESRILTFLETYLASGHQKPLPTVPGGLSPVQRELEEVAIKFARLVNYNKMVFCPYYDAILRKRWISFGNFFGSSNTDMSPWNCRTDYPMSLHIRFPKNHVIEAPMTIQLCFQEPCNKALSLLNIPLEAKGILDRSFLQRRLKPYRIRFCCRAL

SEQ ID NO: 198147 - protein, 509 aa, Artificial Sequence
  derived and/or modified sequence
MSENLDKSNVNEAGKSKSNDSEEGLEDAVEGADEALQKAIKSDSSSPQRVQRPHSSPPRFVTVEELLETARGVTNMALAHEIVVNGDFQIKPVELPENSLKKRVKEIVHKAFWDCLSVQLSEDPPAYDHAIKLVGEIKETLLSFLLPGHTRLRNQITEVLDLDLIKQEAENGALDISKLAEFIIGMMGTLCAPARDEEVKKLKDIKEIVPLFREIFSVLDLMKVDMANFAISSIRPHLMQQSVEYERKKFQEILERQPNSLDFVTQWLEEASEDLMTQKYKHALPVGGMAAGSGDMPRLSPVAVQNYAYLKLLKWDHLQRPFPETVLMDQSRFHELQLQLEQLTILGAVLLVTFSMAAPGISSQADFAEKLKMIVKILLTDMHLPSFHLKDVLTTIGEKVCLEVSSCLSLCGSSPFTTDKETVLKGQIQAVASPDDPIRRIMESRILTFLETYLASGHQKPLPTVPGGLSPVQRELEEVAIKFARLVNYNKMVFCPYYDAILSKILVRS

SEQ ID NO: 198148 - protein, 144 aa, Artificial Sequence
  derived and/or modified sequence
MSENLDKSNVNEAGKSKSNDSEEGLEDAVEGADEALQKAIKSDSSSPQRVQRPHSSPPRFVTVEELLETARGVTNMALAHEIVVNGDFQIKPVELPENSLKKRVKEIVHKAFWDCLSVQLSEDPPAYDHAIKLVGEIKETLLSF

SEQ ID NO: 198149 - DNA, 1125 bp, Artificial Sequence
  derived and/or modified sequence
atgaaggtggacatggccaacttcgccatcagcagcatcagaccccacctgatgcagcagagcgtggagtacgagagaaagaagttccaggagatcctggagagacagcccaacagcctggacttcgtgacccagtggctggaggaggccagcgaggacctgatgacccagaagtacaagcacgccctgcccgtgggcggcatggccgccggcagcggcgacatgcccagactgagccccgtggccgtgcagaactacgcctacctgaagctgctgaagtgggaccacctgcagagacccttccccgagaccgtgctgatggaccagagcagattccacgagctgcagctgcagctggagcagctgaccatcctgggcgccgtgctgctggtgaccttcagcatggccgcccccggcatcagcagccaggccgacttcgccgagaagctgaagatgatcgtgaagatcctgctgaccgacatgcacctgcccagcttccacctgaaggacgtgctgaccaccatcggcgagaaggtgtgcctggaggtgagcagctgcctgagcctgtgcggcagcagccccttcaccaccgacaaggagaccgtgctgaagggccagatccaggccgtggccagccccgacgaccccatcagaagaatcatggagagcagaatcctgaccttcctggagacctacctggccagcggccaccagaagcccctgcccaccgtgcccggcggcctgagccccgtgcagagagagctggaggaggtggccatcaagttcgccagactggtgaactacaacaagatggtgttctgcccctactacgacgccatcctgagaaagagatggatcagcttcggcaacttcttcggcagcagcaacaccgacatgagcccctggaactgcagaaccgactaccccatgagcctgcacatcagattccccaagaaccacgtgatcgaggcccccatgaccatccagctgtgcttccaggagccctgcaacaaggccctgagcctgctgaacatccccctggaggccaagggcatcctggacagaagcttcctgcagagaagactgaagccctacagaatcagattctgctgcagagccctgtag

SEQ ID NO: 198150 - DNA, 1530 bp, Artificial Sequence
  derived and/or modified sequence
atgagcgagaacctggacaagagcaacgtgaacgaggccggcaagagcaagagcaacgacagcgaggagggcctggaggacgccgtggagggcgccgacgaggccctgcagaaggccatcaagagcgacagcagcagcccccagagagtgcagagaccccacagcagcccccccagattcgtgaccgtggaggagctgctggagaccgccagaggcgtgaccaacatggccctggcccacgagatcgtggtgaacggcgacttccagatcaagcccgtggagctgcccgagaacagcctgaagaagagagtgaaggagatcgtgcacaaggccttctgggactgcctgagcgtgcagctgagcgaggacccccccgcctacgaccacgccatcaagctggtgggcgagatcaaggagaccctgctgagcttcctgctgcccggccacaccagactgagaaaccagatcaccgaggtgctggacctggacctgatcaagcaggaggccgagaacggcgccctggacatcagcaagctggccgagttcatcatcggcatgatgggcaccctgtgcgcccccgccagagacgaggaggtgaagaagctgaaggacatcaaggagatcgtgcccctgttcagagagatcttcagcgtgctggacctgatgaaggtggacatggccaacttcgccatcagcagcatcagaccccacctgatgcagcagagcgtggagtacgagagaaagaagttccaggagatcctggagagacagcccaacagcctggacttcgtgacccagtggctggaggaggccagcgaggacctgatgacccagaagtacaagcacgccctgcccgtgggcggcatggccgccggcagcggcgacatgcccagactgagccccgtggccgtgcagaactacgcctacctgaagctgctgaagtgggaccacctgcagagacccttccccgagaccgtgctgatggaccagagcagattccacgagctgcagctgcagctggagcagctgaccatcctgggcgccgtgctgctggtgaccttcagcatggccgcccccggcatcagcagccaggccgacttcgccgagaagctgaagatgatcgtgaagatcctgctgaccgacatgcacctgcccagcttccacctgaaggacgtgctgaccaccatcggcgagaaggtgtgcctggaggtgagcagctgcctgagcctgtgcggcagcagccccttcaccaccgacaaggagaccgtgctgaagggccagatccaggccgtggccagccccgacgaccccatcagaagaatcatggagagcagaatcctgaccttcctggagacctacctggccagcggccaccagaagcccctgcccaccgtgcccggcggcctgagccccgtgcagagagagctggaggaggtggccatcaagttcgccagactggtgaactacaacaagatggtgttctgcccctactacgacgccatcctgagcaagatcctggtgagaagctag

SEQ ID NO: 198151 - DNA, 1125 bp, Artificial Sequence
  derived and/or modified sequence
atgaaggtggatatggctaactttgctatttcatccattagaccacatttgatgcaacagtctgtggagtatgagcgaaaaaaattccaggagattctggagaggcagccaaactcacttgatttcgtaacccagtggctagaagaagccagcgaagacctgatgacccagaagtataaacatgccctgcccgtgggcggcatggccgctgggagcggcgacatgccgcggctctcaccggtagctgtacagaactacgcatatctcaagctccttaaatgggatcatctgcagagacctttccctgaaaccgttcttatggatcagagccgattccacgagctccagctccagttggaacagttaacgattctaggagctgtgctgctcgtcaccttctcaatggccgcacctggtatatcttctcaagcagatttcgcagagaagctgaaaatgatcgtgaaaatcctgctgactgacatgcatcttcctagtttccacctcaaagacgtcctaactactattggcgagaaagtttgcttggaggtgtcatcatgtctgagcctgtgtggttcctctccgttcacgaccgataaagaaacagtacttaaggggcagatccaagcagtggcgagccccgacgatcccattcggcggatcatggaaagtagaatcttaacattcttggagacctatctggcatccggacaccaaaagcccctaccgaccgtgccgggtgggctgagcccagtccagcgcgagcttgaagaggtcgctataaagttcgcccgcctggtgaactacaacaagatggtattttgcccctattatgatgcaattttgaggaaaagatggataagtttcggcaacttctttggcagcagcaataccgacatgagtccctggaactgccgcacggactatcctatgtccctgcatattaggtttccaaagaaccacgtgatcgaggcccccatgactatccagctatgttttcaggaaccatgcaacaaagcactgtcgcttctgaacatccctctggaagccaagggaatcctagatcgaagcttcctccagcgaagattgaaaccatatcgcatcagattctgctgccgcgctctctag

SEQ ID NO: 198152 - DNA, 1530 bp, Artificial Sequence
  derived and/or modified sequence
atgtctgagaatttagacaaatctaacgttaatgaagctggcaaatctaagagtaatgattccgaagagggactggaggacgccgtggagggggctgatgaggccctgcaaaaagcaatcaaatctgattcatcatctccacaaagggtgcaacggccccatagctccccccctcgcttcgtcactgtagaagagttgctcgagacagccaggggcgtgactaatatggctttggcacacgagattgtggtgaacggagattttcagatcaaacccgtggaactgccagaaaactcactgaaaaagagagttaaagagatcgtgcataaggccttttgggattgtttaagtgtgcagctaagcgaagaccctcccgcctacgaccacgctataaaattggtcggagagataaaagaaacgctactttcctttctgctgcccgggcatactagactcagaaaccagataaccgaggttttggacctagatcttattaagcaggaagccgaaaacggagctctggacatctcaaaactggccgaattcatcatcgggatgatgggtacgctgtgcgcgcccgcgcgggatgaagaggtcaagaagctgaaagatataaaggagatagtgccactgtttcgcgaaatcttctctgtgctggacttgatgaaggtggacatggctaactttgccatcagtagcattagaccgcacttgatgcaacagagcgtcgagtacgagaggaagaagtttcaggagattctcgaaaggcaacctaactccctggattttgtcacccagtggctcgaagaggcgagtgaggacctgatgacccagaagtataaacacgcacttcctgttggcggtatggctgcaggttcaggggacatgcctaggctgagccccgtggctgtccaaaattacgcctatctgaagctcctgaagtgggaccacctgcagcggccttttccagagacagtcttgatggaccagtctcgcttccacgagttgcagttgcagctggagcagctcaccattttaggcgcagtgttactggtgacattttcaatggctgcacccggaatcagtagccaggcagatttcgcggaaaagctgaagatgattgtgaagatactgttgaccgatatgcatctgccctcattccaccttaaagacgttctcactaccattggggaaaaggtgtgtttagaagtgtcttcatgtctcagcctgtgtgggtcctccccgttcactacagataaggagacggtcttaaaaggccagatccaggctgtggcctcccctgatgatcccatccgccgcattatggagtctaggatcctgactttcctggaaacatacctcgcaagtggacaccagaagcctctacccactgtcccaggcggcttatcccccgtccagcgcgagttggaggaggttgccattaagtttgcccgattagtgaattacaacaaaatggtgttttgtccttattacgacgccatcctcagcaaaatccttgtaaggtcctag

SEQ ID NO: 198153 - DNA, 1530 bp, Artificial Sequence
  derived and/or modified sequence
atgagcgagaatctggacaaatccaatgtcaacgaggccggcaagtccaagtcgaacgacagcgaggaaggcttggaggatgccgtggagggtgcggatgaggcactgcagaaagcaataaagtccgatagttcaagccctcaaagggtgcaaaggccccatagttcccccccacgttttgtgacagtagaggagctccttgaaactgcaagaggcgttactaatatggcattggctcatgaaattgtagtgaatggcgatttccaaattaaaccagttgaactgccagaaaattctctgaagaaaagagtgaaggaaattgtgcacaaagctttttgggactgtttatcagtacagctctcagaagatccacctgcttatgatcacgcaatcaagttggtaggggagattaaagaaacattactgagttttctgctacccgggcacacacgcttacggaaccagattactgaagtgctcgacctggatctgatcaagcaggaggctgagaatggggcgctcgatatttccaaactcgccgaattcatcattggtatgatggggacactctgtgcacccgctagggatgaagaagtgaagaaactgaaggacatcaaagagattgtacccctctttagggagatctttagcgtccttgacctgatgaaagtcgatatggctaattttgcaattagcagcatcagacctcacctcatgcagcaaagcgtcgaatacgaaagaaaaaaattccaagagatattggaacggcagcccaattctttggatttcgtgactcaatggctggaggaggcctccgaagaccttatgacccagaaatacaagcacgctcttcccgtgggcggtatggctgcagggagtggggacatgccaagactgtcacctgttgctgttcaaaattacgcatacttgaagcttttgaagtgggaccacttgcaacgtccctttccagaaaccgtcttgatggatcagagcagattccacgagcttcagttgcaactggaacagttgactatcctgggcgccgtactgcttgtgacctttagcatggcagcaccaggaatctcttctcaggcagacttcgcagaaaagcttaaaatgattgtgaaaatcctcctaaccgatatgcatttaccgagctttcatcttaaggatgttctcacaactattggcgagaaggtatgcttagaagtgtcttcctgcctgtcgctgtgcggttcctccccctttactacagataaggaaaccgttcttaaaggccagatacaggctgttgcgagccccgatgatccaatcaggagaataatggaaagcagaattttaacatttctggaaacttatctggccagtggccaccagaaaccccttccgacagtgccaggtggactgtcccccgttcagcgggaactagaggaggtggccataaaattcgccagactggtgaattataacaagatggtgttttgcccgtactacgacgcaatactgagcaagattctggtgcgctcctag

SEQ ID NO: 198154 - DNA, 1530 bp, Artificial Sequence
  derived and/or modified sequence
atgagtgaaaacctggataaatccaatgtcaacgaggccggcaagagcaaaagcaacgactctgaggagggcctcgaagatgccgttgagggcgctgatgaggcacttcagaaggcaatcaaatcagacagcagctctccccaaagggtccagaggccccacagctcccctccacgtttcgtgaccgttgaggagctgctggaaacggcccggggcgtaaccaatatggccctggcacacgagatagtggttaatggagacttccagataaaaccagttgagctaccagaaaacagtctgaagaagcgcgtgaaggagattgtccacaaggcattttgggactgtctcagtgtgcagctgtcagaggacccaccagcatatgaccatgccattaagttggtgggggagatcaaagaaaccttgcttagttttctgctgcccggtcacacacgactacggaaccagatcaccgaagtcttggatctggacctaatcaaacaagaagccgagaatggagctctggatatctcaaagttggctgagttcattatcggtatgatggggacgctgtgtgcccccgccagagacgaggaggtgaaaaaactgaaggacatcaaagagatcgtgcccctgttccgagaaattttttccgtcttggacctgatgaaggttgatatggccaacttcgcaataagttcaatccgacctcacttaatgcaacagtccgtcgagtacgagcggaagaagttccaagagattctggaaagacaacctaatagtctggatttcgtgacacagtggctggaggaagctagcgaagacctgatgacgcagaagtacaagcatgcactacccgtagggggcatggctgcaggcagcggtgacatgccgagactgtctcccgtcgccgtgcaaaactacgcttatctgaagctcctgaagtgggatcaccttcagaggccattcccagagacggttcttatggatcagagccgattccatgagctccagctgcagctggagcaactgactattctgggagcagttttactggtgaccttctccatggccgctccggggatcagtagccaggctgattttgccgagaagctgaagatgatagtgaagatcctgctcacagatatgcacctgccatcctttcacttgaaagacgtgcttaccaccattggtgaaaaggtgtgcctggaggtctcatcttgcctctctctgtgtggatcaagcccattcaccactgacaaggagaccgtgctgaaagggcaaatccaggccgtcgcaagcccagacgaccctatccggaggattatggaaagcagaatactaacatttctcgaaacctacttggcaagcggccatcagaagccccttccgactgtgccaggaggcctgagcccagtccagcgcgaacttgaggaggtggctattaagttcgcacgcctcgtcaattacaacaagatggtgttctgtccttattacgacgccattttgtcaaaaatactggtgcggtcgtag

SEQ ID NO: 198155 - DNA, 1125 bp, Artificial Sequence
  derived and/or modified sequence
atgaaggtggacatggccaactttgccatcagcagcatccggccccacctgatgcagcagagcgtggagtatgaaaggaagaagttccaggagatcctggagcggcagcccaacagcctggactttgtgacccagtggctggaggaggccagcgaggacctgatgacccagaagtacaagcacgccctgcctgtgggcggcatggccgccggcagcggggacatgccccggctgagccctgtggccgtgcagaactatgcctacctgaagctgctgaagtgggaccacctgcagaggcccttccctgagaccgtgctgatggaccagagccgcttccacgagctgcagctgcagctggagcagctgaccatcctgggcgctgtgctgctggtgaccttctccatggccgcccctggcatcagcagccaggccgactttgctgagaagctgaagatgattgtgaagatcctgctgacagacatgcacctgcccagcttccacctgaaggatgtgctgaccaccatcggggagaaggtgtgcctggaggtgagcagctgcctgagcctgtgtggcagcagccccttcaccacagacaaggagaccgtgctgaagggccagatccaggccgtggccagcccagatgaccccatccgccgcatcatggagagccgcatcctgaccttcctggagacctacctggccagcggccaccagaagcccctgcccaccgtgcctgggggcctgagccctgtgcagcgggagctggaggaggtggccatcaagtttgcccggctggtgaactacaacaagatggtgttctgcccctactatgatgccatcctgaggaagcgctggatcagctttggaaacttcttcggcagcagcaacacagacatgagcccctggaactgcaggacagactaccccatgagcctgcacatccgcttccccaagaaccacgtgattgaggcccccatgaccatccagctgtgcttccaggagccctgcaacaaggccctgagcctgctgaacatccccctggaggccaagggcatcctggacaggagcttcctgcagaggcggctgaagccctaccgcatccgcttctgctgccgggccctgtag

SEQ ID NO: 198156 - DNA, 1530 bp, Artificial Sequence
  derived and/or modified sequence
atgtctgagaacctggacaagagcaatgtgaatgaagctgggaagagcaagagcaatgattctgaggagggcctggaggatgctgtggagggcgcagatgaggccctgcagaaggccatcaagagtgacagcagcagcccccagagggtgcagaggccccacagcagccccccaagatttgtgacagtggaggagctgctggagacagcccggggcgtgaccaacatggccctggcccacgagatcgtggtgaatggagacttccagatcaagcctgtggagctgcctgagaacagcctgaagaagagggtgaaggagatcgtgcacaaggccttctgggactgcctgtctgtgcagctgtctgaggaccccccagcctatgaccacgccatcaagctggtgggggagatcaaggagaccctgctgtccttcctgctgcccggccacacccggctgaggaaccagatcacagaggtgctggacctggacctgatcaagcaggaggccgagaatggagccctggacatcagcaagctggccgagttcatcatcggcatgatgggcaccctgtgtgccccagccagagatgaggaggtgaagaagctgaaggacatcaaggagatcgtgcccctcttccgggagatcttctctgtgctggacctgatgaaggtggacatggccaactttgccatcagcagcatccggccccacctgatgcagcagagcgtggagtatgaaaggaagaagttccaggagatcctggagcggcagcccaacagcctggactttgtgacccagtggctggaggaggccagcgaggacctgatgacccagaagtacaagcacgccctgcctgtgggcggcatggctgctggcagcggggacatgccccggctgagccctgtggccgtgcagaactatgcctacctgaagctgctgaagtgggaccacctgcagaggcccttccctgagaccgtgctgatggaccagagccgcttccacgagctgcagctgcagctggagcagctgaccatcctgggcgctgtgctgctggtgaccttctccatggccgcccctggcatcagcagccaggccgactttgctgagaagctgaagatgattgtgaagatcctgctgacagacatgcacctgcccagcttccacctgaaggatgtgctgaccaccatcggggagaaggtgtgcctggaggtgagcagctgcctgagcctgtgtggcagcagccccttcaccacagacaaggagaccgtgctgaagggccagatccaggccgtggccagcccagatgaccccatccgccgcatcatggagagccgcatcctgaccttcctggagacctacctggccagcggccaccagaagcccctgcccaccgtgcctgggggcctgagccctgtgcagcgggagctggaggaggtggccatcaagtttgcccggctggtgaactacaacaagatggtgttctgcccctactatgatgccatcctgagcaagatcctggtgcgctcctag

SEQ ID NO: 198157 - DNA, 1125 bp, Artificial Sequence
  derived and/or modified sequence
atgaaggtggacatggccaacttcgccatcagcagcatccggccccacttgatgcagcagtcagtggaatacgagaggaagaaattccaggagatcttagagagacagccgaattctttggatttcgtgactcagtggctggaagaagcctcggaggatttaatgactcagaagtacaagcacgcgctgccagtggggggaatggcagccggctccggagatatgcctaggctctcacctgtggctgtgcagaactatgcttacctgaagcttctgaaatgggatcacctccagcggccatttcctgaaactgtgctcatggaccaaagccgtttccacgagctgcagttacagctggaacagctcacaattctgggcgctgtcctcttagtcaccttcagcatggctgcacccgggatctctagccaggcagattttgccgagaaacttaagatgatcgtaaagattctccttacagatatgcacctaccttctttccatcttaaggacgtattaaccactataggagagaaagtatgtctggaggtgtcttcatgtctatcactgtgcgggagctccccattcaccacagataaggagacagtgctcaagggccagatccaagccgtggccagccccgacgaccctataaggagaatcatggagagccgaatacttaccttcctggaaacgtatttggcctccgggcaccagaagccgttgcctactgtccctggtgggttatccccggtgcagagggagctggaagaagtggcaattaagtttgccaggctggtgaattacaataagatggtgttttgcccttattatgacgccatcctgcgtaaacgatggatatcattcgggaatttttttggctcttcgaataccgatatgagcccctggaattgcaggacggactacccaatgtcactacatatccgctttccaaaaaaccatgtgatcgaagcccccatgactattcaactctgctttcaggaaccttgcaacaaagctttatcactgctgaacattcctctggaggccaaaggcatccttgaccggtctttcctgcagagacgtctcaagccctaccggattagattctgctgccgagcactatag

SEQ ID NO: 198158 - DNA, 1530 bp, Artificial Sequence
  derived and/or modified sequence
atgagcgagaacctggacaagagcaacgtgaacgaggccggcaagtcaaagtctaacgactctgaggaaggcctggaggatgcagttgaaggggcagatgaggcactccagaaagcgataaaatctgacagtagttccccacagagggtgcaacgtccacatagtagcccaccaagattcgtgactgtcgaggagctgctggaaaccgccagaggagttacaaacatggcactcgcacatgaaattgtggtaaatggagatttccagatcaaaccagttgagctaccggaaaattcactgaaaaagcgcgttaaagagatagtgcacaaagccttttgggattgcctgagcgtacagctcagtgaagatccacccgcctacgaccatgcaataaaactcgtgggcgaaatcaaggaaacactgctcagttttcttctgccaggccacacacggttacgcaaccaaatcacagaggtgctggacttggacctgatcaagcaggaggccgaaaatggcgcactcgatattagcaagctggcagaatttatcattggaatgatggggaccctctgtgcccctgctcgagacgaggaggtgaagaaactgaaggacatcaaggagattgtcccactctttcgcgaaattttctctgtgttagatctgatgaaggtggacatggccaacttcgcaattagctcaattcgcccacacctgatgcagcagagcgttgagtatgagaggaaaaaattccaggagattctggagcggcagccgaactcgctcgactttgtaacccaatggctcgaggaggccagcgaggaccttatgactcagaagtataagcacgccctgcctgtgggggggatggccgccggctccggcgatatgccaaggctgtctcccgtggcagtgcagaattacgcatatctgaaactcctgaagtgggaccacctgcagcgtcctttcccggagaccgtgctgatggaccagtcacgttttcatgaattgcagctccaacttgaacaactgaccattcttggcgccgtgcttctcgtgacattctccatggcagcacctggaatcagctcacaagctgacttcgccgaaaagctgaagatgatagtgaagatcttgctcaccgatatgcatcttccgagctttcacctcaaagatgtcttgaccacaatcggcgagaaagtatgtctggaggttagctcctgtctgagcctgtgcggcagtagccccttcaccaccgataaggaaaccgtactgaagggccagatccaggcagtggcttccccagacgatcccatccgtcgcatcatggagtcaagaattctgacattcctggaaacatatctggcctcaggacatcaaaagccattacccactgtgcccggagggctatccccggtgcagcgtgagctggaagaagtcgccatcaagttcgcacggctggtgaactataacaagatggtgttttgcccttattacgacgccatacttagtaagattctggtcagaagctag

SEQ ID NO: 198159 - DNA, 1530 bp, Artificial Sequence
  derived and/or modified sequence
atgagcgagaacctggacaagagcaacgtgaacgaggccggcaagtcaaaatccaatgacagcgaagaggggctggaggatgccgtggagggagcagatgaggctctccagaaagctattaaaagcgatagttcctcaccacaaagagttcagcgtccccatagctctcccccaaggtttgtgaccgtcgaagagctcctggagaccgcccgaggcgttaccaatatggccctggcacatgaaattgtcgtgaatggggatttccaaataaaacccgtggaactccctgaaaattccctgaaaaagagagtgaaggaaatcgtccataaggcgttctgggattgcctgtctgtccagctctcggaggaccctcccgcatacgaccatgcgattaagctagtgggcgagatcaaagagaccctgctgtccttccttctccctggacacactcggttacgcaatcagattaccgaggtcttggatctggacctcattaaacaggaggccgaaaacggcgcccttgatatttcgaagctcgccgaatttattatcggcatgatgggaactctgtgcgctcccgcacgggacgaggaagtaaagaagctcaaggacattaaggaaattgtgccactttttcgcgaaatcttttccgtattagatttaatgaaggtggacatggcaaatttcgcaataagttcaatccggccccacctcatgcagcaatccgtggagtacgaacggaagaaattccaggagattttagagcggcagcccaacagcttggacttcgtaacccagtggttggaagaggcgagcgaggacctgatgacacagaaatacaaacacgccctgcccgtggggggcatggccgctggtagtggcgacatgccaagactgtccccagtggctgtccagaattatgcgtacctcaagctgcttaaatgggaccatttgcagcgcccattccctgaaaccgtgttgatggatcagagccggttccacgaattacaactccagctggaacaactaacgatcctgggcgcagtgctgttggtgacatttagtatggccgctccagggataagcagccaggcagacttcgcagaaaaattgaagatgatcgtcaagattttacttacggacatgcacttgcccagcttccatctgaaagatgtcttgactacgatcggggagaaggtttgcctggaggttagttcttgtctgagcctctgcggttccagcccatttaccactgataaggaaaccgttctgaagggacagatccaggccgttgccagcccggatgaccctatcaggcggatcatggaatccaggatcctaacattccttgaaacttacttggccagtggccaccagaaaccattaccaacggtacctgggggactatcgcccgtccagcgcgagctggaagaagtcgccataaaattcgccaggttggtgaattacaacaaaatggttttctgcccttactatgacgcaatcctttccaagattctggttcggtcatag

SEQ ID NO: 198160 - DNA, 1530 bp, Artificial Sequence
  derived and/or modified sequence
atgagcgagaacctggacaagagcaacgtgaacgaggccggcaagtcaaaaagtaacgactctgaagaaggactggaagacgccgttgagggagcagatgaggcgttgcaaaaagctatcaagtccgactcgtcctcaccccaacgcgtgcagcgtccgcacagttctcctcccaggtttgtcaccgttgaagagctgcttgagactgcacggggtgtcactaacatggccctggcacacgagatagtggtgaatggtgactttcagatcaaacccgtggaactacccgaaaacagtctaaagaagcgcgtgaaagagatcgtgcacaaggctttctgggattgtctgagcgtgcagctgagtgaagaccccccagcttatgaccatgctatcaaactagtcggggagattaaggagacgctactctcttttttacttcccggccatacaaggttacggaatcaaattaccgaagttctagatctcgatctgataaaacaggaggctgagaatggtgccctcgacatatcaaaactggctgaattcatcatcgggatgatgggaactttgtgcgctcctgctcgggatgaggaagtgaagaaactaaaggatattaaggaaatcgtgcctcttttccgggaaatttttagtgtgcttgacctgatgaaggttgacatggctaactttgctattagttccattcgtccgcatctgatgcagcagagcgttgaatacgagcggaagaaatttcaagagatcctggagcgccagcctaattcccttgacttcgtgactcagtggctcgaggaagcgagcgaagacttgatgacgcagaaatataagcatgcactgcccgtaggcggcatggccgcggggagtggcgacatgccccgcttgtcacccgtggctgttcagaactacgcctacctgaagctgttgaagtgggaccacttgcagcgaccgttcccagagacggttctgatggatcaaagcagattccacgaattacagctgcaacttgaacagctgacaattttaggggccgtcctgctggtcactttcagtatggcagctccagggataagtagtcaggccgatttcgcggagaaactgaaaatgattgtgaaaatactgctcacagatatgcatctgccttcatttcatttgaaggacgttttgaccaccattggagaaaaagtttgtctggaggtgagcagctgcctatcgctctgtgggagctccccttttactaccgataaagagaccgtcctgaaaggccagatacaagcagttgcctcgcccgatgaccccatccgtaggatcatggaaagccgcattctgacatttctggaaacgtatctggcaagcggtcatcaaaagccactaccaacagttcccggagggctaagtccagttcagcgcgagctggaggaggtggccatcaaatttgctaggctggtgaattacaataagatggttttttgcccttattatgacgcaatactgagtaagattttggttcggagttag

SEQ ID NO: 198161 - DNA, 1125 bp, Artificial Sequence
  derived and/or modified sequence
atgaaggtggacatggccaattttgccatctccagcattaggccccatcttatgcagcagagcgtggaatacgagcggaaaaaattccaggagatcctggagagacagccgaacagcctggattttgtgacgcagtggctggaggaagccagcgaagacctcatgactcaaaagtacaagcacgctttgccagtgggcggtatggccgcaggttctggagacatgccccgtttgagccctgtggccgtccagaactatgcatacctcaaactgttgaaatgggatcatctccagcggccttttccagagactgtattgatggaccagtcgaggttccacgagctccaacttcagctggagcaactgactatactcggcgctgtactgctggtaaccttcagcatggccgctcccggaatatctagtcaggccgacttcgcggaaaagctgaagatgatcgtgaaaatcttgctcacggacatgcacctgccctcattccacctcaaggacgtgttgaccactataggcgagaaggtgtgtctcgaggtaagttcctgccttagtttatgcggcagctctcccttcaccacagataaggaaacagtgctaaaaggacaaatacaggccgtcgcctcccccgatgaccctatcagacggattatggagtcccgcatactgacctttttagagacctaccttgcctccggccaccagaagcccctgccaacggttccaggagggctgtcgcccgttcagagggaattggaggaggtcgcaataaaatttgcgaggctggtgaattataataagatggtgttttgcccctactatgatgctattcttcgaaaacgttggataagtttcggcaacttcttcggctcgtcaaacaccgatatgtcaccctggaactgtagaacagattatccaatgtcactacacatccgctttcctaaaaaccacgttatagaggcgccaatgaccatccagttatgctttcaggagccttgtaataaggccctgtcactgcttaatatcccgctggaagcgaagggtatcctggacagatccttcctgcaacgccgtctgaagccttatagaatccgattctgctgcagggccctctag

SEQ ID NO: 198162 - DNA, 1530 bp, Artificial Sequence
  derived and/or modified sequence
atgtccgaaaacctcgataagtcaaatgtgaatgaagctggtaagtcaaaaagcaacgactctgaagaaggactagaggacgccgtagagggtgctgatgaggctctgcagaaagcaatcaagagtgattcctcctctcctcagagagttcaaagaccacactcaagcccccctcgtttcgttaccgttgaggagctccttgagactgctaggggagtgacgaacatggcactagctcatgagatagtggtgaacggggacttccagatcaagcccgtagagttgcccgaaaattcattgaagaaacgagtcaaggaaatagtgcacaaagcattttgggactgtctgtccgttcagctctctgaagaccctcccgcttatgaccacgccattaaactggtgggggagatcaaggaaacactcctctctttcctgctacccggtcataccaggctccggaatcaaatcaccgaggtcctggacctcgacctgatcaagcaggaagcagagaacggagctttggacatttctaagctggcagaattcatcatcggaatgatgggcacactgtgtgctcctgccagggacgaagaagtgaaaaaactgaaggatatcaaggagattgtgccactgtttagggagatcttttcagtgctcgacctcatgaaagtggatatggccaactttgctatctcctccattaggccgcatctgatgcagcagtccgtcgaatatgagcgaaagaagtttcaggagatactcgaacggcagcctaacagtttggatttcgtgacgcagtggttagaggaagcctccgaagaccttatgacacagaaatacaaacatgccttgccggtgggtgggatggctgcgggatccggcgacatgccgcgactgagtccagtcgcagtgcaaaattacgcgtatttaaagctcctcaaatgggatcatctgcagaggccttttccggaaactgtactaatggatcagtccaggtttcacgaactgcagctgcagctggagcagctaaccattctgggagccgtgcttttagtcactttctcaatggctgcgcctggaatttcctcccaggcggatttcgccgaaaagctcaagatgatcgtgaagatactgctcacagatatgcacctgcccagctttcatctgaaagacgtgttgacaacaatcggagagaaggtgtgtttggaggtctcctcatgtctgtctttgtgcggcagctcccccttcaccaccgacaaggagaccgttcttaaaggccagatccaggccgtggcgagccctgacgacccaatccggcgaatcatggagtccagaatcttaaccttcttggagacttacctggcaagtggacaccagaaaccactccctacagttcccggtggccttagccctgtgcaacgtgaactggaggaggtggccataaagttcgcgaggttggtgaattacaataaaatggtgttctgcccatactatgatgccattctgagtaagatcctggtacgcagctag

SEQ ID NO: 198163 - DNA, 1530 bp, Artificial Sequence
  derived and/or modified sequence
atgtcggagaatctcgacaaatctaacgtcaacgaggccggaaaaagtaagagtaatgattccgaggagggcttagaagatgccgtcgaaggcgctgacgaagccctccaaaaggccataaagtcagactctagcagccctcagagggttcaaagaccccactcctcgccaccgaggttcgtcactgtggaagagctgttagagactgccaggggcgtgacaaatatggcattggctcacgaaatagtagttaacggcgatttccagatcaagccagtggaattacccgaaaattcactcaagaaacgcgtaaaggagatagtacataaggctttttgggattgcttatccgtgcagttgtctgaagaccccccagcctacgatcacgctatcaaattggtcggcgaaattaaggagacactcctgtccttcctcctgccaggtcacactcgactgcgaaaccagattaccgaggtgctggacctcgacctgataaaacaggaagcagagaatggagcgctggacatctcaaagctcgctgaatttattataggcatgatgggcactttgtgtgctccagctcgcgacgaagaagtcaagaagttgaaggatattaaggaaatagtgcctttatttcgggaaatattttcagtgctggacttaatgaaagtggatatggcaaattttgccatatcctccatccgaccacacttaatgcagcagagcgttgagtacgaaagaaaaaagttccaagaaatcctggagcgccagcctaatagtcttgattttgtgacccaatggttagaggaagcaagcgaagacttgatgacccaaaagtataagcatgctttacctgtcggtggaatggctgccggatctggggacatgccgcgtctgtccccagtggccgttcagaactacgcgtacctcaaactgttgaaatgggaccatctccaaaggccattcccagagactgtgttaatggaccagtccaggtttcatgagttacaattacagctggaacagcttaccatcttaggtgctgtactcttggttacttttagcatggccgctcccggaatttcctcccaggcggatttcgctgaaaaactgaagatgattgtgaagatacttctcacggacatgcatttgccaagcttccatcttaaagacgttctgactaccatcggagaaaaggtgtgcctggaggtaagctcatgcctctctttgtgcggcagcagccctttcacaacagataaggagacagtcctaaagggacagattcaggccgtggcttcacccgacgaccccatccgtcggattatggaatctaggatcctaaccttcctggagacctacctggcctcagggcatcaaaagcctctgcccactgtacccggaggcctgtctcctgtgcagcgagaactggaagaagtggctatcaagttcgcccgactggtaaactataataagatggtgttctgcccatactatgacgcaatcctctctaagattcttgtgcgatcctag

SEQ ID NO: 198164 - DNA, 1530 bp, Artificial Sequence
  derived and/or modified sequence
atgtctgagaatcttgacaaaagcaacgtaaatgaggccggaaagtctaagtccaacgacagcgaggagggcctggaggacgccgtggagggggctgacgaagcccttcagaaagcaattaagtccgactccagtagtccccaaagggttcagcgaccacattcctcaccaccccgtttcgtgacagtcgaggaacttctggagacagctagaggcgtcacaaacatggctctggctcatgaaatcgttgtcaatggcgatttccaaattaagcccgtcgaattacctgagaattctctgaagaagagggtcaaggagattgtgcataaggcattctgggattgtctgagcgtgcagctttccgaagacccacccgcatacgatcacgctattaagctggtcggtgagatcaaggaaaccctcctgtccttcctgctgccaggtcacacaaggctgcgtaaccaaatcactgaggtgctggatcttgatctgatcaagcaagaggcggaaaatggcgctctggatatttctaaactggccgaattcatcatcggcatgatgggcacgctgtgcgccccagcccgtgatgaggaggtcaagaagctgaaagacattaaggagattgtgccattgtttagggagattttttctgttcttgacctgatgaaagtggatatggcgaactttgcgatcagtagcataagaccccatctcatgcagcaatcagttgaatacgagaggaagaaatttcaggagatacttgagagacagcctaattctctggatttcgtgacacagtggctggaagaggcctctgaagatctgatgactcagaagtataagcatgccctgccagtcggaggcatggctgccggttcaggggacatgccacgactgtcccccgtagccgtacagaactatgcctacctgaagctcctaaagtgggatcatctgcagcgaccgtttcctgagacagtgttgatggaccagtccagattccacgagttgcaacttcagctggaacaacttacaatccttggagccgttttgttggttacattttcaatggcagcacccggtatttcctcacaggcggacttcgcggagaaactaaaaatgatcgttaaaatactgctgacggacatgcatctgccctcttttcatctgaaggacgtgttgaccaccataggagagaaagtgtgtcttgaagtgtcatcttgtctgagtctctgtggctcctctccgtttacaaccgataaagagaccgtacttaagggtcagattcaagcggtagctagtccggatgatcccatcagacggattatggagagcaggatattgacatttctggagacttacctagcttcaggacatcagaagcctctgcccactgtgcctggaggacttagcccagtgcagagggagctcgaagaagtggcgataaagttcgctaggctggtgaactataataagatggtgttctgtccctactacgacgccatcctgagcaaaatactcgtacgctcatag

SEQ ID NO: 198165 - DNA, 1572 bp, Artificial Sequence
  derived and/or modified sequence
gtgttggacctaatgaaagtggacatggccaactttgctatcagtagcatcaggcctcatctcatgcagcagtcagttgaatacgaaaggaagaagtttcaagagattttggagaggcaaccaaattccctggactttgtcacccagtggctggaagaagcctcagaggaccttatgactcagaagtataaacacgccctgccagtggggggaatggctgctggctctggggacatgcccaggctgagccctgttgctgtccagaattacgcttacctgaagcttctgaagtgggaccacctccagaggccgttccccgaaacagttttaatggaccagtctcgcttccacgagctccagttgcagctggaacaactgaccatcctgggggctgtgttgctggtcaccttcagcatggcagcgccaggaatttccagccaggccgactttgctgagaaactcaagatgattgtgaagattttgctaacagatatgcacctgccctccttccatctgaaggacgtcctcactaccatcggggagaaggtgtgcctggaggtgagcagctgcctctccctgtgtgggtcctctcccttcaccacggacaaggagaccgtgctcaagggccagatccaggccgtggccagtcccgatgaccccattcgcaggatcatggaatctcgaatcctgaccttcttagaaacctaccttgcctcgggtcatcagaagccattgcccacagtccctgggggactcagtccagttcagagagagctggaggaagttgctattaaatttgctcgcctggtcaactataacaagatggtcttctgtccctactacgatgcaatcctgagaaaaagatggatatcttttggcaatttctttgggtccagcaatactgatatgagtccttggaattgtaggactgattatcccatgagtctgcacattagatttccaaagaaccatgtgatagaggcaccaatgacaatacaactttgtttccaagaaccttgtaacaaagcgttgtctcttttaaacataccacttgaggcaaaaggaatcctggacaggagttttctgcagaggcgtttaaaaccctaccgaatccgcttctgctgccgtgctctgtaaatgtcatgaacaggggggacaacggctcccttttcttcatcttcatctgaatcctcgttgggccttttgacggccttgtctctccagagctgttcaatgttgatcatcggattaacacaacctcgttgataaactcttcggacagctgttattctttgattttctgcataagatcctacagcttccctgagattggataagaaatgccatcaattatattataaccaaatctcattcaacccagcaatctcactactggatatctacccaaagaacaactctatggaaaatagtatggagatttctcaaagaactaaaaattatattttagctaaatcaactgtagatgtaaaaaaaaactatacaaatacttacacgccttttaggaaattgatgtaatccacccaaatctaagaaataaaatgaaatgttaat

SEQ ID NO: 198166 - DNA, 2817 bp, Artificial Sequence
  derived and/or modified sequence
atgttttccacctctccctgaggaaacacggcgccgcccagctgcgagtcaccgcttactgaaccccttcggcaagcaggggaaagaccctcccgcctttccgtacgaagacatggcgctgccctatattgggctggcgcctcccggccaagagcagtctcctccttcctgatgctgagaagcggccgctctgaccgctgcccacccgagtcgggctgggaggaccgcccgccgcgtggcgagggatgcggcctcggaggggcagaggctgaaccgcccctgcctgccgcgcatccctccggcttccgccgcggcgccagcccgcgcctgattcgcggcgggagcggcaggagggagaacgccgactccgtggcaggaaagtgaataaacttaattgagaatgtctgaaaaccttgacaagtccaatgtaaatgaagcaggaaaatcaaaatccaatgattctgaggaaggcctcgaagatgctgtggaaggtgctgatgaagccttacaaaaagcaataaagtcagactcctccagcccccaaagagtgcagagacctcactctagtcctcctcgctttgtgacagtagaagaacttctagagacagcgagaggtgtcaccaacatggctctagcccatgaaattgtagtaaatggagactttcagattaaaccagttgaattaccagaaaacagcttgaagaagagagtaaaggagattgtacataaagcgttttgggattgcttgagtgtgcagctaagtgaagatcccccagcatatgaccatgctatcaaacttgtaggagaaatcaaagagactctcttatctttcttgctgcctggtcatactagactgagaaaccagataacagaagtcttggatctggatctgataaagcaggaagcagagaatggggcgctagacatttccaagctggcagaattcattattggcatgatggggacactgtgtgcacctgctcgagatgaggaagttaagaaactaaaggacattaaggaaatagtgccccttttcagagaaattttttctgtgttggacctaatgaaagtggacatggccaactttgctatcagtagcatcaggcctcatctcatgcagcagtcagttgaatacgaaaggaagaagtttcaagagattttggagaggcaaccaaattccctggactttgtcacccagtggctggaagaagcctcagaggaccttatgactcagaagtataaacacgccctgccagtggggggaatggctgctggctctggggacatgcccaggctgagccctgttgctgtccagaattacgcttacctgaagcttctgaagtgggaccacctccagaggccgttccccgaaacagttttaatggaccagtctcgcttccacgagctccagttgcagctggaacaactgaccatcctgggggctgtgttgctggtcaccttcagcatggcagcgccaggaatttccagccaggccgactttgctgagaaactcaagatgattgtgaagattttgctaacagatatgcacctgccctccttccatctgaaggacgtcctcactaccatcggggagaaggtgtgcctggaggtgagcagctgcctctccctgtgtgggtcctctcccttcaccacggacaaggagaccgtgctcaagggccagatccaggccgtggccagtcccgatgaccccattcgcaggatcatggaatctcgaatcctgaccttcttagaaacctaccttgcctcgggtcatcagaagccattgcccacagtccctgggggactcagtccagttcagagagagctggaggaagttgctattaaatttgctcgcctggtcaactataacaagatggtcttctgtccctactacgatgcaatcctgagtaagatcctcgtccgatcctaacgtgtatgcaccctacagcagcagtattactcactagccacagaatacctgttctgtactctaatgttgcattggaaaatggctatatagtacatgtctatttaacagcaccgattccaaagggaagaatattgtgtatcactgttgaaaagacttgttgagaaatccactgaattctattttgagagattgtatttatgagtgcaagtttacaaatcaaagaagcattttgttctcgagttttacaggtaacactcagctgttgtctccactcctcccccatcatgtccttccaaggaggctgggacctctctcttctgcaatctgggtagttctttcagatgcctcatgctgagctgacggccatccaagcgcaaaagagaccaagccatggcctcacctcctgccctccctcagacagccttgtccctcacccctcccttctggtatttttgttagaagggctatataacgtcttattgccattttctccccctatttattgcttcctccctgcctggcctagccagggctcccaagcccttttttctagaggagagttatttgtctctctctctttttttttttactttcttttttgtatttaaacattcttttaaccttcccccaaagatacagttattggactttaaaaagcttgttcttttatacaaaattactcctgcatctggttgagagcagttatgacttatgagatctagtgaaaggaaagtctttgactttcaagccttgaaagtcaaggaggaaatgtattgaaaaatagtttactgtaatgtgaacgaagagaaatgtctggaattcttactgaaaaattgaccctgagacaatacacagatgtgatgattgaattaaattctggaattaga

SEQ ID NO: 198167 - DNA, 2633 bp, Artificial Sequence
  derived and/or modified sequence
ggcctgaacagctgtttacaacggaatccggacgccgggcgcgagtggagctcagtgccagaggaggggattcccggcgccgggggacagagccccttttttcttttgccgaaagaccctttctgctggggagcctcttgtgtccagcctaggcccgcgtgcagcgccgacggatgaccgtcttcttggcaagaaagtgaataaacttaattgagaatgtctgaaaaccttgacaagtccaatgtaaatgaagcaggaaaatcaaaatccaatgattctgaggaaggcctcgaagatgctgtggaaggtgctgatgaagccttacaaaaagcaataaagtcagactcctccagcccccaaagagtgcagagacctcactctagtcctcctcgctttgtgacagtagaagaacttctagagacagcgagaggtgtcaccaacatggctctagcccatgaaattgtagtaaatggagactttcagattaaaccagttgaattaccagaaaacagcttgaagaagagagtaaaggagattgtacataaagcgttttgggattgcttgagtgtgcagctaagtgaagatcccccagcatatgaccatgctatcaaacttgtaggagaaatcaaagagactctcttatctttcttgctgcctggtcatactagactgagaaaccagataacagaagtcttggatctggatctgataaagcaggaagcagagaatggggcgctagacatttccaagctggcagaattcattattggcatgatggggacactgtgtgcacctgctcgagatgaggaagttaagaaactaaaggacattaaggaaatagtgccccttttcagagaaattttttctgtgttggacctaatgaaagtggacatggccaactttgctatcagtagcatcaggcctcatctcatgcagcagtcagttgaatacgaaaggaagaagtttcaagagattttggagaggcaaccaaattccctggactttgtcacccagtggctggaagaagcctcagaggaccttatgactcagaagtataaacacgccctgccagtggggggaatggctgctggctctggggacatgcccaggctgagccctgttgctgtccagaattacgcttacctgaagcttctgaagtgggaccacctccagaggccgttccccgaaacagttttaatggaccagtctcgcttccacgagctccagttgcagctggaacaactgaccatcctgggggctgtgttgctggtcaccttcagcatggcagcgccaggaatttccagccaggccgactttgctgagaaactcaagatgattgtgaagattttgctaacagatatgcacctgccctccttccatctgaaggacgtcctcactaccatcggggagaaggtgtgcctggaggtgagcagctgcctctccctgtgtgggtcctctcccttcaccacggacaaggagaccgtgctcaagggccagatccaggccgtggccagtcccgatgaccccattcgcaggatcatggaatctcgaatcctgaccttcttagaaacctaccttgcctcgggtcatcagaagccattgcccacagtccctgggggactcagtccagttcagagagagctggaggaagttgctattaaatttgctcgcctggtcaactataacaagatggtcttctgtccctactacgatgcaatcctgagtaagatcctcgtccgatcctaacgtgtatgcaccctacagcagcagtattactcactagccacagaatacctgttctgtactctaatgttgcattggaaaatggctatatagtacatgtctatttaacagcaccgattccaaagggaagaatattgtgtatcactgttgaaaagacttgttgagaaatccactgaattctattttgagagattgtatttatgagtgcaagtttacaaatcaaagaagcattttgttctcgagttttacaggtaacactcagctgttgtctccactcctcccccatcatgtccttccaaggaggctgggacctctctcttctgcaatctgggtagttctttcagatgcctcatgctgagctgacggccatccaagcgcaaaagagaccaagccatggcctcacctcctgccctccctcagacagccttgtccctcacccctcccttctggtatttttgttagaagggctatataacgtcttattgccattttctccccctatttattgcttcctccctgcctggcctagccagggctcccaagcccttttttctagaggagagttatttgtctctctctctttttttttttactttcttttttgtatttaaacattcttttaaccttcccccaaagatacagttattggactttaaaaagcttgttcttttatacaaaattactcctgcatctggttgagagcagttatgacttatgagatctagtgaaaggaaagtctttgactttcaagccttgaaagtcaaggaggaaatgtattgaaaaatagtttactgtaatgtgaacgaagagaaatgtctggaattcttactgaaaaattgaccctgagacaatacacagatgtgatgattgaattaaattctggaattaga

SEQ ID NO: 198168 - DNA, 2126 bp, Artificial Sequence
  derived and/or modified sequence
ggagctggggcggaggctggcggggcccgtccgggaggcgcgcggtccaagtcgcaggcatctcttcgcctcttcccgtcggatcccatcccgggatgtcgggggcaggcgaggaagaggcggggtccgcgggcgggtggagctcacccctcgaggctgtcctctcggcgcgcccgcgtcctcccctactcccggccctgccactccctcgctggcctgaacagctgtttacaacggaatccggacgccgggcgcgagtggagctcagtgccagaggaggggattcccggcgccgggggacagagccccttttttcttttgccgaaagaccctttctgctggggagcctcttgtgtccagcctaggcccgcgtgcagcgccgacggatgaccgtcttcttggcaatgaataaacttaattgagaatgtctgaaaaccttgacaagtccaatgtaaatgaagcaggaaaatcaaaatccaatgattctgaggaaggcctcgaagatgctgtggaaggtgctgatgaagccttacaaaaagcaataaagtcagactcctccagcccccaaagagtgcagagacctcactctagtcctcctcgctttgtgacagtagaagaacttctagagacagcgagaggtgtcaccaacatggctctagcccatgaaattgtagtaaatggagactttcagattaaaccagttgaattaccagaaaacagcttgaagaagagagtaaaggagattgtacataaagcgttttgggattgcttgagtgtgcagctaagtgaagatcccccagcatatgaccatgctatcaaacttgtaggagaaatcaaagagactctcttatctttcttgctgcctggtcatactagactgagaaaccagataacagaagtcttggatctggatctgataaagcaggaagcagagaatggggcgctagacatttccaagctggcagaattcattattggcatgatggggacactgtgtgcacctgctcgagatgaggaagttaagaaactaaaggacattaaggaaatagtgccccttttcagagaaattttttctgtgttggacctaatgaaagtggacatggccaactttgctatcagtagcatcaggcctcatctcatgcagcagtcagttgaatacgaaaggaagaagtttcaagagattttggagaggcaaccaaattccctggactttgtcacccagtggctggaagaagcctcagaggaccttatgactcagaagtataaacacgccctgccagtggggggaatggctgctggctctggggacatgcccaggctgagccctgttgctgtccagaattacgcttacctgaagcttctgaagtgggaccacctccagaggccgttccccgaaacagttttaatggaccagtctcgcttccacgagctccagttgcagctggaacaactgaccatcctgggggctgtgttgctggtcaccttcagcatggcagcgccaggaatttccagccaggccgactttgctgagaaactcaagatgattgtgaagattttgctaacagatatgcacctgccctccttccatctgaaggacgtcctcactaccatcggggagaaggtgtgcctggaggtgagcagctgcctctccctgtgtgggtcctctcccttcaccacggacaaggagaccgtgctcaagggccagatccaggccgtggccagtcccgatgaccccattcgcaggatcatggaatctcgaatcctgaccttcttagaaacctaccttgcctcgggtcatcagaagccattgcccacagtccctgggggactcagtccagttcagagagagctggaggaagttgctattaaatttgctcgcctggtcaactataacaagatggtcttctgtccctactacgatgcaatcctgagtaagatcctcgtccgatcctaacgtgtatgcaccctacagcagcagtattactcactagccacagaatacctgttctgtactctaatgttgcattggaaaatggctatatagtacatgtctatttaacagcaccgattccaaagggaagaatattgtgtatcactgttgaaaagacttgttgagaaatccactg

SEQ ID NO: 198169 - protein, 594 aa, Artificial Sequence
  derived and/or modified sequence
MWCLLRGLGRPGALARGALGQQQSLGARALASAGSESRDEYSYVVVGAGSAGCVLAGRLTEDPAERVLLLEAGPKDVLAGSKRLSWKIHMPAALVANLCDDRYNWCYHTEVQRGLDGRVLYWPRGRVWGGSSSLNAMVYVRGHAEDYERWQRQGARGWDYAHCLPYFRKAQGHELGASRYRGADGPLRVSRGKTNHPLHCAFLEATQQAGYPLTEDMNGFQQEGFGWMDMTIHEGKRWSAACAYLHPALSRTNLKAEAETLVSRVLFEGTRAVGVEYVKNGQSHRAYASKEVILSGGAINSPQLLMLSGIGNADDLKKLGIPVVCHLPGVGQNLQDHLEIYIQQACTRPITLHSAQKPLRKVCIGLEWLWKFTGEGATAHLETGGFIRSQPGVPHPDIQFHFLPSQVIDHGRVPTQQEAYQVHVGPMRGTSVGWLKLRSANPQDHPVIQPNYLSTETDIEDFRLCVKLTREIFAQEALAPFRGKELQPGSHIQSDKEIDAFVRAKADSAYHPSCTCKMGQPSDPTAVVDPQTRVLGVENLRVVDASIMPSMVSGNLNAPTIMIAEKAADIIKGQPALWDKDVPVYKPRTLATQR

SEQ ID NO: 198170 - protein, 155 aa, Artificial Sequence
  derived and/or modified sequence
MWCLLRGLGRPGALARGALGQQQSLGARALASAGSESRDEYSYVVVGAGSAGCVLAGRLTEDPAERVLLLEAGPKDVLAGSKRLSWKIHMPAALVANLCDDRYNWCYHTEVQRGLDGRVLYWPRGRVWGGSSSLNAMVYVRGHAEDYERWQRQGA

SEQ ID NO: 198171 - DNA, 3640 bp, Artificial Sequence
  derived and/or modified sequence
cgtgtccgagcgctggcggagcacgggccgccgcggcgcgcgcctacccccgcgcacacgtgcatgcagtgagccaggtgcatcagctgcacccgccctcgggcttcgcgcgcctccgctggagcccagctagcctcgcggctccggggccgaccgggtcggaactgctgcgtccccattccggacgcagagagcgcgcggggcgccggcgccgccggttaaagtgccgcggggcaggggccgggccgcggccacccgctcctcccgctccggtcccgactgtcgggctctcggccgagtcgccccggacaatcacaaagagtgtgtaggccagccccggtcacagagtgcaccgtatcctgtcacttctggatgtgagggagaagtgagtcatctcattcccctccgtggatcagaggacttggactagatagaagcatgtggtgtctcctacgaggcctgggccggcctggagccctggcacggggagccctggggcagcagcaatccctgggtgcccgggccctggccagcgcaggctctgagagccgggacgagtacagctatgtggtggtgggcgcgggctcggcgggctgcgtgctggctgggaggctcacggaggaccccgccgagcgcgtgctgctgctggaggccgggcccaaggacgtgctcgcggggagcaagcggctctcgtggaagatccacatgcccgcggccctggtggccaacctgtgcgacgacaggtacaactggtgctaccacacagaggtgcagcggggcctggacggccgcgtgctgtactggccacgcggccgcgtctggggtggctcctcatccctcaatgccatggtctacgtccgtgggcacgccgaggactacgagcgctggcagcgccagggcgcccgcggctgggactacgcgcactgcctgccctacttccgcaaggcgcagggccacgagctgggcgccagccggtaccggggcgccgatggcccgctgcgggtgtcccggggcaagaccaaccacccgctgcactgcgcattcctggaggccacgcagcaggccggctacccgctcaccgaggacatgaatggcttccagcaggagggcttcggctggatggacatgaccatccatgaaggcaaacggtggagcgcggcctgtgcctacctgcacccagcactgagccgcaccaacctcaaggccgaggccgagacgcttgtgagcagggtgctatttgagggcacccgtgcagtgggcgtggagtatgtcaagaatggccagagccacagggcttatgccagcaaggaggtgattctgagtggaggtgccatcaactctccacagctgctcatgctctctggcatcgggaatgctgatgacctcaagaaactgggcatccctgtggtgtgccacctacctggggttggccagaacctgcaagaccacctggagatctacattcagcaggcatgcacccgccctatcaccctccattcagcacagaagcccctgcggaaggtctgcattggtctggagtggctctggaaattcacaggggagggagccactgcccatctggaaacaggtgggttcatccgcagccagcctggggtcccccacccggacatccagttccatttcctgccatcccaagtgattgaccacgggcgggtccccacccagcaggaggcttaccaggtacatgtggggcccatgcggggcacgagtgtgggctggctcaaactgagaagtgccaatccccaagaccaccctgtgatccagcccaactacttgtcaacagaaactgatattgaggatttccgtctgtgtgtgaagctcaccagagaaatttttgcacaggaagccctggctccgttccgagggaaagagctccagccaggaagccacattcagtcagataaagagatagatgcctttgtgcgggcaaaagccgacagcgcctaccacccctcgtgcacctgtaagatgggccagccctccgatcccactgccgtggtggatccgcagacaagggtcctcggggtggaaaacctcagggtcgtcgatgcctccatcatgcctagcatggtcagcggcaacctgaacgcccccacaatcatgatcgcagagaaggcagctgacattatcaaggggcagcctgcactctgggacaaagatgtccctgtctacaagcccaggacgctggccacccagcgctaagacagttgctgctggaggatgaccagggaagccccctgataagccaagagggccagcacagcccttgctcccaggctcctgcctgaaactatctagcacactaggacccaggtggtaccctactcagtggctgagaattggataaagtcttgggaaatgagacaagtactgggcagtgaatccagctccttttccccagcctttccctgtgggccatttggggaaggccagcattcagcctgagatgttcctccctgcctcctggagggacagaaggggaggatggttaactcctgccgcatcctttttcttgtgttcacgtggcattctctaacccagggcagtggttccttcccaggccatgcacagaggctgggtgcctgccagacccacggagggttcgcgaaggaaggggcatcctccttcttgagctgcaagctttagctgaggcagtaagtcacacagtagttagttcagcctgggctggcacataagtccccagtgtccctgttgagaggggaaagttgcctgctggttgaaaaactggcttttcctttctcgctgcctaatttcactctcagagtgaggcaggtaactggggctccactgggtcactctgagagggttgtggctctggttcttattaaaccagggccaggtgcagggctcacacctgtaatcccagcactttgggaaggtcacttgagctcaggagttcaagaccagcctgggcaacatagtgagaccttgtctctggaaaacaattagctgggcatggtggtacacacctgtagtcccagctacttgggaggctgaggcgggaggatggctttagcccaggaggttgaggctcctgtgaaccctgatggcaccactgcactccagcctgggtgacagggtgagaccctgtctcaaaaaaaaaaaaaaaaaaaaaaacctgagatttttttggaccttattcaaggggagaggagtctggagggaatgccgcttggcttcactaccaaaggttttatgacttagcattttaaaaggttttccttttaccaagaaatgcagaaaccaagagcaaaccccacgtaccagatcactgattcctactgaagcagctagcccgagaaaggactctctcatactggtcttgggaaatgacttggcagcctgagccatcccagcagtggacaaggatggttaattcttattctgtagacgtccacaggaacagactaggatggaaaacacagttaagcacagccatgcaccctgtggctgtagaaatgcccctgtgtgaaagaaaaataaattcaagactggagttttggaggaaaaaaaatacaagtagcatttacaacagctctttgctctttaaatttcttaccattcaataaagtgatccagtcactcacatttgaactga

SEQ ID NO: 198172 - DNA, 1785 bp, Artificial Sequence
  derived and/or modified sequence
atgtggtgcctgctgagaggcctgggcagacccggcgccctggccagaggcgccctgggccagcagcagagcctgggcgccagagccctggccagcgccggcagcgagagcagagacgagtacagctacgtggtggtgggcgccggcagcgccggctgcgtgctggccggcagactgaccgaggaccccgccgagagagtgctgctgctggaggccggccccaaggacgtgctggccggcagcaagagactgagctggaagatccacatgcccgccgccctggtggccaacctgtgcgacgacagatacaactggtgctaccacaccgaggtgcagagaggcctggacggcagagtgctgtactggcccagaggcagagtgtggggcggcagcagcagcctgaacgccatggtgtacgtgagaggccacgccgaggactacgagagatggcagagacagggcgccagaggctgggactacgcccactgcctgccctacttcagaaaggcccagggccacgagctgggcgccagcagatacagaggcgccgacggccccctgagagtgagcagaggcaagaccaaccaccccctgcactgcgccttcctggaggccacccagcaggccggctaccccctgaccgaggacatgaacggcttccagcaggagggcttcggctggatggacatgaccatccacgagggcaagagatggagcgccgcctgcgcctacctgcaccccgccctgagcagaaccaacctgaaggccgaggccgagaccctggtgagcagagtgctgttcgagggcaccagagccgtgggcgtggagtacgtgaagaacggccagagccacagagcctacgccagcaaggaggtgatcctgagcggcggcgccatcaacagcccccagctgctgatgctgagcggcatcggcaacgccgacgacctgaagaagctgggcatccccgtggtgtgccacctgcccggcgtgggccagaacctgcaggaccacctggagatctacatccagcaggcctgcaccagacccatcaccctgcacagcgcccagaagcccctgagaaaggtgtgcatcggcctggagtggctgtggaagttcaccggcgagggcgccaccgcccacctggagaccggcggcttcatcagaagccagcccggcgtgccccaccccgacatccagttccacttcctgcccagccaggtgatcgaccacggcagagtgcccacccagcaggaggcctaccaggtgcacgtgggccccatgagaggcaccagcgtgggctggctgaagctgagaagcgccaacccccaggaccaccccgtgatccagcccaactacctgagcaccgagaccgacatcgaggacttcagactgtgcgtgaagctgaccagagagatcttcgcccaggaggccctggcccccttcagaggcaaggagctgcagcccggcagccacatccagagcgacaaggagatcgacgccttcgtgagagccaaggccgacagcgcctaccaccccagctgcacctgcaagatgggccagcccagcgaccccaccgccgtggtggacccccagaccagagtgctgggcgtggagaacctgagagtggtggacgccagcatcatgcccagcatggtgagcggcaacctgaacgcccccaccatcatgatcgccgagaaggccgccgacatcatcaagggccagcccgccctgtgggacaaggacgtgcccgtgtacaagcccagaaccctggccacccagagatag

SEQ ID NO: 198173 - DNA, 1785 bp, Artificial Sequence
  derived and/or modified sequence
atgtggtgccttttacggggactcggtagaccgggggcacttgccaggggggccctgggccagcagcagtctctcggagcacgtgcactggcgtctgctggatccgaatcgcgcgatgagtacagctatgttgttgtgggggctggctctgccggctgcgtacttgccggcagattgacagaagatccagccgagagagttttgttgctggaggccggaccaaaagatgtccttgcagggagtaagagactcagttggaaaatccacatgccagccgccctggtcgctaacctgtgcgacgacaggtataattggtgctaccacacagaggttcagcgagggctagatggtcgcgtgctgtactggccccgtggacgcgtgtggggcggtagcagtagcctgaatgccatggtgtatgtgaggggccacgccgaggactatgagcgctggcagaggcagggtgcgagagggtgggattacgcacattgccttccatattttcgcaaggcccagggacacgagctcggcgcctcgcgttacagaggagccgacgggcccctacgcgtgtcgcgaggcaagaccaaccaccccctccattgcgcttttctggaggcaacccagcaggcagggtatcccctgactgaagacatgaatggcttccaacaggagggcttcggatggatggatatgactattcatgagggcaaaagatggtcagccgcctgcgcctacctgcatcccgctctaagcaggaccaacttaaaggctgaggccgaaaccttggtgagccgggtcctgttcgaggggacaagagctgtgggcgttgaatatgttaagaacgggcagtcccatagagcctacgcctctaaagaagtgatactgtccggaggagcaataaattcccctcagctgcttatgctttccggtatcggcaacgccgatgatttgaaaaaactcggaatccctgtggtgtgtcacctgcccggcgtcggtcaaaaccttcaagatcacctggaaatatatattcagcaggcctgcacgcgacccattacgctacatagtgcacagaagccactgcgtaaggtgtgcatcgggcttgaatggctctggaagtttacaggagagggagccactgcacatctggagactggcggctttattcgcagccagcctggggtcccacaccctgatatccaatttcattttctgccaagtcaagtgatcgaccacgggcgggttcccacgcaacaggaagcataccaagtgcatgtgggaccaatgcgcggtaccagcgtcggttggctcaagctgcgatctgccaatcctcaggatcaccccgttatccagcccaattacctgtccacagagacggatattgaggatttcagactctgcgttaagctgactagggagatcttcgcacaggaggctctggcgccatttcggggcaaggagcttcagcctggctcacacatacagtctgataaggaaatcgatgcattcgttagggctaaagctgattctgcataccatcccagttgtacctgcaagatgggacagcctagtgatcccacagctgtcgtcgatccacagactcgggtgctgggtgtggaaaacctgcgagttgtagatgcatccatcatgccgagcatggtgtctggcaacttgaacgcccctactatcatgatcgcagagaaggccgccgatattatcaaaggacaaccggccctctgggataaagacgttccagtttacaagccgaggacccttgcgacgcagcgttag

SEQ ID NO: 198174 - DNA, 1785 bp, Artificial Sequence
  derived and/or modified sequence
atgtggtgcctgctgcggggcctgggccggcctggggccctggcccggggggccctgggccagcagcagagcctgggcgcccgggccctggccagcgctggcagcgagagcagagatgagtacagctatgtggtggtgggcgccggcagcgctggctgtgtgctggccggccgcctgacagaagatcctgctgagcgggtgctgctgctggaggccggccccaaggatgtgctggccggcagcaagaggctgtcctggaagatccacatgcctgctgccctggtggccaacctgtgtgatgaccgctacaactggtgctaccacacagaggtgcagaggggcctggatggccgggtgctgtactggccccggggccgggtgtggggcggcagcagcagcctgaatgccatggtgtatgtgcggggccacgcagaagattatgagcgctggcagaggcagggcgcccggggctgggactatgcccactgcctgccctacttcaggaaggcccagggccacgagctgggcgccagccgctacagaggagcagatggccccctgcgggtgtcccggggcaagaccaaccaccccctgcactgtgccttcctggaggccacccagcaggccggctaccccctgacagaggacatgaatggcttccagcaggagggcttcggctggatggacatgaccatccacgagggcaagcgctggagcgctgcctgtgcctacctgcacccagccctgagcaggaccaacctgaaggccgaggccgagaccctggtgtcccgggtgctgtttgagggcaccagggctgtgggcgtggagtatgtgaagaatggccagagccaccgggcctatgccagcaaggaggtgatcctgtctggaggagccatcaacagcccccagctgctgatgctgagcggcattggaaatgctgatgacctgaagaagctgggcatccctgtggtgtgccacctgcccggggtgggccagaacctgcaggaccacctggagatctacatccagcaggcctgcacccggcccatcaccctgcacagcgcccagaagcccctgaggaaggtgtgcatcggcctggagtggctgtggaagttcaccggggagggcgccacagcccacctggagactggaggcttcatccgcagccagcccggggtgccccacccagacatccagttccacttcctgcccagccaggtgattgaccacggccgggtgcccacccagcaggaggcctaccaggtgcacgtgggccccatgaggggcacctctgtgggctggctgaagctgcggagcgccaacccccaggaccaccctgtgatccagcccaactacctgagcacagaaacagacatcgaggacttccggctgtgtgtgaagctgacccgggagatctttgcccaggaggccctggcccccttccggggcaaggagctgcagcccggcagccacatccagagcgacaaggagattgatgcctttgtgcgggccaaggctgacagcgcctaccaccccagctgcacctgcaagatgggccagcccagcgaccccacagctgtggtggacccccagaccagggtgctgggcgtggagaacctgcgggtggtggatgccagcatcatgcccagcatggtgtctggcaacctgaatgcccccaccatcatgattgctgagaaggctgctgacatcatcaagggccagcctgccctgtgggacaaggatgtgcctgtgtacaagcccaggaccctggccacccagaggtag

SEQ ID NO: 198175 - DNA, 1785 bp, Artificial Sequence
  derived and/or modified sequence
atgtggtgcctgctgcggggcctgggccggcccggcgccctggcccggggcgcccttggccagcagcagtctcttggagcccgcgccctcgcaagcgccggttccgaaagccgggacgagtatagttacgtcgtcgtcggtgccgggtccgccggctgtgtcctggctggccggttgacggaggatccagctgagcgggttttgctgctcgaagcggggccaaaggacgtcttggccggtagcaagcggctgagctggaagattcacatgcctgctgcactcgtagccaacctgtgtgatgaccgatacaattggtgctatcacacagaagtgcagcgcggccttgatggaagggttttgtactggcctagaggcagagtttggggggggtcaagttccctgaacgccatggtatatgtgcgggggcacgcggaagactatgagcgctggcagaggcagggggcgcggggttgggactatgcccactgtctgccttattttcgtaaggcacagggccatgagctcggggccagcaggtaccggggagccgacggacccctccgagtctcacggggaaagaccaatcatcccttgcactgcgcttttctcgaagctacccaacaggcgggctatccgctcacggaggacatgaatggctttcaacaggaaggatttgggtggatggacatgactatccacgaggggaagcgctggagcgccgcctgtgcctacctccatcccgcactatctaggactaatctaaaggctgaggccgaaacattggttagccgagtccttttcgagggaacacgtgctgtgggcgtagagtacgtgaagaatgggcagtctcatagggcatacgcgtccaaagaggtcattttgagtggtggcgccattaattccccacagctgcttatgctatctggcatcgggaacgctgatgatttgaagaagctgggaatccctgtcgtgtgccacttgccaggcgtgggacaaaacctgcaagaccacctcgagatctacattcagcaggcctgcacaaggcctatcaccttgcactctgctcaaaagcccttacggaaggtctgtatcggacttgagtggctgtggaaattcaccggcgagggggccacggcccacctggaaacgggagggttcatacgctctcaacccggtgtaccacacccagatatccagttccattttctcccctcgcaggtgatagatcacgggagggtaccaacacagcaggaggcttaccaggtgcacgtcggtcccatgagagggacgtcagtcggctggctgaagttgaggagcgctaaccctcaggatcatccagtcatccagcccaattatctgtccaccgagacagacatagaggattttaggctgtgtgtgaagctgaccagagagatttttgctcaggaagccctggctcctttccgaggtaaggagctccagcccggctcgcatattcaatccgacaaagagatcgacgccttcgtccgtgccaaagccgatagcgcttatcatccgagctgcacatgtaaaatgggccagccatcagaccccactgcggtggtggacccccagacccgcgtgttgggtgtagaaaatctgagggttgtggacgcctccatcatgcctagcatggtaagcgggaacttgaatgccccaactataatgatagccgaaaaagccgccgatattattaaggggcagccagcactgtgggacaaagacgtccctgtgtacaaaccccgcacgctcgcaacacagagatag

SEQ ID NO: 198176 - DNA, 1785 bp, Artificial Sequence
  derived and/or modified sequence
atgtggtgtctgctccgcggtctaggtcgccctggagccttggcaagaggggcacttggacaacaacaatccctgggggctcgagccctggctagtgcagggtcagagtccagagatgagtactcctacgtcgtggtaggtgcagggtccgctggctgcgtgcttgccggacgacttactgaggaccccgctgaacgggtgctgttacttgaggcgggaccaaaggacgtgctggcaggctccaaaagattgagctggaagatccacatgcccgctgccctggtcgcaaatctgtgcgacgatcgctataactggtgctaccatacggaggtgcagcgcggtctggatggtcgtgtgctgtactggccacggggacgcgtctggggaggttcaagcagcttgaacgccatggtatacgtccggggacacgccgaggattatgagagatggcaaagacagggggcacgaggatgggattacgcccattgcctgccttactttagaaaagcacaaggccatgaactgggggcatccagataccgcggtgcagatgggcctctcagggtaagtcgcggaaagacgaatcaccccttgcactgcgcgtttctcgaggctacgcagcaggccggataccccctgaccgaggacatgaatggtttccagcaagaagggttcggctggatggatatgacaatccatgagggcaaacgctggagcgccgcttgcgcatatctgcaccccgctctttcacgtacaaacctcaaggcagaggcagagacgctcgtatcccgagtcctgttcgaggggacgagggcggtaggagtcgaatatgttaagaacggtcagtctcaccgcgcttatgctagtaaagaagtcatcctgtcaggtggggctataaatagccctcagttgctaatgctctccgggatcggcaatgcagatgaccttaaaaagctcggtatcccagtcgtgtgccaccttcccggagtaggacagaacctccaggaccaccttgagatctacatacaacaggcatgcacaaggccgattaccctgcactcagcccagaaacccctgaggaaggtctgtatcgggttagagtggctgtggaagtttacgggggagggcgctaccgcccacctcgagaccggaggattcatccgctcccagccaggagtaccccatcctgacatacaattccacttccttccatctcaggtgatcgaccacggccgagtgcctacacagcaagaggcataccaagtgcacgtggggccaatgaggggaacctcagttggctggctcaaactccgttcggccaacccacaagaccaccctgttatccagcccaactaccttagcaccgagaccgacatcgaagacttccggctctgtgtgaaactcaccagggagatcttcgcacaggaggccctggcgcctttcagaggcaaagagctgcaacccggtagtcacatccagagcgacaaggaaatcgacgctttcgtgagggctaaagcggactccgcataccatccatcgtgtacctgcaagatgggacagccctccgatccgaccgccgtcgttgatcctcagaccagagtcctaggcgtggagaacctacgggtcgtggatgctagcatcatgccctccatggtgagtggaaatctcaatgctcctaccattatgattgctgaaaaggccgcagacattataaagggccaacccgctctctgggacaaagatgtgcccgtatacaagccacgaacattggcaacccagaggtag

SEQ ID NO: 198177 - protein, 1091 aa, Artificial Sequence
  derived and/or modified sequence
MAGPGSPRRASRGASALLAAALLYAALGDVVRSEQQIPLSVVKLWASAFGGEIKSIAAKYSGSQLLQKKYKEYEKDVAIEEIDGLQLVKKLAKNMEEMFHKKSEAVRRLVEAAEEAHLKHEFDADLQYEYFNAVLINERDKDGNFLELGKEFILAPNDHFNNLPVNISLSDVQVPTNMYNKDPAIVNGVYWSESLNKVFVDNFDRDPSLIWQYFGSAKGFFRQYPGIKWEPDENGVIAFDCRNRKWYIQAATSPKDVVILVDVSGSMKGLRLTIAKQTVSSILDTLGDDDFFNIIAYNEELHYVEPCLNGTLVQADRTNKEHFREHLDKLFAKGIGMLDIALNEAFNILSDFNHTGQGSICSQAIMLITDGAVDTYDTIFAKYNWPDRKVRIFTYLIGREAAFADNLKWMACANKGFFTQISTLADVQENVMEYLHVLSRPKVIDQEHDVVWTEAYIDSTLPQAQKLTDDQGPVLMTTVAMPVFSKQNETRSKGILLGVVGTDVPVKELLKTIPKYKLGIHGYAFAITNNGYILTHPELRLLYEEGKKRRKPNYSSVDLSEVEWEDRDDVLRNAMVNRKTGKFSMEVKKTVDKGKRVLVMTNDYYYTDIKGTPFSLGVALSRGHGKYFFRGNVTIEEGLHDLEHPDVSLADEWSYCNTDLHPEHRHLSQLEAIKLYLKGKEPLLQCDKELIQEVLFDAVVSAPIEAYWTSLALNKSENSDKGVEVAFLGTRTGLSRINLFVGAEQLTNQDFLKAGDKENIFNADHFPLWYRRAAEQIPGSFVYSIPFSTGPVNKSNVVTASTSIQLLDERKSPVVAAVGIQMKLEFFQRKFWTASRQCASLDGKCSISCDDETVNCYLIDNNGFILVSEDYTQTGDFFGEIEGAVMNKLLTMGSFKRITLYDYQAMCRANKESSDGAHGLLDPYNAFLSAVKWIMTELVLFLVEFNLCSWWHSDMTAKAQKLKQTLEPCDTEYPAFVSERTIKETTGNIACEDCSKSFVIQQIPSSNLFMVVVDSSCLCESVAPITMAPIEIRYNESLKCERLKAQKIRRRPESCHGFHPEENARECGGAPSLQAQTVLLLLPLLLMLFSR

SEQ ID NO: 198178 - protein, 998 aa, Artificial Sequence
  derived and/or modified sequence
MGELRQERSTALQRLVEAAEEAHLKHEFDADLQYEYFNAVLINERDKDGNFLELGKEFILAPNDHFNNLPVNISLSDVQVPTNMYNKDPAIVNGVYWSESLNKVFVDNFDRDPSLIWQYFGSAKGFFRQYPGIKWEPDENGVIAFDCRNRKWYIQAATSPKDVVILVDVSGSMKGLRLTIAKQTVSSILDTLGDDDFFNIIAYNEELHYVEPCLNGTLVQADRTNKEHFREHLDKLFAKGIGMLDIALNEAFNILSDFNHTGQGSICSQAIMLITDGAVDTYDTIFAKYNWPDRKVRIFTYLIGREAAFADNLKWMACANKGFFTQISTLADVQENVMEYLHVLSRPKVIDQEHDVVWTEAYIDSTVSQAEQLTDDQGPVLMTTVAMPVFSKQNETRSKGILLGVVGTDVPVKELLKTIPKYKLGIHGYAFAITNNGYILTHPELRLLYEEGKKRRKPNYSSVDLSEVEWEDRDDVLRNAMVNRKTGKFSMEVKKTVDKGKRVLVMTNDYYYTDIKGTPFSLGVALSRGHGKYFFRGNVTIEEGLHDLEHPDVSLADEWSYCNTDLHPEHRHLSQLEAIKLYLKGKEPLLQCDKELIQEVLFDAVVSAPIEAYWTSLALNKSENSDKGVEVAFLGTRTGLSRINLFVGAEQLTNQDFLKAGDKENIFNADHFPLWYRRAAEQIPGSFVYSIPFSTGPVNKSNVVTASTSIQLLDERKSPVVAAVGIQMKLEFFQRKFWTASRQCASLDGKCSISCDDETVNCYLIDNNGFILVSEDYTQTGDFFGEIEGAVMNKLLTMGSFKRITLYDYQAMCRANKESSDGAHGLLDPYNAFLSAVKWIMTELVLFLVEFNLCSWWHSDMTAKAQKLKQTLEPCDTEYPAFVSERTIKETTGNIACEDCSKSFVIQQIPSSNLFMVVVDSSCLCESVAPITMAPIEISQHNESLKCERLKAQKIRRRPESCHGFHPEENARECGGAPSLQAQTVLLLLPLLLMLFSR

SEQ ID NO: 198179 - protein, 997 aa, Artificial Sequence
  derived and/or modified sequence
MEEMFHKKSEAVRRLVEAAEEAHLKHEFDADLQYEYFNAVLINERDKDGNFLELGKEFILAPNDHFNNLPVNISLSDVQVPTNMYNKDPAIVNGVYWSESLNKVFVDNFDRDPSLIWQYFGSAKGFFRQYPGIKWEPDENGVIAFDCRNRKWYIQAATSPKDVVILVDVSGSMKGLRLTIAKQTVSSILDTLGDDDFFNIIAYNEELHYVEPCLNGTLVQADRTNKEHFREHLDKLFAKGIGMLDIALNEAFNILSDFNHTGQGSICSQAIMLITDGAVDTYDTIFAKYNWPDRKVRIFTYLIGREAAFADNLKWMACANKGFFTQISTLADVQENVMEYLHVLSRPKVIDQEHDVVWTEAYIDSTLPQAQKLTDDQGPVLMTTVAMPVFSKQNETRSKGILLGVVGTDVPVKELLKTIPKYKLGIHGYAFAITNNGYILTHPELRLLYEEGKKRRKPNYSSVDLSEVEWEDRDDVLRNAMVNRKTGKFSMEVKKTVDKGKRVLVMTNDYYYTDIKGTPFSLGVALSRGHGKYFFRGNVTIEEGLHDLEHPDVSLADEWSYCNTDLHPEHRHLSQLEAIKLYLKGKEPLLQCDKELIQEVLFDAVVSAPIEAYWTSLALNKSENSDKGVEVAFLGTRTGLSRINLFVGAEQLTNQDFLKAGDKENIFNADHFPLWYRRAAEQIPGSFVYSIPFSTGPVNKSNVVTASTSIQLLDERKSPVVAAVGIQMKLEFFQRKFWTASRQCASLDGKCSISCDDETVNCYLIDNNGFILVSEDYTQTGDFFGEIEGAVMNKLLTMGSFKRITLYDYQAMCRANKESSDGAHGLLDPYNAFLSAVKWIMTELVLFLVEFNLCSWWHSDMTAKAQKLKQTLEPCDTEYPAFVSERTIKETTGNIACEDCSKSFVIQQIPSSNLFMVVVDSSCLCESVAPITMAPIEIRYNESLKCERLKAQKIRRRPESCHGFHPEENARECGGAPSLQAQTVLLLLPLLLMLFSR

SEQ ID NO: 198180 - DNA, 3276 bp, Artificial Sequence
  derived and/or modified sequence
atggccggtcctgggtccccacgacgggcctcccgcggggctagcgccttactggccgccgccctactttacgccgccctgggcgatgtcgtgcgctctgaacaacagatccccctgagcgttgtaaaactctgggctagtgcgttcggaggcgagattaaatctattgcagccaagtatagtggcagccaactgctgcagaaaaaatacaaagagtacgagaaagatgtggcgatcgaagagatcgacggcttgcaattagtcaagaaactggcaaagaatatggaagagatgttccacaagaaaagcgaagcggtgcggcgcctcgtggaagctgccgaagaggcccatctcaagcatgagttcgacgctgatcttcaatacgagtattttaacgctgtgcttatcaacgaacgagacaaggatggaaatttcctggaacttggaaaagagtttatcctcgcacctaatgaccatttcaataacctgccagtaaacatcagcttgagcgacgtacaggtgcccactaacatgtataataaagaccccgccatcgtgaacggagtttattggtcagagtccctgaacaaggtattcgtggataacttcgacagggaccctagtctgatctggcagtatttcggatcagctaagggctttttcaggcagtaccctggaatcaagtgggagcccgacgagaatggcgtaattgcctttgattgcagaaacagaaagtggtatatccaagcagcaacctcaccaaaggacgtggtgattctggtggatgtgagcggctctatgaaaggcctccggctcaccatcgccaagcagacggtgagtagtattctggataccctgggagatgacgacttctttaacattatagcctacaacgaagaattgcactatgtggaaccctgcttgaacggaactctcgtgcaagcggaccggacaaacaaagagcacttcagagagcatttggataagcttttcgccaagggcattgggatgctggatatcgcattgaacgaggcattcaatatcttaagcgattttaaccacactggacaagggtccatctgctcccaggccataatgttgataaccgatggcgcggtcgatacttatgatactatattcgccaaatacaattggcccgaccgcaaagtgagaattttcacttacctgatcggaagggaggccgcatttgccgataaccttaaatggatggcgtgtgcgaacaagggattcttcacacaaatcagcactctcgccgacgttcaggaaaacgttatggaatatttgcacgtgctttcgcggcctaaggtcattgaccaagagcacgacgtggtttggaccgaggcctacatagacagtacgctccctcaggcgcaaaagttgaccgatgaccagggcccagtgcttatgacaacggttgctatgcctgtgttttcaaaacagaatgagacaagatctaagggcatcctgcttggtgtggtcgggaccgacgtacccgtgaaggaactcctgaagactatccctaagtacaagctcggtattcacggttatgcattcgccatcactaacaacggctatatactcacccacccggagctgcggttgttgtatgaggagggtaagaaaagacgcaaaccaaactacagttccgtagacctgtctgaggtagagtgggaggaccgcgacgacgtcctgcgcaatgccatggtgaatagaaaaacaggcaagttctccatggaggtgaaaaagactgtcgacaaaggcaaacgcgttctcgtgatgaccaacgattactattacaccgatattaaaggtactcctttctccctgggggtggctctctcacggggtcatgggaagtatttctttcgtgggaatgttactatcgaggagggccttcacgacttggagcatcccgatgttagcttggccgacgagtggagttactgcaatactgacttgcacccagagcaccggcacctcagccagctggaggctataaaactatatctgaagggaaaagaacccctgctccagtgcgacaaggagctgattcaggaggtactgttcgacgccgttgtgagtgcccctattgaagcctattggacttcactcgccctgaacaaaagcgagaactctgataaaggtgttgaagttgccttcctgggcacacggaccggactttctagaattaacctgtttgtaggggccgagcagctaacaaatcaggatttcctcaaggcaggcgacaaggagaatatcttcaacgcggatcacttccccctctggtacagacgggccgctgagcagatccccgggagctttgtttacagtattccattttcgacaggaccggtcaataagtccaatgtggtgacggctagcacttctatccagctcctggacgagaggaagagcccagtggtcgctgcagttggaattcagatgaaactggagttcttccagaggaagttctggacagcttcaagacagtgcgcgagcttagacgggaagtgcagtatttcgtgtgatgacgaaacagtgaactgttatctgatcgacaacaacggctttatcctcgtgtctgaagattacacacagactggggacttctttggtgaaatcgaaggcgccgtgatgaacaaattactgaccatgggttctttcaagagaattactctgtacgattaccaggcaatgtgtcgtgccaacaaggagtcatccgacggcgcccacggcctgctcgatccctacaacgcattcttgtcagcagtgaagtggattatgaccgagctcgttctctttcttgttgagttcaacctgtgctcttggtggcattcagacatgacagccaaagctcagaagttaaagcagaccctcgaaccctgtgacactgagtacccagccttcgtgagcgaacggaccatcaaggagacaaccgggaacatagcctgtgaggactgtagtaagagctttgttattcagcagattccttcatccaatctgttcatggtcgtggtcgacagcagctgcctgtgcgagtccgtggcccctatcaccatggctcctatcgaaattagatacaacgaaagtctgaagtgcgagcggttaaaagctcagaagatccgccgccggccagagtcatgccacggcttccaccccgaggaaaatgcaagggagtgtggtggcgctccgagcctgcaggcacaaaccgtactgctcttacttcctttgctcctgatgttgttttccaggtag

SEQ ID NO: 198181 - DNA, 2997 bp, Artificial Sequence
  derived and/or modified sequence
atgggtgagctccggcaggagcggtcaaccgctctgcagcgcttagttgaggccgctgaagaggcccacctcaagcatgagttcgacgctgatctgcagtatgagtactttaacgccgtgctgattaatgagagagacaaggacgggaactttctggaacttggtaaggaatttattcttgctcccaacgatcactttaataatcttcccgtcaacatatctttgagcgacgtgcaggtccctaccaatatgtataataaagaccccgccattgtcaacggcgtctattggtccgagtcactgaataaggtctttgtggataactttgaccgggaccccagcctcatttggcagtactttgggagcgccaaaggcttcttccggcaataccctggaattaaatgggagcccgatgagaatggcgtgattgcgttcgattgccgaaatcggaaatggtacatacaggcagccacaagcccaaaggacgtggtgatcctcgtcgatgtgtctgggagtatgaagggcttacggttgaccatagcgaaacagactgtatccagcattctagacacccttggcgacgacgatttctttaacatcatagcttataatgaggaattgcactacgtagagccgtgccttaatggcacgcttgtgcaggccgacagaaccaacaaggagcacttcagggaacacttggacaagctgtttgccaaaggcatcgggatgttagatattgctctgaacgaggcattcaacatattgtctgatttcaatcataccgggcagggttctatctgtagccaagccattatgcttatcaccgatggagctgtcgatacctacgacacaatcttcgctaaatacaactggcccgacaggaaggtacgaattttcacttacctgatcggtagggaagcggccttcgcagataatttaaagtggatggcctgtgcaaacaaagggttctttacacagattagtactctcgctgatgtgcaggaaaacgttatggaatacttacacgtgttgtctcgacccaaggtgatagaccaagagcatgacgtggtttggacagaagcatacatcgatagcaccgtgtctcaggccgaacagctgacggacgaccagggcccagtcttgatgaccaccgtggctatgcccgtcttcagcaaacagaacgagactagaagcaagggcatcctgcttggtgtggtcggtacggatgtcccagttaaggaactcctgaagactatcccgaagtacaaacttggaattcatggatacgccttcgctattactaacaacggatatatcttaactcaccctgaacttcggctgttatatgaagaaggcaaaaaaaggcggaagcctaattactcatccgttgacctctccgaagtggaatgggaggaccgcgatgacgtgctccgaaacgccatggtgaataggaaaaccggtaagttctctatggaggttaaaaaaaccgtcgacaagggcaagcgagttctcgtgatgacaaatgattactactatacggatattaaaggcacgcccttcagcctgggcgtggccttgagtagaggccacggcaagtatttctttcgaggcaatgtgaccatagaggagggcctgcacgatttagagcacccagatgtgagcctggcagacgaatggtcctattgcaacacagatttgcatccagagcataggcaccttagccagcttgaagccatcaagctctaccttaaaggcaaggagccactgttacagtgtgacaaagaactgatccaggaagttctattcgatgcagtcgtctctgctcccatagaggcatattggaccagcctggctctgaataagagtgaaaatagtgacaaaggcgtagaagtggcctttctgggaacgaggactgggctttcccgcattaatcttttcgtcggcgctgaacagctcaccaatcaggacttcctgaaagcaggcgacaaagagaatattttcaacgctgaccactttccgctttggtatagacgagctgcagagcagattcctggcagcttcgtgtactccatccccttttccactgggccggtgaataagtctaacgtcgtcacagcctctaccagcatacaactgctggacgaacggaagtcgcctgtggtcgcggcggttgggatccagatgaaactcgaattctttcagagaaagttttggacagctagcagacaatgcgcctcactggacggcaagtgctctatcagttgcgacgatgagaccgtcaactgttatctaattgataacaatgggttcatcctggtgtccgaagattatacgcagacgggagacttcttcggcgagattgaaggagcagttatgaataaactgcttaccatgggaagcttcaagagaattactttgtatgattaccaagctatgtgtcgtgcgaacaaggaatcatcagacggcgcccatggtcttctcgacccatacaacgcttttctctctgcggttaaatggatcatgactgaactagtgctgtttctcgtagagttcaacttgtgcagttggtggcactcggacatgacagcgaaagctcagaaattaaaacagactctggaaccttgcgacacagaatacccagcgttcgtgtctgaaaggacaattaaggagacaacgggaaacatagcatgtgaggactgcagcaagtctttcgtcattcagcagatcccctcgagcaacctgttcatggtggtggtggattcatcatgcctgtgtgagagtgtggctccaatcacgatggcaccaattgagatttctcaacacaacgagtcactgaaatgcgagcgtcttaaggcccagaaaatccgtcgacgaccagagagctgtcacggctttcaccctgaggaaaatgcacgcgaatgcggaggggcaccaagtcttcaggcccaaaccgtccttctccttctacctttgttattgatgctgttttcccgttag

SEQ ID NO: 198182 - DNA, 3276 bp, Artificial Sequence
  derived and/or modified sequence
atggctggaccaggcagccctcggagagcgtctcgaggagcttccgctcttctagcagccgctctgctgtatgcagccctgggcgatgtggtgagatctgaacaacagatacccctaagcgtggtgaaactctgggctagcgcctttggtggcgaaatcaaatctatcgcagccaagtacagtggatcgcagctgttgcaaaagaaatataaggagtacgaaaaggacgtagcaatcgaggagatcgatggcttgcagttagtgaaaaagctggccaaaaacatggaggaaatgtttcataaaaaatccgaggccgttagacggctggtggaggccgccgaggaagcacacttaaagcatgagttcgatgcagacctccagtacgagtatttcaatgccgtactcatcaacgagcgggacaaggatggaaattttctcgagctcggaaaggagtttatcctagcccccaacgatcattttaataatctgccagtgaacatcagcctgtcagacgttcaagtaccaacgaacatgtataacaaagacccggcgatcgtgaatggcgtctactggtctgagagtctaaataaagtgtttgtagacaatttcgaccgagacccaagtctgatttggcagtacttcgggtctgctaagggattttttcggcaatatccaggtatcaaatgggaacccgatgagaacggagtcatagcatttgactgtagaaaccgaaaatggtatatacaggctgccacttctcctaaggacgtcgtcatcttagtggacgtcagtggctctatgaagggcctcagacttaccatagcaaagcaaactgtatccagcattctggatacactcggcgatgatgacttcttcaacataattgcctacaatgaggaactgcactacgtcgagccatgtctgaacggtactctcgtacaagccgatcgtacgaacaaagaacactttcgcgaacacctggataaactgttcgccaagggcatcgggatgctggatatagcgctgaacgaggcgttcaatatactgtccgattttaatcatactggacagggctctatctgctcccaggctataatgcttatcacggatggcgcggtggacacttacgataccattttcgcaaaatacaattggcctgaccgtaaggttcgtatttttacctatctgattgggagagaggccgctttcgccgataatctgaagtggatggcctgcgccaataagggcttttttactcagatttctactcttgccgatgtccaagagaacgtcatggagtacctgcacgtgttaagcagaccaaaggttattgaccaggaacacgacgtggtgtggaccgaagcctacatcgatagcaccctgcctcaggctcaaaagctcaccgatgaccaggggcccgttctgatgacaaccgtcgctatgccagtgttttcaaagcaaaacgagacacgctccaaagggatacttctgggggtggtgggaaccgatgtgcctgtgaaggagttactgaagaccatccctaaatacaagctgggcattcatggctacgcatttgccatcaccaataacggatacattctgactcaccccgagttgaggctcctctacgaagaaggaaaaaaaaggcggaaacctaactattcatccgtggacctctccgaggtggaatgggaggaccgcgatgatgtgctcagaaacgccatggtcaatcgcaagacgggaaagtttagcatggaagtgaagaaaactgtagataagggtaagcgggttcttgtcatgaccaatgattattattacactgacattaaaggcacaccttttagtctaggagtggcgctctcacgcggtcacgggaagtatttctttaggggtaacgttacaatcgaggagggactccacgatttggagcatccagatgtgagcctagccgacgaatggtcttattgtaacacggatctgcatccggaacataggcacctttcacaactggaggctatcaaactctatcttaaaggcaaagagcctctattacagtgcgataaagaactcattcaggaagtactgttcgatgccgtggtgagcgcgccgattgaagcctattggacttctctggccctgaataagtccgagaactctgacaaaggagtggaggtcgcatttttggggactcgcacaggcctgagtagaattaacctgttcgttggcgccgaacagctcactaaccaggatttcttgaaggccggtgataaggaaaatatctttaatgcagaccattttccgctgtggtaccggagagccgctgagcaaatacccggatcattcgtctacagtataccattttccaccggtccagtcaacaagtccaacgtcgtcacagctagcacttctatccagctgctggacgagagaaagagccccgttgtggccgctgtgggaatccagatgaagctggagtttttccagcgcaagttttggacagcatctcggcagtgtgcctcgctcgacggaaagtgtagcattagttgtgatgacgagacggtcaattgttatttaatagacaacaacggctttatattggtgagcgaagactacacacagactggggacttctttggagagatcgagggcgcagtgatgaacaagctcctgaccatgggttcctttaaacgcattaccttatatgattatcaagctatgtgcagagctaacaaagaatccagcgacggagcacacggcttgcttgatccctataacgcatttctctcggccgtgaaatggattatgactgagctcgtccttttcctggtggagtttaacctctgcagctggtggcatagcgacatgacagctaaagcccagaaattgaagcagacactggagccatgcgataccgagtatcccgcttttgtctcagaacgcacgattaaggaaaccacaggcaatattgcctgcgaggattgctccaagagcttcgttatccagcaaattcctagttccaatctgttcatggtggtggtcgatagttcttgtctctgcgagtccgtggcccctattacaatggcaccaatagagattcgatacaatgaatccctgaaatgcgaaaggctgaaggcccaaaagatcagaagacgacccgagtcctgtcatggattccaccccgaagaaaacgctcgggaatgtggtggggctccaagcctccaagctcagaccgtcttgcttctgttaccactgcttctgatgttgtttagccgttag

SEQ ID NO: 198183 - DNA, 3276 bp, Artificial Sequence
  derived and/or modified sequence
atggccggccccgggagtcccagacgagcgagcagaggggcaagtgcgctcttggcagccgccttattgtacgccgccttaggcgatgtagtccgaagtgagcagcaaattcccctgagcgtagtgaaactctgggcgtcagctttcggcggcgagatcaagtcaatagctgcaaaatatagtggcagccagctgcttcaaaagaagtacaaagaatatgaaaaagatgtggccattgaggaaatcgatggcttgcagctggtcaaaaagctcgccaagaacatggaggagatgtttcataagaaatcagaagccgtcagacgactcgttgaggctgccgaagaggcccacctgaagcacgagttcgacgcagacctgcagtacgaatatttcaatgccgtacttatcaatgagagagacaaggatggcaactttcttgagttgggtaaagagtttatcctcgcccctaacgaccactttaataacctcccagtgaacatttcactgtctgatgtccaagtaccaactaacatgtataataaggacccagccatcgtgaatggagtctactggtcagagtcgctgaataaggtttttgtggataatttcgatagagacccatcacttatatggcagtatttcggctccgccaagggtttcttcaggcaatatcccggcattaagtgggagcccgacgagaacggcgtgatcgctttcgattgtcggaaccggaagtggtacattcaggccgccaccagtcctaaggacgtagtcattcttgttgatgtaagcggatcaatgaaggggcttcgactcactattgcaaagcagactgtgtcctccatcctggacacgctgggcgatgacgatttcttcaatattattgcctacaacgaggaactgcactatgtagagccatgcctcaacggaaccctggtccaggccgatcggactaataaggagcatttcagagagcacctggacaaactctttgctaaagggattggaatgctagatatcgcactgaatgaagcattcaacatactttcagatttcaaccacaccggtcagggatccatctgcagtcaggctattatgttgatcaccgatggggcggtggatacctacgatactatatttgcaaagtacaactggccggatcgtaaggtaaggatcttcacttatttgatcggaagagaggcagctttcgctgataaccttaaatggatggcgtgcgccaataagggcttctttacacagatttccaccctggcagacgtgcaagagaatgtgatggaatatcttcacgtgctgtctaggcccaaagtcatagatcaggagcacgatgtggtctggacggaagcctacatcgacagcacactaccccaagcgcagaagctgactgacgaccagggccccgtacttatgactactgttgcaatgcctgtgttttccaaacagaatgagacacggagtaagggcattctcctcggtgtggtgggcacagatgtgcccgtcaaggagttgctcaagaccattcccaaatataagctgggcatacacggatacgcatttgccataactaataatggttatatcttgacccatccggagcttaggctactgtacgaggagggcaaaaagcgacgcaagcctaactacagttccgtggacctgagcgaagtagagtgggaagaccgcgacgatgtgctgcgtaacgcaatggttaacagaaaaactgggaaatttagcatggaggtcaaaaaaaccgtcgataagggtaagagggttctcgtcatgaccaacgattactactacacagacatcaaggggacccccttctctctcggagttgctctgagcagagggcacggaaaatacttttttcgtgggaatgtgactatagaagaggggctccatgatctggaacacccagatgtcagcctggcagacgaatggtcctactgtaatacagacctccatcccgaacatcgccacctgtcgcagctcgaagccatcaagttgtatttaaagggcaaggaacctctgctgcagtgcgacaaggaattgatccaggaagtgctgttcgatgccgtggtgtctgcccccattgaggcctactggacttctctcgcactgaataagtctgagaattccgataaaggtgttgaagtcgcgtttctggggaccagaacaggattatccagaatcaatctgtttgtgggggccgagcaactgacaaaccaagactttctgaaggcaggtgataaggagaacattttcaatgcggatcacttcccactctggtatcgccgagcagccgagcagattccagggtcattcgtgtatagcattcctttttccactggccccgttaacaagagtaacgtggtcacagccagcacatctatccagctgctcgacgagcggaaatctccagttgtggccgccgtagggatacaaatgaagctggagttctttcaacggaaattctggaccgcctctagacagtgtgctagcctcgacggcaagtgctcaataagctgtgacgatgagactgtgaattgctatttaatcgataacaacgggtttatcctcgtgtctgaggactatacgcagactggggacttctttggggagattgaaggcgccgttatgaacaagctgctgaccatgggctcattcaaacgtatcaccctgtacgattatcaagcaatgtgtagggccaataaagaaagcagcgatggcgcccatgggctgctggatccttataacgctttcctctcagccgtgaagtggatcatgaccgaactcgtgctgttcctcgtcgaatttaatctgtgttcatggtggcattcggacatgacggccaaagcccagaaattaaagcagactctcgaaccatgtgatactgagtacccagcctttgtgagcgaaagaacgataaaagagaccactggaaatatagcgtgcgaagattgcagtaagtcttttgtgatccaacagataccttcatctaatctgtttatggtggtggttgattctagttgtctgtgcgaatcagtggccccaattaccatggccccaatcgaaatacgctacaatgagtccttgaaatgcgagcgtctaaaagcgcagaagattagaaggcggcccgaatcctgtcacggttttcaccccgaggaaaacgcacgggaatgtgggggagccccaagtttgcaggcacagacagtactcctgctgcttcccctcctcctgatgctgttcagtcgctag

SEQ ID NO: 198184 - DNA, 2994 bp, Artificial Sequence
  derived and/or modified sequence
atggaggagatgttccacaagaagtccgaagcggtccgaaggttggttgaggctgcagaggaggcccacttgaaacatgagttcgacgccgacctgcaatatgaatacttcaatgccgtcctgatcaacgagcgtgacaaagatggtaacttcctcgagttgggaaaggagtttatcctagccccaaacgaccattttaataatctgcctgtgaatatttccttaagtgatgtgcaagtgccaacaaacatgtacaacaaggacccggccatagttaacggcgtttattggagtgagagcctcaataaagtctttgtggataacttcgacagggacccgagcttaatctggcagtactttggttccgccaaggggttttttcgccagtacccggggatcaaatgggaacctgacgagaatggggtcatcgcttttgattgccgcaataggaaatggtacattcaggctgccaccagtcccaaggacgttgtaatactggtcgacgtgtctggaagcatgaagggactgaggctgaccatagccaagcagactgtcagcagcattctggacacgcttggcgacgatgattttttcaacatcatagcgtacaatgaagaactccactacgtggagccttgcctaaacgggacactggtccaggccgaccgcactaacaaggaacacttcagggagcacttagataaattgtttgccaagggcattggcatgttagatattgccttaaacgaggcatttaacatcctgagtgactttaaccatactggccaggggtccatctgttcccaggccattatgctgattaccgatggggccgttgacacttacgataccatcttcgcgaaatacaattggcccgatagaaaagtgcggatattcacatacctgattggaagggaggcagcgttcgccgacaacttgaagtggatggcatgcgcaaacaaggggtttttcacgcagatcagcacgctggctgacgttcaagagaatgttatggaatacttgcatgtcctgagccgccccaaggtcattgatcaagagcacgacgtggtgtggacagaagcatacattgactcaacacttccacaggctcagaaactgacagatgaccagggaccagtcctgatgactactgtggccatgcctgtgttttcgaaacagaatgagacaagatcaaaaggcattctgcttggagtcgtgggaacagacgttcctgtaaaagaattactgaagactattcccaagtataaactggggatccacggctatgcttttgcgattacaaacaacgggtatatcttgacacatcctgagctgcggttgctgtacgaggagggaaaaaaaaggcgcaagccaaattacagttccgtggatctgagcgaagttgagtgggaagaccgcgacgacgttttgcggaatgctatggtgaacaggaagaccggtaaatttagcatggaggttaagaaaactgtcgacaaggggaagcgggtgctggtgatgactaacgattactactacactgatataaaaggtaccccattcagcctcggcgtcgccctctctagagggcacgggaaatattttttcaggggcaatgttaccatcgaggaagggctgcacgacctggagcaccctgacgtcagtctggccgatgaatggtcctattgcaacacggatctgcatcctgagcacagacacttgagtcagctggaagctatcaaactgtaccttaaaggaaaagagcccctgctgcagtgcgacaaggagctgatccaagaggtgttgttcgacgccgtggtgagtgcaccgatcgaagcctattggacctctctagccctaaacaaatcggagaactctgacaagggcgtggaagtagccttcctcggaacccgcaccggactgtcacgcattaacctgttcgtgggcgctgaacagctgacaaaccaggactttctgaaagcaggcgataaggagaacattttcaatgctgatcatttcccactgtggtaccggagggcggcagagcagattccaggtagcttcgtctatagcattccattcagcaccggaccggtgaataaatccaatgtcgtaacagcatccacctctatccagttgcttgatgagcgcaagagtccggtggtggccgccgtggggatacagatgaaactcgagtttttccagaggaagttctggaccgctagccggcagtgcgcttccctcgatggaaagtgctctatatcgtgcgatgatgagacagtcaattgttacttgatcgataataatggcttcatactcgtgtctgaagactacacgcaaactggcgacttttttggagaaattgaaggagccgtgatgaataagctgctaactatggggagtttcaagcggatcaccctttatgactaccaggcaatgtgtagagcaaacaaggaaagttccgacggcgcacacggcctcctcgatccttacaatgccttcctctctgctgtcaagtggattatgacggagttggtactgttcctggtcgagtttaatctctgcagctggtggcattctgacatgactgccaaagcacagaagctcaaacagaccctggaaccttgtgacacagagtaccctgcattcgtatctgaacgcaccattaaggaaacaacaggcaacatagcatgcgaagactgttctaaatccttcgtcattcagcaaatccctagttctaacttatttatggttgtggtcgattcatcatgtctgtgtgaaagcgtcgcccccataacaatggctccaattgagatcaggtacaatgagagtctcaaatgcgagaggctgaaagcacagaaaattagacgccgaccggagtcctgtcacggcttccaccccgaggaaaacgcccgtgagtgcgggggggctccaagcctccaggcccagactgttctcctgcttctgcccttactgctgatgctcttcagccgctag

SEQ ID NO: 198185 - DNA, 3276 bp, Artificial Sequence
  derived and/or modified sequence
atggccggccctggcagcccccggcgggccagcagaggagccagcgccctgctggccgccgccctgctgtatgctgccctgggagatgtggtgcgctctgagcagcagatccccctgtctgtggtgaagctgtgggccagcgcctttggaggagagatcaagagcattgctgccaagtacagcggcagccagctgctgcagaagaagtacaaggagtatgagaaggatgtggccatcgaggagattgatggcctgcagctggtgaagaagctggccaagaacatggaggagatgttccacaagaagtctgaggccgtgcggcggctggtggaggccgctgaggaggcccacctgaagcatgaatttgatgctgacctgcagtatgagtacttcaatgctgtgctgatcaatgaaagagacaaggatggcaacttcctggagctgggcaaggagttcatcctggccccaaatgaccacttcaacaacctgcctgtgaacatcagcctgagtgatgtgcaggtgcccaccaacatgtacaacaaggaccctgccatcgtgaatggagtgtactggagcgagagcctgaacaaggtgtttgtggacaactttgaccgggaccccagcctcatctggcagtacttcggcagcgccaagggcttcttccggcagtacccaggcatcaagtgggagccagatgaaaatggagtgattgcctttgactgcaggaacaggaagtggtacatccaggccgccaccagccccaaggatgtggtgatcctggtggatgtgtctggctccatgaagggcctgcggctgaccatcgccaagcagacagtgagcagcatcctggacaccctgggagatgatgacttcttcaacatcatcgcctacaatgaggagctgcactacgtggagccctgcctgaatggcaccctggtgcaggccgacaggaccaacaaggagcacttccgggagcacctggacaagctgtttgccaagggcatcggcatgctggacatcgccctgaatgaggccttcaacatcctgagtgacttcaaccacacaggccagggcagcatctgcagccaggccatcatgctgatcacagatggagctgtggacacctatgacaccatctttgccaagtacaactggccagacaggaaggtgcgcatcttcacctacctgattggccgggaggccgcctttgctgacaacctgaagtggatggcctgtgccaacaagggcttcttcacccagatcagcaccctggctgatgtgcaggagaatgtgatggagtacctgcacgtgctgagccggcccaaggtgattgaccaggagcatgatgtggtgtggacagaggcctacatcgacagcaccctgccccaggcccagaagctgacagatgaccagggccctgtgctgatgaccaccgtggccatgcctgtgttcagcaagcagaatgagaccaggagcaagggcatcctgctgggcgtggtgggcacagatgtgcctgtgaaggagctgctgaagaccatccccaagtacaagctgggcatccacggctacgcctttgccatcaccaacaacggctacatcctgacccaccctgagctgcggctgctgtatgaggagggcaagaagaggaggaagcccaactacagctctgtggacctgtctgaggtggagtgggaggacagagatgatgtgctgagaaatgccatggtgaacaggaagacaggcaagttctccatggaggtgaagaagacagtggacaagggcaagagggtgctggtgatgaccaatgactactactacacagacatcaagggcacccccttcagcctgggcgtggccctgagccggggccacggcaagtacttcttcagaggaaatgtgaccatcgaggagggcctgcatgacctggagcacccagatgtgtccctggctgatgagtggagctactgcaacacagacctgcaccctgagcaccgccacctgagccagctggaggccatcaagctgtacctgaagggcaaggagcccctgctgcagtgtgacaaggagctgatccaggaggtgctgtttgatgctgtggtgtctgcccccatcgaggcctactggaccagcctggccctgaacaagtcagaaaattctgacaagggcgtggaggtggccttcctgggcaccaggacaggcctgagccgcatcaacctgtttgtgggcgctgagcagctgaccaaccaggacttcctgaaggccggggacaaggagaacatcttcaatgctgaccacttccccctgtggtacagaagagctgctgagcagatccctggcagctttgtgtacagcatccccttcagcactggacctgtgaacaagagcaatgtggtgacagccagcaccagcatccagctgctggatgagaggaagagccctgtggtggccgctgtgggcatccagatgaagctggagttcttccagaggaagttctggacagccagccggcagtgtgccagcctggatggcaagtgcagcatcagctgtgatgatgaaacagtgaactgctacctgattgacaacaacggcttcatcctggtgtctgaggactacacccagacaggagacttcttcggggagattgaaggagctgtgatgaacaagctgctgaccatgggcagcttcaagaggatcaccctgtatgactaccaggccatgtgccgggccaacaaggagagcagtgatggagcccacggcctgctggacccctacaatgccttcctgtctgctgtgaagtggatcatgacagagctggtgctcttcctggtggagttcaacctgtgctcctggtggcacagcgacatgacagccaaggcccagaagctgaagcagaccctggagccctgtgacacagagtacccagcctttgtgtctgagaggaccatcaaggagaccaccggcaacatcgcctgtgaggactgcagcaagagctttgtgatccagcagatccccagcagcaacctcttcatggtggtggtggacagcagctgcctgtgtgagagcgtggcccccatcaccatggcccccatcgagatccgctacaatgaaagcctgaagtgtgagcggctgaaggcccagaagatcagaagaagacctgagagctgccacggcttccaccctgaggagaatgcccgggagtgtggcggggcccccagcctgcaggcccagacagtgctgctgctgctgcccctgctgctgatgctgttcagcaggtag

SEQ ID NO: 198186 - DNA, 2997 bp, Artificial Sequence
  derived and/or modified sequence
atgggagagctgcggcaggagaggagcacagccctgcagaggctggtggaggccgctgaggaggcccacctgaagcatgaatttgatgctgacctgcagtatgagtacttcaatgctgtgctgatcaatgaaagagacaaggatggcaacttcctggagctgggcaaggagttcatcctggccccaaatgaccacttcaacaacctgcctgtgaacatcagcctgagtgatgtgcaggtgcccaccaacatgtacaacaaggaccctgccatcgtgaatggagtgtactggagcgagagcctgaacaaggtgtttgtggacaactttgaccgggaccccagcctcatctggcagtacttcggcagcgccaagggcttcttccggcagtacccaggcatcaagtgggagccagatgaaaatggagtgattgcctttgactgcaggaacaggaagtggtacatccaggccgccaccagccccaaggatgtggtgatcctggtggatgtgtctggctccatgaagggcctgcggctgaccatcgccaagcagacagtgagcagcatcctggacaccctgggagatgatgacttcttcaacatcatcgcctacaatgaggagctgcactacgtggagccctgcctgaatggcaccctggtgcaggccgacaggaccaacaaggagcacttccgggagcacctggacaagctgtttgccaagggcatcggcatgctggacatcgccctgaatgaggccttcaacatcctgagtgacttcaaccacacaggccagggcagcatctgcagccaggccatcatgctgatcacagatggagctgtggacacctatgacaccatctttgccaagtacaactggccagacaggaaggtgcgcatcttcacctacctgattggccgggaggccgcctttgctgacaacctgaagtggatggcctgtgccaacaagggcttcttcacccagatcagcaccctggctgatgtgcaggagaatgtgatggagtacctgcacgtgctgagccggcccaaggtgattgaccaggagcatgatgtggtgtggacagaggcctacatcgacagcacagtgtcccaggccgagcagctgacagatgaccagggccctgtgctgatgaccaccgtggccatgcctgtgttcagcaagcagaatgagaccaggagcaagggcatcctgctgggcgtggtgggcacagatgtgcctgtgaaggagctgctgaagaccatccccaagtacaagctgggcatccacggctacgcctttgccatcaccaacaacggctacatcctgacccaccctgagctgcggctgctgtatgaggagggcaagaagaggaggaagcccaactacagctctgtggacctgtctgaggtggagtgggaggacagagatgatgtgctgagaaatgccatggtgaacaggaagacaggcaagttctccatggaggtgaagaagacagtggacaagggcaagagggtgctggtgatgaccaatgactactactacacagacatcaagggcacccccttcagcctgggcgtggccctgagccggggccacggcaagtacttcttcagaggaaatgtgaccatcgaggagggcctgcatgacctggagcacccagatgtgtccctggctgatgagtggagctactgcaacacagacctgcaccctgagcaccgccacctgagccagctggaggccatcaagctgtacctgaagggcaaggagcccctgctgcagtgtgacaaggagctgatccaggaggtgctgtttgatgctgtggtgtctgcccccatcgaggcctactggaccagcctggccctgaacaagtcagaaaattctgacaagggcgtggaggtggccttcctgggcaccaggacaggcctgagccgcatcaacctgtttgtgggcgctgagcagctgaccaaccaggacttcctgaaggccggggacaaggagaacatcttcaatgctgaccacttccccctgtggtacagaagagctgctgagcagatccctggcagctttgtgtacagcatccccttcagcactggacctgtgaacaagagcaatgtggtgacagccagcaccagcatccagctgctggatgagaggaagagccctgtggtggccgctgtgggcatccagatgaagctggagttcttccagaggaagttctggacagccagccggcagtgtgccagcctggatggcaagtgcagcatcagctgtgatgatgaaacagtgaactgctacctgattgacaacaacggcttcatcctggtgtctgaggactacacccagacaggagacttcttcggggagattgaaggagctgtgatgaacaagctgctgaccatgggcagcttcaagaggatcaccctgtatgactaccaggccatgtgccgggccaacaaggagagcagtgatggagcccacggcctgctggacccctacaatgccttcctgtctgctgtgaagtggatcatgacagagctggtgctcttcctggtggagttcaacctgtgctcctggtggcacagcgacatgacagccaaggcccagaagctgaagcagaccctggagccctgtgacacagagtacccagcctttgtgtctgagaggaccatcaaggagaccaccggcaacatcgcctgtgaggactgcagcaagagctttgtgatccagcagatccccagcagcaacctcttcatggtggtggtggacagcagctgcctgtgtgagagcgtggcccccatcaccatggcccccatcgagatcagccagcacaatgaaagcctgaagtgtgagcggctgaaggcccagaagatcagaagaagacctgagagctgccacggcttccacccagaagaaaatgccagagaatgtggcggggcccccagcctgcaggcccagacagtgctgctgctgctgcccctgctgctgatgctgttcagcaggtag

SEQ ID NO: 198187 - DNA, 2994 bp, Artificial Sequence
  derived and/or modified sequence
atggaggagatgttccacaagaagtctgaggccgtgcggcggctggtggaggccgctgaggaggcccacctgaagcatgaatttgatgctgacctgcagtatgagtacttcaatgctgtgctgatcaatgaaagagacaaggatggcaacttcctggagctgggcaaggagttcatcctggccccaaatgaccacttcaacaacctgcctgtgaacatcagcctgagtgatgtgcaggtgcccaccaacatgtacaacaaggaccctgccatcgtgaatggagtgtactggagcgagagcctgaacaaggtgtttgtggacaactttgaccgggaccccagcctcatctggcagtacttcggcagcgccaagggcttcttccggcagtacccaggcatcaagtgggagccagatgaaaatggagtgattgcctttgactgcaggaacaggaagtggtacatccaggccgccaccagccccaaggatgtggtgatcctggtggatgtgtctggctccatgaagggcctgcggctgaccatcgccaagcagacagtgagcagcatcctggacaccctgggagatgatgacttcttcaacatcatcgcctacaatgaggagctgcactacgtggagccctgcctgaatggcaccctggtgcaggccgacaggaccaacaaggagcacttccgggagcacctggacaagctgtttgccaagggcatcggcatgctggacatcgccctgaatgaggccttcaacatcctgagtgacttcaaccacacaggccagggcagcatctgcagccaggccatcatgctgatcacagatggagctgtggacacctatgacaccatctttgccaagtacaactggccagacaggaaggtgcgcatcttcacctacctgattggccgggaggccgcctttgctgacaacctgaagtggatggcctgtgccaacaagggcttcttcacccagatcagcaccctggctgatgtgcaggagaatgtgatggagtacctgcacgtgctgagccggcccaaggtgattgaccaggagcatgatgtggtgtggacagaggcctacatcgacagcaccctgccccaggcccagaagctgacagatgaccagggccctgtgctgatgaccaccgtggccatgcctgtgttcagcaagcagaatgagaccaggagcaagggcatcctgctgggcgtggtgggcacagatgtgcctgtgaaggagctgctgaagaccatccccaagtacaagctgggcatccacggctacgcctttgccatcaccaacaacggctacatcctgacccaccctgagctgcggctgctgtatgaggagggcaagaagaggaggaagcccaactacagctctgtggacctgtctgaggtggagtgggaggacagagatgatgtgctgagaaatgccatggtgaacaggaagacaggcaagttctccatggaggtgaagaagacagtggacaagggcaagagggtgctggtgatgaccaatgactactactacacagacatcaagggcacccccttcagcctgggcgtggccctgagccggggccacggcaagtacttcttcagaggaaatgtgaccatcgaggagggcctgcatgacctggagcacccagatgtgtccctggctgatgagtggagctactgcaacacagacctgcaccctgagcaccgccacctgagccagctggaggccatcaagctgtacctgaagggcaaggagcccctgctgcagtgtgacaaggagctgatccaggaggtgctgtttgatgctgtggtgtctgcccccatcgaggcctactggaccagcctggccctgaacaagtcagaaaattctgacaagggcgtggaggtggccttcctgggcaccaggacaggcctgagccgcatcaacctgtttgtgggcgctgagcagctgaccaaccaggacttcctgaaggccggggacaaggagaacatcttcaatgctgaccacttccccctgtggtacagaagagctgctgagcagatccctggcagctttgtgtacagcatccccttcagcactggacctgtgaacaagagcaatgtggtgacagccagcaccagcatccagctgctggatgagaggaagagccctgtggtggccgctgtgggcatccagatgaagctggagttcttccagaggaagttctggacagccagccggcagtgtgccagcctggatggcaagtgcagcatcagctgtgatgatgaaacagtgaactgctacctgattgacaacaacggcttcatcctggtgtctgaggactacacccagacaggagacttcttcggggagattgaaggagctgtgatgaacaagctgctgaccatgggcagcttcaagaggatcaccctgtatgactaccaggccatgtgccgggccaacaaggagagcagtgatggagcccacggcctgctggacccctacaatgccttcctgtctgctgtgaagtggatcatgacagagctggtgctcttcctggtggagttcaacctgtgctcctggtggcacagcgacatgacagccaaggcccagaagctgaagcagaccctggagccctgtgacacagagtacccagcctttgtgtctgagaggaccatcaaggagaccaccggcaacatcgcctgtgaggactgcagcaagagctttgtgatccagcagatccccagcagcaacctcttcatggtggtggtggacagcagctgcctgtgtgagagcgtggcccccatcaccatggcccccatcgagatccgctacaatgaaagcctgaagtgtgagcggctgaaggcccagaagatcagaagaagacctgagagctgccacggcttccaccctgaggagaatgcccgggagtgtggcggggcccccagcctgcaggcccagacagtgctgctgctgctgcccctgctgctgatgctgttcagcaggtag

SEQ ID NO: 198188 - DNA, 3276 bp, Artificial Sequence
  derived and/or modified sequence
atggccggccccggcagcccccggcgggccagccggggcgccagcgccttgctggcagcagccctgctatacgcagccttgggcgacgtcgtgcggtcagagcagcagattccgctgtccgttgtgaagctttgggcatccgcgtttgggggagaaataaaatccattgccgccaagtactccggaagccagctcctgcagaagaagtacaaggaatacgagaaggacgtggccattgaggaaatcgacgggttgcagcttgtcaagaagctcgcgaagaatatggaagagatgttccacaagaaatccgaagccgtgaggaggctggtggaggcagccgaggaggcccatcttaagcacgaattcgatgccgaccttcagtatgaatacttcaacgccgttctgattaacgagagagataaggacggaaatttcctggagctgggtaaggagtttatcctggcgccaaatgatcactttaacaacctgcctgtcaatattagtttgtccgacgtgcaggtgcctacaaacatgtataataaggatccagccattgtgaacggggtatactggtctgaatcactgaacaaggtgttcgtcgacaattttgatagagatccttccctgatatggcaatattttggctccgccaagggcttcttccggcaatacccaggaattaaatgggagccagacgagaacggtgtgatcgcgttcgactgccgtaacagaaaatggtacatccaggccgcgacatctccaaaggacgtggtcattttagtggacgtaagcggatccatgaaaggactcaggctgactatcgcaaagcaaaccgttagttctattctcgatacacttggggatgatgacttctttaacatcatcgcatataacgaagagctgcactacgtggagccttgcctgaatgggaccttggtccaggccgatcgaaccaacaaagagcatttccgcgaacatctagataagttgttcgctaaagggataggaatgctcgacatcgccctgaacgaggcattcaacatcctgtccgacttcaaccacactggacagggctctatatgcagccaggccattatgcttattaccgacggtgccgttgacacctatgacactattttcgcgaagtacaactggcctgaccggaaggtgcgtatcttcacatatttgattgggcgggaagctgcctttgccgataatcttaagtggatggcttgtgccaacaagggcttttttacccaaattagcacgctggccgacgtgcaagaaaatgtcatggagtaccttcacgtgctgtcacgccccaaagtcatcgatcaggagcatgacgtggtgtggacggaagcttacatcgattctacgttgcctcaggcccagaagctcaccgacgaccagggaccagtcctcatgactactgtcgccatgccggtgttttctaaacaaaatgagacccggtctaagggaatcctcttgggagtggtggggacagacgtacctgttaaggagctgctgaagacaatccctaagtacaagcttggtatccatggttacgcatttgccatcacgaacaatggctatattctgactcacccggaactccgtcttctgtacgaggaaggtaagaaaagaagaaaaccgaattacagttccgtggatctgtcagaagtggaatgggaggacagggacgatgtgttacgcaatgctatggtcaaccggaaaaccgggaagttctccatggaggtcaagaaaaccgtggacaaaggaaaaagagtacttgttatgacaaacgactactattacacggacattaaaggaaccccctttagcttgggtgtggctttgagtcgcgggcacggaaaatatttctttcgtggcaatgtcaccattgaggaagggttgcacgacctggaacacccagatgtttccctggcggatgagtggtcctactgtaatacagaccttcatcccgaacaccggcacctgagtcagctcgaggccatcaagctgtacctcaaaggaaaagagccacttctccagtgcgacaaagagttaattcaggaagtcctgtttgatgccgtggtgtctgcaccgattgaggcctattggacctcactggcccttaataaaagcgagaactcagataagggggttgaagtggcatttctgggcacccgaacaggtttgagcagaataaacctgttcgtgggcgccgagcaactgactaaccaggacttcctgaaagcaggagataaggaaaatatttttaacgccgaccactttccactttggtatcgccgagccgctgagcagatccctggcagctttgtatactccatcccctttagtaccgggcctgtgaacaaatccaatgtagttacagcttctacgtccattcagctccttgacgaacggaagtcccctgtggtcgctgccgtcggaatccaaatgaaactagagttttttcaaagaaagttttggacggcgtcgagacagtgtgccagtctggacgggaaatgttcaatatcttgtgacgatgagaccgtcaactgctacctgattgacaacaacggcttcatcctcgtgtcagaggactatacccaaactggcgatttctttggcgagatcgagggggcagtgatgaataagctgctgactatgggttcattcaaaaggataactctctacgactaccaggccatgtgcagggccaataaggagtctagcgacggtgctcacggtcttctggacccttataatgccttcttatccgccgtcaaatggattatgacagagttagtcttgttcctagttgagttcaatttatgttcctggtggcactcggacatgaccgccaaggcccagaagctcaagcagactcttgaaccttgcgataccgaatacccagcatttgtgtccgagcgaactatcaaggaaacaacaggcaacatcgcgtgcgaggactgctcaaaatcatttgtgatccagcagatcccctcttcaaatctttttatggtagttgtggatagctcctgtctgtgcgaatctgtggcccccatcacaatggcgccaatagaaatccgctacaacgaatcgctgaaatgcgaaagactcaaggcacaaaagatcaggagaagacctgaatcctgccatggcttccacccagaagagaacgcccgagaatgcgggggcgccccatcattacaggcgcagaccgtgttactgttgctgccactgcttttgatgttgtttagtagatag

SEQ ID NO: 198189 - DNA, 2997 bp, Artificial Sequence
  derived and/or modified sequence
atgggcgagctgcggcaggagcggagcaccgccctgcagcggctggtggaggcagctgaagaagctcacctaaagcacgaatttgatgccgatctgcagtacgagtatttcaacgcggtgttaattaatgagcgcgataaagatggtaactttttggaacttgggaaggaatttatccttgctcccaacgatcatttcaacaacctgcctgtgaatatttccctcagtgacgttcaggtacctaccaacatgtataataaggatcccgctatcgtgaatggggtgtattggagcgagtcgctcaacaaagtctttgtagacaatttcgaccgagatccaagtctgatttggcaatattttggctccgccaagggattctttcgccaataccccgggattaaatgggagccggatgaaaatggcgtgatagctttcgattgtcggaacaggaagtggtacatacaggccgcaactagcccgaaagacgtcgtgatcctggttgacgtgagcggttctatgaaggggctcaggcttacgatcgctaagcagactgtgtccagtatattagacactttgggggatgatgacttctttaatattattgcctacaatgaagagctgcactatgtggagccctgtctaaatggaacactggttcaggccgatcggaccaataaggagcactttcgcgagcatctcgacaagctgtttgccaaaggtatcggcatgctggacattgccctcaacgaagcctttaatatcctttcagattttaatcacacgggccaggggtcaatctgttcgcaagctattatgctcattaccgatggggccgtggatacttatgataccatctttgcaaagtacaactggcctgatcggaaagtcaggatctttacatatttaatcggacgcgaagcagctttcgcggataatctaaaatggatggcgtgcgcgaataaaggattcttcacccaaatctccaccctggcagatgtgcaagaaaatgtgatggaatatctccatgtgctgagccgacctaaagtaattgaccaggagcacgatgtggtgtggacagaggcatacatcgattccactgtgtcccaggcggagcagctcaccgatgaccagggacctgtgctgatgacaaccgtcgccatgcctgtgtttagtaagcagaatgagactcgctctaagggcattctgctgggagtggtggggactgacgtgccagttaaagaactgctgaagacaattcccaagtataaactcgggatccatgggtatgcctttgccattactaataacggatacatcctaacacaccccgagctacggctgctgtacgaagaggggaagaagcgacgcaaaccaaactactcttcagtagacctctctgaagttgagtgggaagaccgcgatgacgtgctgaggaacgcaatggtcaaccgcaagacaggcaaattctcaatggaagtgaaaaagaccgttgacaaggggaaacgggttctggtcatgactaacgactactactatacagatattaaaggcaccccgttttctctaggagtggcactttcgcggggccacgggaaatatttcttccggggtaatgtgactatcgaggaagggctgcacgatctggagcaccccgacgtgagcttagccgatgagtggagctattgtaacacggacctgcatcccgaacacagacacttgtctcagcttgaggcaataaaactctaccttaaaggcaaagagcccctgctgcagtgcgacaaagagctaatccaggaggtgctctttgacgccgtggtgtctgctcctattgaggcgtactggacctccctcgccctgaataaatccgaaaattccgacaaaggcgtagaggtggcttttttgggcaccagaacgggtctttctagaatcaatctgtttgtgggcgcagaacagcttactaaccaagactttcttaaagcaggagacaaagaaaacattttcaatgctgatcacttccccctgtggtacagaagagcagccgagcagataccgggatcctttgtgtactccatccctttttcgaccggccccgttaacaagtctaacgtggtcactgcctccacatccatccagctgctcgatgagcgcaaaagtcccgtcgtggccgctgtgggcatccagatgaagctggagttttttcagcgcaagttctggacagcatcacgccaatgcgctagtctggacgggaaatgctcaattagctgtgacgacgagactgtgaactgctacctcattgataataatggatttatcctcgtcagcgaggactacacccagactggagacttctttggagagatcgaaggtgccgtgatgaacaagctgctcactatgggctcatttaaacgcataacactgtacgactatcaggcaatgtgccgggccaacaaagaatcctctgacggcgcccacggcctgctagacccttataatgcctttctcagtgcggtgaaatggataatgaccgaactcgttttgtttctggtggagttcaatctctgtagttggtggcattccgacatgactgcgaaagcgcagaagttgaaacagaccctcgagccctgtgataccgagtatccagcctttgtgtctgagagaactattaaagagacgacaggtaatattgcctgtgaagactgctcaaagtctttcgtgatacagcagatcccttcttcaaaccttttcatggtggtagtggatagttcctgtctctgtgagtccgttgcgcccataactatggcccctatagagatttcccagcataacgagagcctcaagtgtgagaggttgaaagctcagaagattcggcgtaggcccgagagttgccacggattccaccctgaagaaaatgccagggagtgcggcggggccccttcacttcaggctcagacggtgttactgctgcttcctctgctcctaatgctgtttagccgttag

SEQ ID NO: 198190 - DNA, 3276 bp, Artificial Sequence
  derived and/or modified sequence
atggccggccccggcagcccccggcgggccagccggggcgccagcgccctgttggccgccgctctcttgtacgccgcacttggggacgttgtgcggagtgaacagcagatccccctgagtgttgtgaaactgtgggcctctgcatttggcggtgagataaagtctatcgcggccaagtacagcggatctcagcttctgcagaaaaagtacaaggaatatgagaaggatgtggcgatcgaagagatagacgggctgcaattggtgaaaaaattggccaaaaacatggaagaaatgtttcacaaaaaatcggaggccgttcgccgcttggtggaagctgctgaggaagctcatcttaaacacgagttcgacgccgacctgcagtacgagtacttcaacgcagtactgattaacgaaagggacaaagatggcaactttctggagcttgggaaggaatttatcttagcccccaacgatcatttcaacaatctgcctgtcaatatcagcctgagcgacgtgcaagtgccaaccaacatgtataataaggaccccgccatcgtcaacggtgtgtattggtctgagagtttgaacaaagtgttcgtggacaattttgaccgcgaccctagcctgatttggcaatatttcggctcagccaagggcttcttccgtcagtatccgggaattaagtgggagccagatgaaaacggtgtcatagccttcgactgccgcaatcgaaagtggtacatacaggccgccacatcaccaaaagacgtcgtgatcctggtggatgtgtcagggagcatgaagggactccggcttaccatcgcaaagcagacagtttcttcaattctggacactttaggcgatgatgattttttcaacattatcgcatataatgaagaacttcattacgtcgagccatgcttgaacgggaccctcgtccaggccgaccgaaccaataaggaacacttccgcgagcacctggataagcttttcgctaaggggattggcatgctggatatcgccttaaatgaagccttcaacatcctgtctgacttcaaccacaccgggcagggcagcatttgttctcaggctatcatgctgatcaccgatggggcagtcgatacttacgataccatcttcgctaaatacaattggccggacagaaaagtgaggatcttcacatatcttatcggcagagaggcagccttcgcggacaatctcaagtggatggcatgcgctaataaagggtttttcacgcaaatcagtacattagcagacgttcaggaaaacgtcatggagtacctgcacgttctctcgcgacctaaagttatcgatcaggagcatgatgtggtatggactgaggcatatatcgactcgaccctgccgcaggcccagaaactgacggatgaccaaggaccggtcttaatgacaaccgtggcaatgccggtgttttctaaacagaatgagaccaggagcaagggaatcctgctcggagttgtgggaaccgatgtgcctgtaaaagaactgttgaagacaattccaaagtacaagctggggattcacggttacgctttcgcgatcacaaataatgggtacatcctgacccaccctgaactccggctcctgtacgaggagggcaagaaaaggagaaagccaaattactcctccgtcgacttgtcagaagttgaatgggaagacagagacgacgtcctgcgtaacgcaatggtcaatcgaaaaacgggtaagtttagcatggaagtgaagaagaccgttgataagggcaagcgtgtactggtgatgacaaacgattactattataccgatatcaagggcaccccattttcgctaggagtggcactgtccagagggcatggcaagtatttctttcgagggaatgtaaccatcgaagaggggttacatgacctggaacatcccgacgtgtcattggcagatgagtggtcatactgtaacactgacttacacccagaacatcgccacttgtctcaactggaagcgattaaactgtacctgaagggtaaggaacctctgcttcagtgtgacaaggagctgattcaggaggttctgttcgacgccgttgtgtccgcacctatcgaagcttattggaccagcctggctttgaataagtccgagaactctgacaaaggcgtcgaggtggcgttcctgggcaccaggaccggcctctctcggatcaatctgttcgttggggcagagcagctgaccaatcaagactttctcaaggccggcgacaaggaaaacatttttaacgcagaccacttcccactctggtatagacgcgccgctgagcagatccccggatctttcgtgtatagcattcccttctcgaccggacctgtgaataaaagcaacgtggtcacagcttctaccagtatccaacttcttgatgaaagaaagtccccagtcgtggccgccgttggcattcaaatgaagttggaattttttcagcggaaattttggacggcgagtcgtcaatgcgcatcacttgacggtaagtgtagcatttcttgcgatgatgagacagtgaattgttacctcatagacaacaacggtttcatcttggtgagtgaagattatacacaaacgggggacttctttggcgaaatagaaggggcggttatgaataagttactgaccatgggaagcttcaagagaattaccctctatgactaccaggccatgtgcagggctaataaagagtcatctgacggcgcccacggcttactggacccgtacaatgcatttctgtccgccgtgaagtggattatgaccgagcttgtgctattcttagtggaattcaatctctgttcttggtggcattcggatatgacggctaaagcccagaagctgaaacagacattggaaccatgcgatactgaataccccgccttcgtgtctgaacgtacaatcaaagaaactactgggaacatagcatgtgaggattgtagtaaatccttcgtaattcagcaaatcccgtcttcgaacctctttatggttgtagtggactcttcttgtctgtgcgagagtgtggctcccattaccatggcacccatcgaaatacggtataatgagtcattgaagtgcgaaagactgaaagcccagaaaattagaaggagaccggaaagctgccacggctttcacccagaggagaatgcccgagagtgtggtggggcccccagcctgcaagcccaaacagtgctgttgctcctgcccctactgcttatgctgttcagtcggtag

SEQ ID NO: 198191 - DNA, 3276 bp, Artificial Sequence
  derived and/or modified sequence
atggccggccccggcagcccccggcgggccagccggggcgccagcgccttgctcgccgctgctttactctacgccgcactgggggatgttgtgcgtagcgagcagcagatccccctgagtgtggtgaagctgtgggcttcagcttttggaggcgagattaaatctattgccgccaagtatagtggaagtcagcttctgcagaaaaagtacaaagagtatgaaaaggacgttgcgatcgaggagattgatggtctgcagctggtcaagaagctggccaagaacatggaagagatgtttcacaagaagtctgaagcagtgcggcggctggtggaggctgccgaggaagctcacctgaagcatgagtttgatgcagacctccagtacgagtattttaatgccgtgctgatcaatgaaagagacaaggacggaaatttcctggaactggggaaggaatttatcctggccccaaatgatcactttaacaatctcccagtaaacatatcactctccgatgtgcaggtcccaaccaatatgtataacaaagatcccgcaatcgtaaatggcgtttactggtctgagagcctgaacaaagtgtttgtggacaattttgatagagatcccagtctgatctggcagtattttggtagcgctaaggggttcttcagacagtaccccgggatcaagtgggaaccagatgagaacggtgttatcgccttcgactgccgaaacagaaagtggtacattcaggcggcaacttcacccaaagacgtcgtgattcttgtagacgtgagcggaagcatgaaagggcttcggttaacgatcgccaagcagactgtctctagtatccttgataccctcggtgacgatgattttttcaacattattgcatataatgaagaattgcactacgttgagccctgtctgaacggaactctcgttcaggctgatcggaccaacaaagagcacttcagagagcatctcgataagctgttcgctaaaggcatcggaatgttagacatcgcactgaatgaggccttcaacatcctgtccgattttaaccacactggacagggcagcatatgttctcaggcaatcatgctgattaccgatggggcggtcgacacatacgatacgatctttgccaagtataactggcccgaccgcaaggtaaggatcttcacatatctgatagggagggaggcagccttcgccgataatcttaaatggatggcatgtgcaaacaagggattctttacacaaatctccacgttggctgacgtgcaggaaaatgtcatggagtacctccatgttctcagcagacctaaagtcattgaccaagagcatgacgtagtctggacggaggcctatatcgactcaacactcccccaggctcaaaaattgacggacgatcaaggtccggtgttgatgaccaccgttgcgatgccagttttctcaaagcagaacgaaaccaggtctaagggaatcctcctgggtgtcgtcggaaccgacgtgccagtgaaagaactgctaaaaacgatacctaaatacaaattgggcattcatgggtatgcatttgccattactaacaatggttacatcttgactcacccagagctgcgcttgctttacgaagaggggaagaagcggagaaagcctaactatagttctgtcgacctgagcgaagtcgaatgggaggatcgtgacgacgtactgagaaacgccatggtgaaccgtaagactggaaagttcagtatggaggtgaaaaagactgtggacaaggggaaacgggtcctcgtgatgacaaacgattactactataccgatatcaaggggacaccattctccttaggagttgcactaagcaggggccacggtaagtatttctttcgggggaatgttactatcgaggagggacttcatgatttggagcaccctgatgtctccctcgcagacgagtggagttattgcaatacagaccttcatccagaacatagacacctcagtcagctggaggctatcaagctttacctcaaggggaaggagccactgctgcagtgcgataaggagctaatccaggaagtactctttgacgcagtggtcagcgctccaatagaggcttactggactagtttagccttaaataagtccgagaactccgacaagggcgttgaggtggcgttcctgggaactagaactggtttgagtagaattaacctgttcgtgggcgccgaacaactgactaatcaagactttctcaaggccggggacaaggaaaatattttcaatgccgatcacttccctctgtggtacagaagggccgccgaacagattccaggcagcttcgtttatagcatcccctttagtacaggcccagtaaataaatcaaacgtggtcactgcttcaacatctatccaactgctggacgaaaggaagtccccagtggtagctgccgtgggtatccagatgaagctggagttctttcaaagaaagttctggacagcgagtcgccagtgtgcaagtctggatggtaaatgctccatctcctgtgacgatgagaccgtgaactgttacctcatagacaacaatggctttatcttagtcagcgaagattatacccagactggagatttttttggtgagattgagggagccgttatgaacaagctactgacaatgggcagctttaagcgaatcaccctgtatgactatcaggctatgtgtagagctaacaaggagtcctctgatggcgcacacggtctattggatccttacaacgcttttttgtctgcggtgaaatggataatgactgagctggttctgttcctagtagaattcaatctgtgcagctggtggcactctgatatgacagccaaggcacagaaactgaagcagaccctggagccctgtgatactgagtacccagcattcgtttccgagagaacaatcaaggaaactacgggcaacatagcctgcgaggattgtagcaaatcattcgtcattcagcagatcccctcctcaaacctcttcatggtcgtcgtggactcatcatgtctttgcgagtcagtagcacctatcaccatggcacccatcgagattaggtacaacgaaagccttaaatgcgagcggctcaaagcgcaaaagatcagaaggaggccagagtcctgccacggctttcaccctgaggaaaatgctcgagagtgcggcggagccccgtcactgcaggcacagaccgtgttactgttattaccacttctattaatgttgtttagcaggtag

SEQ ID NO: 198192 - DNA, 2994 bp, Artificial Sequence
  derived and/or modified sequence
atggaggagatgttccacaagaagagcgaggccgtgcggcggctggtggaggcagccgaggaagcacacctcaagcatgagttcgacgcagatctacagtatgaatattttaacgctgttctgattaacgagagggataaagacgggaatttcttggagctgggtaaggagttcatcctggctcccaacgatcatttcaataaccttcccgtgaatatttccctttcggacgttcaggtccccactaatatgtacaacaaggatccggctatcgtgaatggagtctattggagcgagagtctgaacaaggtgtttgtagacaactttgacagagacccatccttaatttggcagtattttggtagcgcaaaaggtttctttcggcaatatcccggaataaagtgggaaccagacgagaatggagtgatcgctttcgactgtcgcaacagaaagtggtatattcaggcagccacatcccccaaggatgtcgtgattttagtggatgtcagcggcagcatgaaaggactgcgcttgactatcgccaaacagacggtatcgtcaatcctggatactttgggggatgacgacttctttaacattatcgcttataacgaggagctgcactatgtcgagccctgtcttaatggtacgttggtccaggcagacagaactaacaaggagcacttccgggaacatctcgacaagttgtttgctaaaggtataggaatgttagatatagctctgaatgaagcattcaacatcctgtcggacttcaatcatactgggcagggatcaatttgctctcaggcaatcatgctgatcaccgatggcgccgtcgatacatatgacaccattttcgccaagtacaactggcctgacagaaaggtgcgcatcttcacttacctcattgggagagaagctgcgttcgcggataacctaaagtggatggcctgtgctaacaagggcttttttacccagatcagcacactagctgacgtgcaggaaaacgtgatggaatacctgcacgtgctcagccgacccaaagtcattgatcaggagcatgatgtggtgtggacagaggcgtacattgattctacactgcctcaggcccagaagctaacagacgatcaaggtccagtgctgatgaccacagtagccatgcctgtgttttctaaacagaatgagacccgctcaaaggggatccttcttggagtggtggggactgacgtgcccgtgaaagaacttttaaagaccattccgaaatataagctagggatccacggttacgctttcgccatcaccaataacgggtacatcctgacccatcccgagctcaggctgctgtacgaggagggaaagaagagacggaaacccaactattctagtgttgatctctctgaagtggaatgggaggacagggatgacgtcctgcggaacgctatggtaaatcgcaagactggtaaattctctatggaagtgaagaagacagtggataaggggaagcgcgtgctggtgatgacgaacgactactattatacagatattaaaggaacccccttctccctgggggttgccttgagcagagggcatggtaaatattttttccggggaaatgtgacaattgaggagggcctgcatgatctggaacatccagatgtaagtctggctgacgaatggtcttactgcaataccgacctccaccccgagcatcggcacctgtcacagttggaagcgatcaaactctacctgaaaggaaaagaacctctacttcaatgtgataaagaactgatccaggaggtgctgtttgacgcagtcgttagtgcaccgattgaagcatactggaccagtctcgccctcaacaaatccgagaacagcgataagggtgtggaagtggcgttcctaggaacaaggacaggcctctcaaggatcaacctgtttgtgggggccgagcagctgactaaccaggacttcctaaaggcaggtgacaaggaaaatattttcaacgcagaccactttccactgtggtatcgcagggctgccgagcagatcccgggtagcttcgtgtacagcataccatttagcactggacctgttaataaatcgaatgtggtgacagcgtctacatctattcaattacttgacgaacgaaaaagccctgttgttgccgcggtgggtatccagatgaagctcgaattcttccagcgcaagttttggaccgcttccaggcagtgcgcttctctggatgggaagtgcagcatatcctgcgacgacgagactgtgaactgctatctaatcgataataacgggtttatccttgtgagcgaggattacacacagaccggagatttctttggcgagatcgagggcgccgttatgaataaactgcttacaatggggagctttaagcggatcacactctatgattaccaggctatgtgtagagccaacaaagagtcatctgacggagcgcacggtttgctggatccctacaacgcattcctctctgcggtgaaatggattatgaccgaattggtgttgtttctggtagaattcaatctgtgctcatggtggcacagcgatatgacagccaaagcccaaaagttaaagcagaccctggaaccttgtgacactgagtatccagcattcgtgtctgaaagaaccatcaaggagaccacaggcaatatcgcttgcgaagactgctccaagagctttgtcattcaacagattccgagctccaacttgttcatggttgtggtcgactcaagctgtctctgtgagtcagtcgcacccatcacaatggcccctattgagattaggtataatgaatcccttaagtgtgaaagactcaaggcccaaaaaattcgcaggcgacccgagagctgccacggttttcaccctgaagagaatgcccgggagtgtggaggggccccctctctgcaggctcaaacagttctccttctgctaccacttcttctgatgctcttcagcaggtag

SEQ ID NO: 198193 - DNA, 3276 bp, Artificial Sequence
  derived and/or modified sequence
atggcaggcccaggcagcccacggcgagcgagccggggtgcgagcgcactactggcagctgccctactctacgccgcattgggcgacgtcgtccgttccgagcagcagatccccctgtccgtggttaaactttgggcttcggcattcggcggagaaatcaagtccattgccgcaaagtacagcgggagccagctgctgcagaagaagtataaagagtacgaaaaggatgtcgcaattgaagaaatagatggcctccagttagtgaagaaactcgccaaaaatatggaagagatgttccacaagaaatccgaagctgtcagaaggttagtagaagctgctgaagaggctcatctcaagcatgaattcgacgctgacctgcagtacgaatacttcaatgccgtgcttataaatgaaagggacaaggacgggaactttcttgagttaggcaaggaatttatcttggcacctaatgaccactttaacaacttaccagtcaatattagcctgtcagacgtgcaggtcccaacaaacatgtacaacaaggacccagcaatcgtcaacggtgtgtattggagtgaatccttaaataaggtgtttgtggataacttcgaccgagaccccagtctgatctggcagtatttcgggtcagctaaaggtttcttcaggcagtatcccggaattaaatgggagccggacgagaacggtgtaatcgcctttgattgtcgcaaccggaaatggtacatccaggccgctacatctcccaaagatgtggtgattctggtggacgtgtctggctccatgaaaggcttgagattgacaattgctaagcagaccgtttcttctatcctggatacgttaggcgacgatgactttttcaacatcattgcttataatgaggagctccattacgtcgagccttgcttgaatggaaccctggtgcaggcagaccgcacaaacaaggagcactttcgcgaacacctggacaagctcttcgcaaaaggtatcgggatgctggacatcgccctcaatgaagccttcaatattctgagcgattttaaccataccggccaaggaagtatatgcagccaggctatcatgctgataaccgacggggcagtggatacttatgacactatctttgccaagtacaattggcccgaccgcaaagtccgcatatttacatacttgattggacgggaagccgcatttgctgacaacctaaaatggatggcatgcgcgaacaagggcttctttacccagatctctacactagccgacgtacaagaaaacgtgatggagtacctgcacgtgctgtcgcgacctaaagtgattgaccaagagcacgacgtggtctggaccgaggcctatatcgattccactcttccccaggcgcagaaactcacggatgatcaaggacccgtgttgatgaccaccgttgccatgcctgtgtttagcaagcagaacgagactagatctaagggaattctcctgggagttgtggggacagacgtgcccgtgaaagaactgttgaaaactatccctaaatataaactcgggattcatggctacgcttttgctattacaaataatggctatatcctcacccaccctgagctccgtctgctttacgaagagggtaagaagcgcagaaaacccaattatagctccgtggatctaagcgaggtcgagtgggaggaccgcgacgacgttctaaggaacgccatggtaaataggaagaccgggaagttcagtatggaggttaaaaagaccgtggataaaggcaagagagtcctggtcatgacaaatgactactattatactgacatcaaggggactccattcagtttaggcgttgcactgagcagaggccacggtaagtatttctttcgcggaaatgtgactattgaagagggtcttcacgatcttgaacatcccgacgttagcctagccgatgagtggtcttattgcaacaccgatctgcatcctgaacaccgtcatctaagtcaacttgaggccataaaactgtacctcaaaggcaaagagccactgctgcagtgcgacaaggagctcattcaggaggtgctgttcgacgccgtcgtgtccgccccaatcgaagcatattggacaagtctggcgctgaacaaatccgagaacagcgacaaaggagttgaggtggcctttctgggcacacgaactggactgtcccgcatcaatctgttcgtgggcgctgaacaactgacaaatcaggacttccttaaggcaggggacaaagaaaatatcttcaatgctgatcattttccgttgtggtatagacgtgcagccgaacagatccctgggtctttcgtgtactccataccctttagcacaggcccagttaataaaagtaacgtcgtcacagccagcacttctattcaactcctggacgagaggaagagtccagtcgtcgcggctgtggggatacaaatgaagttggaattctttcagaggaaattctggacggcttctagacagtgtgcctccttagatggaaaatgttctatttcctgcgatgacgaaaccgtgaactgttatctgatcgacaataacggctttattctggtttcagaagattatacacagactggggatttctttggagagatcgaaggggcagtgatgaataagctcctgacgatgggaagtttcaaacgtattaccctgtacgattatcaggctatgtgtcgagccaataaagagtctagcgacggtgctcatggtttgcttgacccctacaatgcatttctgtccgccgtgaagtggattatgactgaactggtactcttccttgttgagttcaacttgtgttcctggtggcattcagatatgactgctaaggctcagaagttgaaacaaactcttgaaccatgtgacacagagtatccagcttttgtaagtgaacgcaccattaaggagaccacaggcaacatcgcatgtgaagattgttcaaaatcatttgttattcaacagattccttctagtaatctgttcatggtggtggttgactcatcttgcttatgtgaaagcgttgcacccataacaatggcgccaatcgagatccgatacaacgaatctctgaagtgcgagcgactgaaagcacagaaaattagacggaggcctgagagttgccacggcttccacccggaggagaatgccagggagtgtggaggtgctccttctctgcaggcacagaccgttctattgctgcttccgctcctgctgatgctgttttcacgctag

SEQ ID NO: 198194 - DNA, 2997 bp, Artificial Sequence
  derived and/or modified sequence
atgggcgaactacgccaggaacgaagtactgccctccagcggctggtggaggcggcagaggaagctcatctgaagcacgaattcgacgcagacctgcagtatgagtattttaatgctgtgctaattaatgagcgtgataaagacgggaacttcctggagctgggaaaagaattcatcctggcccctaacgaccactttaataatctgcccgtcaacattagcctgtccgatgtccaggtgcccactaacatgtacaataaggatccagccatcgtgaacggggtctactggtctgaaagcctcaacaaagtcttcgttgacaacttcgacagagatcctagcttgatttggcagtacttcggctcggcaaaaggattcttcaggcagtacccaggaataaagtgggagcccgatgaaaatggagtgattgccttcgattgccggaacaggaagtggtacatccaggccgctacctcccctaaggacgtcgtgatcttggtggacgtgtctggctcaatgaaagggcttcggctgactattgccaaacaaacagtgagttctatcttggatacattaggtgatgacgacttttttaatattattgcgtataacgaggagctccactatgtggagccttgtctcaacggtacgctggtccaagctgacaggacgaataaggagcacttccgggaacatctggacaagctcttcgctaaaggcattgggatgctggacatcgcgctgaacgaggccttcaacatcctatccgactttaatcatacaggacaggggagtatatgttcccaggccatcatgttaatcaccgacggcgctgtcgatacttatgacacgatctttgccaaatataactggccggatcgcaaggtgagaatattcacctacctaatcggcagggaagctgcctttgcagataatctgaagtggatggcctgcgccaacaagggctttttcacgcagattagcacacttgccgacgtgcaagagaatgtgatggagtatttacatgtcctgagcaggcccaaggttattgaccaggaacacgacgtggtgtggacggaagcgtacattgactccaccgtgagtcaggccgaacagctgactgatgaccaggggccagtgctgatgacgacagttgccatgcccgtgttctctaaacagaatgaaacgagatctaagggcatcctactgggagtggtcgggacagatgtgcctgtcaaggaacttctgaaaaccatccctaagtacaagttagggattcacgggtatgcgttcgctatcacaaataacggctacattttaacccacccggaactacgcctcttgtacgaagaaggaaaaaagaggcgcaaacccaattatagttcagttgacctgtctgaagtggagtgggaggaccgtgatgatgtcctgagaaatgccatggttaaccgcaaaaccggtaagttcagtatggaagtgaagaaaaccgtcgacaagggtaaaagagtccttgtaatgactaacgactactactataccgacatcaaaggaacacctttcagcttaggtgttgccctgtcaagaggacacggcaaatactttttcagaggaaacgtgactattgaggagggcttacacgaccttgagcatcccgatgtcagtctggcggacgagtggtcctactgtaacacggacctccatcctgagcatagacatctctcccagctggaagccatcaaattgtacctgaaaggaaaggagcctttgctgcagtgcgataaggagctgatacaagaggtgctttttgatgctgtcgtcagtgcccctatcgaggcatactggacatctctagcattgaataagtcagagaattcggataagggtgtggaggtcgcattcctgggcacgcgcaccgggctgtctcgaatcaatttgttcgtcggggctgagcagctaaccaatcaggacttcctgaaagcgggagataaggagaatattttcaatgctgatcatttcccgctctggtacaggagagccgcagaacagattcccggaagttttgtgtatagcattccgttcagcacaggtcctgtaaacaagtctaatgtggtcaccgccagtaccagtattcagctgcttgacgaacgcaagtctcctgtggtggccgctgtgggaatccagatgaagctggaattctttcagagaaagttctggactgcctctaggcaatgcgccagcctagatggtaaatgtagcatctcttgcgacgatgagactgtgaactgctatttgattgataacaacggctttatattggtctcagaagattatacacagacaggcgacttcttcggagagatcgagggcgcagttatgaataaactccttacgatgggttcctttaagcgtatcacgctctacgattaccaggctatgtgccgggcaaacaaagagtcgtccgacggtgctcacggcctgttagacccatacaacgcttttctatcagccgtgaaatggattatgactgaattggtgttgttcctcgtcgagttcaatctttgctcgtggtggcacagtgatatgacagcgaaggcccagaagctcaagcaaaccttggagccgtgcgatacagagtatcctgcgtttgtcagcgaaagaaccattaaggaaacaacaggcaatatagcctgtgaggactgttccaaatcctttgtaatacagcaaatcccatcatcaaacctctttatggtcgtggtcgatagtagctgtttgtgcgaaagcgtcgcgccaatcacaatggcacccattgagatctcacagcacaacgaaagcctgaagtgtgaacgtctcaaggcccaaaagataagaaggcgaccggagagctgccatggattccacccggaagaaaacgcgcgtgaatgcgggggtgcgccatcgctgcaagcccagactgtcctgctactcctgcctctcttgttgatgctgttcagcaggtag

SEQ ID NO: 198195 - DNA, 3276 bp, Artificial Sequence
  derived and/or modified sequence
atggccggacccggtagtccaaggcgagcttcacggggtgccagcgcactgctcgcagccgcactgctctatgctgcattaggggatgtcgtgcgctccgagcaacagattcccctttctgtggtgaagctctgggcctctgccttcgggggagagatcaagtccattgccgctaagtactctggctcccagttgctgcaaaagaaatataaagaatacgagaaggacgttgctatcgaagagattgatgggctgcagctggtcaagaagctggccaaaaacatggaagagatgtttcacaaaaagtccgaggcggttaggagactggtggaggctgctgaggaggcccatctcaagcacgagttcgatgcagacctgcagtatgaatattttaatgcagtattaatcaacgagagggataaagacggaaattttctggaacttggcaaggagtttatcctcgctcccaacgaccattttaataacttaccagtcaatatcagcttatctgacgttcaggtgcctactaatatgtataacaaggaccccgctatcgttaatggtgtatactggtccgaatcactgaataaagttttcgtggacaacttcgacagggatccatccttgatttggcagtatttcggaagcgccaaagggttttttaggcaatatcccggtatcaaatgggaaccagacgaaaacggtgtaattgcatttgattgcaggaatagaaagtggtacatccaagctgctacaagccctaaggacgtggtaatcctggtagacgtttctggcagcatgaaggggctcaggctgaccatagctaaacagacagtgtcttcaatcttggataccctgggtgacgacgatttttttaatatcatagcatacaatgaagagttgcattatgtggaaccatgccttaatgggacactggtacaagcagatcgaaccaataaggagcacttcagggagcatttggataagctgtttgccaagggtatcggaatgctggatatcgcactcaacgaggccttcaatatccttagcgacttcaatcacacaggccagggttctatttgttctcaggcaattatgctgataactgatggagcagtcgatacatacgatacaatattcgcgaagtataactggcccgaccggaaggttaggattttcacttatctgatagggagagaggctgcattcgcagacaatctaaaatggatggcttgcgcgaataaaggattcttcacccaaattagtacactagctgatgtgcaggagaatgtaatggagtatcttcacgtcctctcccggccaaaggtcattgaccaggagcatgacgtagtgtggaccgaggcctacatcgactctactcttcctcaggcacagaagctgacagacgatcagggacccgtattgatgaccacagtggcaatgcctgtcttttccaagcagaatgagacaagaagcaaaggcatattactgggagtggtgggcaccgacgtgccagttaaagagctgttaaaaactattccgaaatacaagctgggcatccatggctacgcgtttgcgatcacaaataacggttacattcttactcatccagaactgagactgctctacgaagagggtaagaagagaagaaagcccaactactcttccgtagacctgagcgaggttgaatgggaggatagagacgacgttctccggaacgccatggtaaacaggaagacaggcaagttctcaatggaagtgaagaagaccgtcgacaagggcaagagggtcctcgtaatgacaaatgactactattataccgacattaagggaacaccattttcattaggcgtcgcccttagccgagggcacggaaagtatttttttaggggcaacgtgacaatcgaagagggcctccacgatttggaacatcccgatgtcagcttggctgatgaatggtcgtattgtaatactgatctgcatccagagcatagacacctctcacaactcgaagcaatcaagctctatttgaaaggcaaggagcctttgctgcagtgcgacaaggaacttatacaggaggtcctattcgatgccgtcgtaagcgcacccatcgaagcctattggacatccctggcgctcaacaaatctgagaattcagacaagggtgtggaagtcgcgttccttgggacacgcacaggcctttcccgtataaacctttttgtgggcgctgagcagctcactaatcaggattttctcaaagcaggtgacaaagagaatatttttaacgccgaccacttcccactttggtaccggagagccgcagaacaaattccaggaagcttcgtttactccatcccattttccaccggacctgtgaataagtctaatgtcgtgacagctagtacgagtatacagctcctggatgaaagaaagtcaccagtcgtggcagcagttggaattcagatgaagctggaattctttcagagaaaattctggacagcatctagacagtgcgcaagcctcgacggtaagtgctctatctcttgcgacgatgaaaccgtgaactgttacctcattgataacaatgggttcatactggtgtccgaagactatactcagaccggggatttctttggcgaaatagagggcgcagtcatgaataagttgctaaccatgggctcatttaagaggatcactctgtacgactaccaggctatgtgtcgggcaaacaaagaatcatccgacggtgcccatggcttgctggatccgtataacgcattcctttctgccgtgaaatggatcatgacagagctcgtcctgtttctcgttgagttcaatctgtgctcgtggtggcattctgatatgaccgctaaagctcagaagcttaaacagactctggagccttgcgacacggaatatccagcattcgtgtctgaacggaccatcaaggagaccacgggcaacatcgcatgtgaggactgttccaagtccttcgtgatccaacagatacccagcagcaatctgttcatggtggtggtggattcctcatgtctctgcgagagcgtcgctccaattacaatggcccctatagagatccgctacaacgagtccctgaaatgtgaacggctgaaggcccagaagatcagacgcaggccagagagctgccacggctttcaccccgaagaaaatgcgagagagtgcggaggcgcaccctccctccaggctcagactgtgcttctgctgcttccgctacttctaatgttattctcgcggtag

SEQ ID NO: 198196 - DNA, 3276 bp, Artificial Sequence
  derived and/or modified sequence
atggcgggtccagggtccccccgtcgcgctagcaggggcgcatcagcacttctcgctgccgcactcctctacgcggcacttggggacgttgtgcgctctgagcagcagattccccttagtgtagttaagctttgggccagtgcttttggaggggagataaagagcatcgccgctaaatactccgggtctcagctcctgcagaaaaagtataaggaatacgaaaaggatgtggccatcgaggagatcgacggcctacagctagtgaagaagctggctaaaaacatggaggagatgttccacaaaaagagcgaagccgtgcggcgactcgtcgaagcggctgaagaagctcacctgaaacatgagttcgacgccgatctccagtacgagtattttaacgccgtcctgattaacgagcgcgataaagacggaaactttctcgaactcggcaaagaattcattttggctcccaatgatcactttaacaacctgcccgtcaacataagcctaagcgatgtacaagttccaaccaacatgtacaacaaggaccccgctatcgtcaacggtgtatattggtcggaatcgttaaacaaggtgtttgtcgacaattttgaccgtgatccctcactgatctggcaatattttggcagcgcaaagggattcttcaggcagtacccgggaatcaaatgggaacccgatgaaaacggggtcatcgcttttgattgcagaaatcggaagtggtacattcaggctgcaacgtcaccgaaagatgtagtgattttggtcgatgtgtccggcagcatgaaaggcctgcgtctgacaattgccaagcagactgtgagctcaatactggataccctcggagacgatgactttttcaacataattgcatataacgaagagctccactatgttgaaccctgtctgaatggcacactggtacaggctgatcgcacaaataaagagcattttcgggaacatctcgataaactcttcgcgaaaggcattggtatgctggatattgctctcaatgaagcattcaatatcttatctgactttaaccatacagggcagggctccatctgtagccaggctattatgctgatcactgacggcgctgtagatacatacgatactatctttgctaagtacaactggcccgaccgcaaagtcagaatctttacgtatctgattggacgcgaggcagcattcgccgacaatttgaagtggatggcttgcgccaataaagggttcttcacccagatctctaccctcgcagacgtgcaggagaacgtaatggaataccttcacgtcttatctcgccctaaagtaatagatcaagagcacgacgtggtgtggacggaggcctatattgatagcacactaccccaagcccaaaagttgaccgatgaccaagggccagttctcatgacaaccgtcgccatgccagtcttctccaaacagaacgagaccaggagcaaggggatcttgcttggagttgtcggcaccgatgtgccggtgaaggagttgctgaagactattccaaaatataagctaggcatccacggatatgccttcgccatcaccaataacggttatattctcactcatcctgagttacgcttgctttacgaggagggcaagaaaaggagaaagccaaactacagtagcgtcgatctctcagaagtggagtgggaagatcgcgatgacgtcttgaggaacgcaatggtgaatcgcaagacaggcaaattctcaatggaggtaaaaaagaccgtggacaaaggtaaacgagttctggtcatgacaaacgattactattatactgatatcaagggcaccccattctcacttggcgtcgcactaagtcgcggacatggcaaatactttttcagagggaacgtgaccatcgaggagggtttgcacgatctggagcaccccgacgtcagtctagccgacgagtggtcctattgcaacaccgatcttcacccagaacataggcatcttagtcagctggaagcaatcaaattgtacctcaaagggaaggaacctctactacagtgcgacaaggagctcatccaagaagtgctatttgatgccgtggtgtccgcgccaatcgaggcctattggacttctttggccctgaacaagtccgaaaactcagataagggcgtggaggtcgcatttctgggcaccagaactggcctgagtcggatcaatctgttcgttggagccgaacagctgaccaatcaggatttcctcaaggccggtgacaaggaaaatatattcaacgcggatcactttcctctctggtaccgaagagctgccgaacagattcccggatctttcgtgtatagtatccctttttctaccggccctgtgaacaagtccaatgtggtcacagcctcaactagtattcagttgctggatgagagaaaaagtccagtagtcgcggcagttggtatccagatgaagctggagtttttccaacggaagttctggacagcctcccgacaatgtgctagcctggacgggaagtgttctatatcatgcgacgacgagaccgtaaactgctacctcatcgataataatggttttatcctcgtttcggaagactacacacaaacaggggactttttcggcgagattgagggagcggtaatgaacaaactgctgaccatgggcagcttcaagaggattacgctgtacgactaccaggccatgtgtcgtgccaacaaggaatcttccgacggcgcacacggtctgctggacccatacaatgctttccttagcgccgtcaagtggattatgacggaattggttctcttcctggtggagtttaacctgtgttcctggtggcattcagacatgacggccaaggcacagaagttgaaacagactttagagccttgcgacactgagtatccagcattcgtgtctgagcggactattaaagagactactggtaacatcgcatgtgaagattgctctaagtccttcgtgatccagcaaatcccttcctccaacctctttatggtagttgttgactcaagctgtctgtgcgagagtgtggcacctatcaccatggcccctattgaaatccgctacaacgaatcattgaagtgcgagaggcttaaggctcaaaagatcaggcgccgaccagagagttgccacgggttccatccggaagagaacgcccgagaatgtgggggagccccatctctccaggcccagaccgtgctcctgctcctgcctctcctcctgatgctgttctctcgctag

SEQ ID NO: 198197 - DNA, 2994 bp, Artificial Sequence
  derived and/or modified sequence
atggaggaaatgtttcacaaaaagtctgaagctgtccgcagactggtggaagcagctgaagaagctcacttaaagcatgagtttgacgctgacctgcaatatgaatactttaatgctgtgctcatcaacgagcgcgacaaggatggcaacttcttggaactggggaaagagtttattctggctccaaacgatcattttaataatctaccggtcaacatctccctctccgacgtgcaggtcccaacgaacatgtacaataaggatccagcaattgtgaacggcgtgtactggagtgaatctcttaacaaggtcttcgtcgataatttcgatagggaccccagtctgatatggcagtattttggatccgccaaagggttctttcgacagtaccccggaattaagtgggagcccgacgaaaatggcgttatcgccttcgattgtcgcaaccgtaaatggtacatccaggctgccacctctccaaaagacgtagtgatcctggttgacgtctctgggagcatgaagggactgagactcactatagcaaaacagactgtttcctccattttggacaccttgggagacgatgatttttttaatatcattgcctataatgaagaactgcactacgtcgaaccatgccttaatgggaccttggttcaagcagatcgcaccaacaaggagcactttcgggaacaccttgacaagctcttcgccaagggaattggaatgctggatattgccctgaatgaggccttcaacattctgtcagattttaatcataccgggcagggatcgatttgttcccaggcaatcatgctgattaccgacggcgcagtcgatacttacgacacgattttcgccaagtacaactggccagaccgcaaagtccggatattcacctacctcatcgggagagaagctgcatttgcggataacctgaaatggatggcttgtgccaacaagggttttttcactcagattagtacattggctgacgtccaagagaatgtaatggaataccttcatgtgctcagtaggccaaaggtcatagatcaggaacacgacgttgtttggactgaagcctacattgatagtactctgcctcaggcccagaagttaactgacgaccaagggcctgtattgatgacaactgtagcaatgccggtgtttagcaagcagaacgagaccaggagcaaaggcatccttttaggtgtcgtaggcaccgatgtgccagtgaaggagctgctcaaaacaatcccgaagtataagttgggaatccatgggtacgcttttgccatcacgaacaacgggtatatccttacacacccggagcttagactcctgtacgaggagggcaagaagagaagaaagccgaactatagctcagttgacctttccgaggtcgaatgggaagacagagatgacgtgctcaggaacgcaatggtgaatcggaagacgggcaaattcagtatggaagtgaaaaagactgtcgacaagggaaagcgcgtcttggtgatgaccaatgattattactacactgacatcaagggaaccccctttagcctcggcgtagcgctctcgagaggtcacgggaagtacttctttcggggaaatgttacgatcgaggagggcctgcacgacttggagcatccagacgtttcactagcagacgagtggagttattgtaataccgacctgcatccagaacacaggcatctttcccaattagaagccatcaagttgtatctgaaaggtaaagaaccgctactacaatgcgacaaggaactgattcaagaggtcctcttcgatgcagtggtgtctgcacccattgaggcctactggacctccctcgccctcaataaaagtgagaattctgacaaaggagtggaggtcgcattcctcggaacgcgcaccgggctgtcaagaattaatctgttcgtcggggctgaacagctcaccaaccaggacttcctgaaagcaggggacaaggagaacatattcaatgccgaccattttcctctatggtataggcgcgctgctgaacagatcccaggcagcttcgtctactccattcccttctctacgggcccagtgaataaatccaacgtcgtgactgcttccacctcaatccagctcctcgacgaacgcaaatcaccagttgttgcggctgtgggcatccagatgaagctcgagttcttccagaggaaattttggaccgccagtcggcagtgcgcctctctcgacggcaagtgctctatatcctgcgatgatgaaactgtgaactgctatcttatagataacaatggtttcattctggtctctgaagattatacacagacgggggattttttcggggagattgaaggtgctgtgatgaataagctcctgaccatgggtagcttcaagcgaattaccctatatgactaccaggcgatgtgtcgagctaataaggagtcttccgatggggctcatggactgctggacccgtataatgcatttttgtctgctgttaaatggattatgacggagctggtcttgtttttagtggagttcaatctctgtagctggtggcactctgatatgactgccaaggctcagaaacttaaacagacgttggagccttgcgacaccgagtacccagccttcgtttcagaacgcactattaaagaaaccacaggcaatatcgcttgcgaagattgtagcaagagttttgtgattcagcagattccatcgtcaaatctcttcatggtggtcgtagactcttcttgcttgtgcgagagtgttgccccaatcacgatggctcccatcgaaatcagatacaacgagtctttaaaatgtgaacggctgaaagcacagaaaatccgccgtcgccctgagagttgtcacggattccatcctgaggagaatgccagagaatgtgggggagctccaagcctccaggcccagaccgtgctccttctgctgccactcctgctgatgctctttagccggtag

SEQ ID NO: 198198 - DNA, 3671 bp, Artificial Sequence
  derived and/or modified sequence
cggccgctctcgtcgccgccgcagcgggcgcgtcggagggagcccagcatggccgggccgggctcgccgcgccgcgcgtcccggggggcctcggcgcttctcgctgccgcgcttctctacgccgcgctgggggacgtggtgcgctcggagcagcagataccgctctccgtggtgaagctctgggcctcggcttttggtggggagataaaatccattgctgctaagtactccggttcccagcttctgcaaaagaaatacaaagagtatgagaaagacgttgccatagaagaaattgatggcctccaactggtaaagaagctggcaaagaacatggaagagatgtttcacaagaagtctgaggccgtcaggcgtctggtggaggctgcagaagaagcacacctgaaacatgaatttgatgcagacttacagtatgaatacttcaatgctgtgctgataaatgaaagggacaaagacgggaattttttggagctgggaaaggaattcatcttagccccaaatgaccattttaataatttgcctgtgaacatcagtctaagtgacgtccaagtaccaacgaacatgtacaacaaagaccctgcaattgtcaatggggtttattggtctgaatctctaaacaaagtttttgtagataactttgaccgtgacccatctctcatatggcagtactttggaagtgcaaagggcttttttaggcagtatccggggattaaatgggaaccagatgagaatggagtcattgccttcgactgcaggaaccgaaaatggtacatccaggcagcaacttctccgaaagacgtggtcattttagttgacgtcagtggcagcatgaaaggactccgtctgactatcgcgaagcaaacagtctcatccattttggatacacttggggatgatgacttcttcaacataattgcttataatgaggagcttcactatgtggaaccttgcctgaatggaactttggtgcaagccgacaggacaaacaaagagcacttcagggagcatctggacaaacttttcgccaaaggaattggaatgttggatatagctctgaatgaggccttcaacattctgagtgatttcaaccacacgggacaaggaagtatctgcagtcaggccatcatgctcataactgatggggcggtggacacctatgatacaatctttgcaaaatacaattggccagatcgaaaggttcgcatcttcacatacctcattggacgagaggctgcgtttgcagacaatctaaagtggatggcctgtgccaacaaaggattttttacccagatctccaccttggctgatgtgcaggagaatgtcatggaataccttcacgtgcttagccggcccaaagtcatcgaccaggagcatgatgtggtgtggaccgaagcttacattgacagcactctccctcaggcacaaaagctgactgatgatcagggccccgtcctgatgaccactgtagccatgcctgtgtttagtaagcagaacgaaaccagatcgaagggcattcttctgggagtggttggcacagatgtcccagtgaaagaacttctgaagaccatccccaaatacaagttagggattcacggttatgcctttgcaatcacaaataatggatatatcctgacgcatccggaactcaggctgctgtacgaagaaggaaaaaagcgaaggaaacctaactatagtagcgttgacctctctgaggtggagtgggaagaccgagatgacgtgttgagaaatgctatggtgaatcgaaagacggggaagttttccatggaggtgaagaagacagtggacaaagggaaacgggttttggtgatgacaaatgactactattatacagacatcaagggtactcctttcagtttaggtgtggcgctttccagaggtcatgggaaatatttcttccgagggaatgtaaccatcgaagaaggcctgcatgacttagaacatcccgatgtgtccttggcagatgaatggtcctactgcaacactgacctacaccctgagcaccgccatctgtctcagttagaagcgattaagctctacctaaaaggcaaagaacctctgctccagtgtgataaagaattgatccaagaagtcctttttgacgcggtggtgagtgcccccattgaagcgtattggaccagcctggccctcaacaaatctgaaaattctgacaagggcgtggaggttgccttcctcggcactcgcacgggcctctccagaatcaacctgtttgtcggggctgagcagctcaccaatcaggacttcctgaaagctggcgacaaggagaacatttttaacgcagaccatttccctctctggtaccgaagagccgctgagcagattccagggagcttcgtctactcgatcccattcagcactggaccagtcaataaaagcaatgtggtgacagcaagtacatccatccagctcctggatgaacggaaatctcctgtggtggcagctgtaggcattcagatgaaacttgaatttttccaaaggaagttctggactgccagcagacagtgtgcttccctggatggcaaatgctccatcagctgtgatgatgagactgtgaattgttacctcatagacaataatggatttattttggtgtctgaagactacacacagactggagacttttttggtgagatcgagggagctgtgatgaacaaattgctaacaatgggctcctttaaaagaattaccctttatgactaccaagccatgtgtagagccaacaaggaaagcagcgatggcgcccatggcctcctggatccttataatgccttcctctctgcagtaaaatggatcatgacagaacttgtcttgttcctggtggaatttaacctctgcagttggtggcactccgatatgacagctaaagcccagaaattgaaacagaccctggagccttgtgatactgaatatccagcattcgtctctgagcgcaccatcaaggagactacagggaatattgcttgtgaagactgctccaagtcctttgtcatccagcaaatcccaagcagcaacctgttcatggtggtggtggacagcagctgcctctgtgaatctgtggcccccatcaccatggcacccattgaaatcaggtataatgaatcccttaagtgtgaacgtctaaaggcccagaagatcagaaggcgcccagaatcttgtcatggcttccatcctgaggagaatgcaagggagtgtgggggtgcgccgagtctccaagcccagacagtcctccttctgctccctctgcttttgatgctcttctcaaggtgacactgactgagatgttctcttactgactgagatgttctcttggcatgctaaatcatggataaactgtgaaccaaaatatggtgcaacatacgagacatgaatatagtccaaccatcagcatctcatcatgattttaaactgtgcgtgatataaactcttaaagatatgttgacaaaaagttatctatcatctttttactttgccagtcatgcaaatgtgagtttgccacatgataatcacccttcatcagaaatgggaccgcaagtggtaggcagtgtcccttctgcttgaaacctattgaaaccaatttaaaactgtgtactttttaaataaagtatattaaaatc

SEQ ID NO: 198199 - DNA, 3264 bp, Artificial Sequence
  derived and/or modified sequence
atgggggagttaaggcaagagagaagcacagccttacagcgtctggtggaggctgcagaagaagcacacctgaaacatgaatttgatgcagacttacagtatgaatacttcaatgctgtgctgataaatgaaagggacaaagacgggaattttttggagctgggaaaggaattcatcttagccccaaatgaccattttaataatttgcctgtgaacatcagtctaagtgacgtccaagtaccaacgaacatgtacaacaaagaccctgcaattgtcaatggggtttattggtctgaatctctaaacaaagtttttgtagataactttgaccgtgacccatctctcatatggcagtactttggaagtgcaaagggcttttttaggcagtatccggggattaaatgggaaccagatgagaatggagtcattgccttcgactgcaggaaccgaaaatggtacatccaggcagcaacttctccgaaagacgtggtcattttagttgacgtcagtggcagcatgaaaggactccgtctgactatcgcgaagcaaacagtctcatccattttggatacacttggggatgatgacttcttcaacataattgcttataatgaggagcttcactatgtggaaccttgcctgaatggaactttggtgcaagccgacaggacaaacaaagagcacttcagggagcatctggacaaacttttcgccaaaggaattggaatgttggatatagctctgaatgaggccttcaacattctgagtgatttcaaccacacgggacaaggaagtatctgcagtcaggccatcatgctcataactgatggggcggtggacacctatgatacaatctttgcaaaatacaattggccagatcgaaaggttcgcatcttcacatacctcattggacgagaggctgcgtttgcagacaatctaaagtggatggcctgtgccaacaaaggattttttacccagatctccaccttggctgatgtgcaggagaatgtcatggaataccttcacgtgcttagccggcccaaagtcatcgaccaggagcatgatgtggtgtggaccgaagcttacattgacagcactgtgagtcaggccgagcaactgactgatgatcagggccccgtcctgatgaccactgtagccatgcctgtgtttagtaagcagaacgaaaccagatcgaagggcattcttctgggagtggttggcacagatgtcccagtgaaagaacttctgaagaccatccccaaatacaagttagggattcacggttatgcctttgcaatcacaaataatggatatatcctgacgcatccggaactcaggctgctgtacgaagaaggaaaaaagcgaaggaaacctaactatagtagcgttgacctctctgaggtggagtgggaagaccgagatgacgtgttgagaaatgctatggtgaatcgaaagacggggaagttttccatggaggtgaagaagacagtggacaaagggaaacgggttttggtgatgacaaatgactactattatacagacatcaagggtactcctttcagtttaggtgtggcgctttccagaggtcatgggaaatatttcttccgagggaatgtaaccatcgaagaaggcctgcatgacttagaacatcccgatgtgtccttggcagatgaatggtcctactgcaacactgacctacaccctgagcaccgccatctgtctcagttagaagcgattaagctctacctaaaaggcaaagaacctctgctccagtgtgataaagaattgatccaagaagtcctttttgacgcggtggtgagtgcccccattgaagcgtattggaccagcctggccctcaacaaatctgaaaattctgacaagggcgtggaggttgccttcctcggcactcgcacgggcctctccagaatcaacctgtttgtcggggctgagcagctcaccaatcaggacttcctgaaagctggcgacaaggagaacatttttaacgcagaccatttccctctctggtaccgaagagccgctgagcagattccagggagcttcgtctactcgatcccattcagcactggaccagtcaataaaagcaatgtggtgacagcaagtacatccatccagctcctggatgaacggaaatctcctgtggtggcagctgtaggcattcagatgaaacttgaatttttccaaaggaagttctggactgccagcagacagtgtgcttccctggatggcaaatgctccatcagctgtgatgatgagactgtgaattgttacctcatagacaataatggatttattttggtgtctgaagactacacacagactggagacttttttggtgagatcgagggagctgtgatgaacaaattgctaacaatgggctcctttaaaagaattaccctttatgactaccaagccatgtgtagagccaacaaggaaagcagcgatggcgcccatggcctcctggatccttataatgccttcctctctgcagtaaaatggatcatgacagaacttgtcttgttcctggtggaatttaacctctgcagttggtggcactccgatatgacagctaaagcccagaaattgaaacagaccctggagccttgtgatactgaatatccagcattcgtctctgagcgcaccatcaaggagactacagggaatattgcttgtgaagactgctccaagtcctttgtcatccagcaaatcccaagcagcaacctgttcatggtggtggtggacagcagctgcctctgtgaatctgtggcccccatcaccatggcacccattgaaatcagtcaacataatgaatcccttaagtgtgaacgtctaaaggcccagaagatcagaaggcgcccagaatcttgtcatggcttccatcctgaggagaatgcaagggagtgtgggggtgcgccgagtctccaagcccagacagtcctccttctgctccctctgcttttgatgctcttctcaaggtgacactgactgagatgttctcttactgactgagatgttctcttggcatgctaaatcatggataaactgtgaaccaaaatatggtgcaacatacgagacatgaatatagtccaaccatcagcatctcatcatgattttaaactgtgcgtgatataaactcttaaagatatgttgacaaaaagttatctatcatctttttactttgccagtcatgcaaatgtgagtttgccacatgataatcacccttcatcagaaatgggaccgcaagtg

SEQ ID NO: 198200 - DNA, 3661 bp, Artificial Sequence
  derived and/or modified sequence
cacccgctcctttttctgctccccaagtgagccgggcgctcgcccaccgcccgctccgcgcagctccccgcggccgctctcgtcgccgccgcagcgggcgcgtcggagggagcccagcatggccgggccgggctcgccgcgccgcgcgtcccggggggcctcggcgcttctcgctgccgcgcttctctacgccgcgctgggggacgtggtgcgctcggagcagcagataccgctctccgtggtgaagctctgggcctcggcttttggtggggagataaaatccattgctgctaagtactccggttcccagcttctgcaaaagaaatacaaagagtatgagaaagacgttgccatagaagaaattgatggcctccaactggtaaagaagctggcaaagaacatggaagagatgtttcacaagaagtctgaggccgtcaggcgtctggtggaggctgcagaagaagcacacctgaaacatgaatttgatgcagacttacagtatgaatacttcaatgctgtgctgataaatgaaagggacaaagacgggaattttttggagctgggaaaggaattcatcttagccccaaatgaccattttaataatttgcctgtgaacatcagtctaagtgacgtccaagtaccaacgaacatgtacaacaaagaccctgcaattgtcaatggggtttattggtctgaatctctaaacaaagtttttgtagataactttgaccgtgacccatctctcatatggcagtactttggaagtgcaaagggcttttttaggcagtatccggggattaaatgggaaccagatgagaatggagtcattgccttcgactgcaggaaccgaaaatggtacatccaggcagcaacttctccgaaagacgtggtcattttagttgacgtcagtggcagcatgaaaggactccgtctgactatcgcgaagcaaacagtctcatccattttggatacacttggggatgatgacttcttcaacataattgcttataatgaggagcttcactatgtggaaccttgcctgaatggaactttggtgcaagccgacaggacaaacaaagagcacttcagggagcatctggacaaacttttcgccaaaggaattggaatgttggatatagctctgaatgaggccttcaacattctgagtgatttcaaccacacgggacaaggaagtatctgcagtcaggccatcatgctcataactgatggggcggtggacacctatgatacaatctttgcaaaatacaattggccagatcgaaaggttcgcatcttcacatacctcattggacgagaggctgcgtttgcagacaatctaaagtggatggcctgtgccaacaaaggattttttacccagatctccaccttggctgatgtgcaggagaatgtcatggaataccttcacgtgcttagccggcccaaagtcatcgaccaggagcatgatgtggtgtggaccgaagcttacattgacagcactctccctcaggcacaaaagctgactgatgatcagggccccgtcctgatgaccactgtagccatgcctgtgtttagtaagcagaacgaaaccagatcgaagggcattcttctgggagtggttggcacagatgtcccagtgaaagaacttctgaagaccatccccaaatacaagttagggattcacggttatgcctttgcaatcacaaataatggatatatcctgacgcatccggaactcaggctgctgtacgaagaaggaaaaaagcgaaggaaacctaactatagtagcgttgacctctctgaggtggagtgggaagaccgagatgacgtgttgagaaatgctatggtgaatcgaaagacggggaagttttccatggaggtgaagaagacagtggacaaagggaaacgggttttggtgatgacaaatgactactattatacagacatcaagggtactcctttcagtttaggtgtggcgctttccagaggtcatgggaaatatttcttccgagggaatgtaaccatcgaagaaggcctgcatgacttagaacatcccgatgtgtccttggcagatgaatggtcctactgcaacactgacctacaccctgagcaccgccatctgtctcagttagaagcgattaagctctacctaaaaggcaaagaacctctgctccagtgtgataaagaattgatccaagaagtcctttttgacgcggtggtgagtgcccccattgaagcgtattggaccagcctggccctcaacaaatctgaaaattctgacaagggcgtggaggttgccttcctcggcactcgcacgggcctctccagaatcaacctgtttgtcggggctgagcagctcaccaatcaggacttcctgaaagctggcgacaaggagaacatttttaacgcagaccatttccctctctggtaccgaagagccgctgagcagattccagggagcttcgtctactcgatcccattcagcactggaccagtcaataaaagcaatgtggtgacagcaagtacatccatccagctcctggatgaacggaaatctcctgtggtggcagctgtaggcattcagatgaaacttgaatttttccaaaggaagttctggactgccagcagacagtgtgcttccctggatggcaaatgctccatcagctgtgatgatgagactgtgaattgttacctcatagacaataatggatttattttggtgtctgaagactacacacagactggagacttttttggtgagatcgagggagctgtgatgaacaaattgctaacaatgggctcctttaaaagaattaccctttatgactaccaagccatgtgtagagccaacaaggaaagcagcgatggcgcccatggcctcctggatccttataatgccttcctctctgcagtaaaatggatcatgacagaacttgtcttgttcctggtggaatttaacctctgcagttggtggcactccgatatgacagctaaagcccagaaattgaaacagaccctggagccttgtgatactgaatatccagcattcgtctctgagcgcaccatcaaggagactacagggaatattgcttgtgaagactgctccaagtcctttgtcatccagcaaatcccaagcagcaacctgttcatggtggtggtggacagcagctgcctctgtgaatctgtggcccccatcaccatggcacccattgaaatcaggtataatgaatcccttaagtgtgaacgtctaaaggcccagaagatcagaaggcgcccagaatcttgtcatggcttccatcctgaggagaatgcaagggagtgtgggggtgcgccgagtctccaagcccagacagtcctccttctgctccctctgcttttgatgctcttctcaaggtgacactgactgagatgttctcttactgactgagatgttctcttggcatgctaaatcatggataaactgtgaaccaaaatatggtgcaacatacgagacatgaatatagtccaaccatcagcatctcatcatgattttaaactgtgcgtgatataaactcttaaagatatgttgacaaaaagttatctatcatctttttactttgccagtcatgcaaatgtgagtttgccacatgataatcacccttcatcagaaatgggaccgcaagtg

SEQ ID NO: 198201 - DNA, 3675 bp, Artificial Sequence
  derived and/or modified sequence
cggccgctctcgtcgccgccgcagcgggcgcgtcggagggagcccagcatggccgggccgggctcgccgcgccgcgcgtcccggggggcctcggcgcttctcgctgccgcgcttctctacgccgcgctgggggacgtggtgcgctcggagcagcagataccgctctccgtggtgaagctctgggcctcggcttttggtggggagataaaatccattgctgctaagtactccggttcccagcttctgcaaaagaaatacaaagagtatgagaaagacgttgccatagaagaaattgatggcctccaactggtaaagaagctggcaaagaacatggaagagatgtttcacaagaagtctgaggccgtcaggcgtctggtggaggctgcagaagaagcacacctgaaacatgaatttgatgcagacttacagtatgaatacttcaatgctgtgctgataaatgaaagggacaaagacgggaattttttggagctgggaaaggaattcatcttagccccaaatgaccattttaataatttgcctgtgaacatcagtctaagtgacgtccaagtaccaacgaacatgtacaacaaagaccctgcaattgtcaatggggtttattggtctgaatctctaaacaaagtttttgtagataactttgaccgtgacccatctctcatatggcagtactttggaagtgcaaagggcttttttaggcagtatccggggattaaatgggaaccagatgagaatggagtcattgccttcgactgcaggaaccgaaaatggtacatccaggcagcaacttctccgaaagacgtggtcattttagttgacgtcagtggcagcatgaaaggactccgtctgactatcgcgaagcaaacagtctcatccattttggatacacttggggatgatgacttcttcaacataattgcttataatgaggagcttcactatgtggaaccttgcctgaatggaactttggtgcaagccgacaggacaaacaaagagcacttcagggagcatctggacaaacttttcgccaaaggaattggaatgttggatatagctctgaatgaggccttcaacattctgagtgatttcaaccacacgggacaaggaagtatctgcagtcaggccatcatgctcataactgatggggcggtggacacctatgatacaatctttgcaaaatacaattggccagatcgaaaggttcgcatcttcacatacctcattggacgagaggctgcgtttgcagacaatctaaagtggatggcctgtgccaacaaaggattttttacccagatctccaccttggctgatgtgcaggagaatgtcatggaataccttcacgtgcttagccggcccaaagtcatcgaccaggagcatgatgtggtgtggaccgaagcttacattgacagcactctccctcaggcacaaaagctgactgatgatcagggccccgtcctgatgaccactgtagccatgcctgtgtttagtaagcagaacgaaaccagatcgaagggcattcttctgggagtggttggcacagatgtcccagtgaaagaacttctgaagaccatccccaaatacaagttagggattcacggttatgcctttgcaatcacaaataatggatatatcctgacgcatccggaactcaggctgctgtacgaagaaggaaaaaagcgaaggaaacctaactatagtagcgttgacctctctgaggtggagtgggaagaccgagatgacgtgttgagaaatgctatggtgaatcgaaagacggggaagttttccatggaggtgaagaagacagtggacaaagggaaacgggttttggtgatgacaaatgactactattatacagacatcaagggtactcctttcagtttaggtgtggcgctttccagaggtcatgggaaatatttcttccgagggaatgtaaccatcgaagaaggcctgcatgacttagaacatcccgatgtgtccttggcagatgaatggtcctactgcaacactgacctacaccctgagcaccgccatctgtctcagttagaagcgattaagctctacctaaaaggcaaagaacctctgctccagtgtgataaagaattgatccaagaagtcctttttgacgcggtggtgagtgcccccattgaagcgtattggaccagcctggccctcaacaaatctgaaaattctgacaagggcgtggaggttgccttcctcggcactcgcacgggcctctccagaatcaacctgtttgtcggggctgagcagctcaccaatcaggacttcctgaaagctggcgacaaggagaacatttttaacgcagaccatttccctctctggtaccgaagagccgctgagcagattccagggagcttcgtctactcgatcccattcagcactggaccagtcaataaaagcaatgtggtgacagcaagtacatccatccagctcctggatgaacggaaatctcctgtggtggcagctgtaggcattcagatgaaacttgaatttttccaaaggaagttctggactgccagcagacagtgtgcttccctggatggcaaatgctccatcagctgtgatgatgagactgtgaattgttacctcatagacaataatggatttattttggtgtctgaagactacacacagactggagacttttttggtgagatcgagggagctgtgatgaacaaattgctaacaatgggctcctttaaaagaattaccctttatgactaccaagccatgtgtagagccaacaaggaaagcagcgatggcgcccatggcctcctggatccttataatgccttcctctctgcagtaaaatggatcatgacagaacttgtcttgttcctggtggaatttaacctctgcagttggtggcactccgatatgacagctaaagcccagaaattgaaacagaccctggagccttgtgatactgaatatccagcattcgtctctgagcgcaccatcaaggagactacagggaatattgcttgtgaagactgctccaagtcctttgtcatccagcaaatcccaagcagcaacctgttcatggtggtggtggacagcagctgcctctgtgaatctgtggcccccatcaccatggcacccattgaaatcaggtataatgaatcccttaagtgtgaacgtctaaaggcccagaagatcagaaggcgcccagaatcttgtcatggcttccatcctgaggagaatgcaagggagtgtgggggtgcgccgagtctccaagcccagacagtcctccttctgctccctctgcttttgatgctcttctcaaggtgacactgactgagatgttctcttactgactgagatgttctcttggcatgctaaatcatggataaactgtgaaccaaaatatggtgcaacatacgagacatgaatatagtccaaccatcagcatctcatcatgattttaaactgtgcgtgatataaactcttaaagatatgttgacaaaaagttatctatcatctttttactttgccagtcatgcaaatgtgagtttgccacatgataatcacccttcatcagaaatgggaccgcaagtggtaggcagtgtcccttctgcttgaaacctattgaaaccaatttaaaactgtgtactttttaaataaagtatattaaaatcataa

SEQ ID NO: 198202 - DNA, 3557 bp, Artificial Sequence
  derived and/or modified sequence
gttgactgtgacacgggtgttacatatcttcctgtgccccttctccctgtagggtgaagctctgggcctcggcttttggtggggagataaaatccattgctgctaagtactccggttcccagcttctgcaaaagaaatacaaagagtatgagaaagacgttgccatagaagaaattgatggcctccaactggtaaagaagctggcaaagaacatggaagagatgtttcacaagaagtctgaggccgtcaggcgtctggtggaggctgcagaagaagcacacctgaaacatgaatttgatgcagacttacagtatgaatacttcaatgctgtgctgataaatgaaagggacaaagacgggaattttttggagctgggaaaggaattcatcttagccccaaatgaccattttaataatttgcctgtgaacatcagtctaagtgacgtccaagtaccaacgaacatgtacaacaaagaccctgcaattgtcaatggggtttattggtctgaatctctaaacaaagtttttgtagataactttgaccgtgacccatctctcatatggcagtactttggaagtgcaaagggcttttttaggcagtatccggggattaaatgggaaccagatgagaatggagtcattgccttcgactgcaggaaccgaaaatggtacatccaggcagcaacttctccgaaagacgtggtcattttagttgacgtcagtggcagcatgaaaggactccgtctgactatcgcgaagcaaacagtctcatccattttggatacacttggggatgatgacttcttcaacataattgcttataatgaggagcttcactatgtggaaccttgcctgaatggaactttggtgcaagccgacaggacaaacaaagagcacttcagggagcatctggacaaacttttcgccaaaggaattggaatgttggatatagctctgaatgaggccttcaacattctgagtgatttcaaccacacgggacaaggaagtatctgcagtcaggccatcatgctcataactgatggggcggtggacacctatgatacaatctttgcaaaatacaattggccagatcgaaaggttcgcatcttcacatacctcattggacgagaggctgcgtttgcagacaatctaaagtggatggcctgtgccaacaaaggattttttacccagatctccaccttggctgatgtgcaggagaatgtcatggaataccttcacgtgcttagccggcccaaagtcatcgaccaggagcatgatgtggtgtggaccgaagcttacattgacagcactctccctcaggcacaaaagctgactgatgatcagggccccgtcctgatgaccactgtagccatgcctgtgtttagtaagcagaacgaaaccagatcgaagggcattcttctgggagtggttggcacagatgtcccagtgaaagaacttctgaagaccatccccaaatacaagttagggattcacggttatgcctttgcaatcacaaataatggatatatcctgacgcatccggaactcaggctgctgtacgaagaaggaaaaaagcgaaggaaacctaactatagtagcgttgacctctctgaggtggagtgggaagaccgagatgacgtgttgagaaatgctatggtgaatcgaaagacggggaagttttccatggaggtgaagaagacagtggacaaagggaaacgggttttggtgatgacaaatgactactattatacagacatcaagggtactcctttcagtttaggtgtggcgctttccagaggtcatgggaaatatttcttccgagggaatgtaaccatcgaagaaggcctgcatgacttagaacatcccgatgtgtccttggcagatgaatggtcctactgcaacactgacctacaccctgagcaccgccatctgtctcagttagaagcgattaagctctacctaaaaggcaaagaacctctgctccagtgtgataaagaattgatccaagaagtcctttttgacgcggtggtgagtgcccccattgaagcgtattggaccagcctggccctcaacaaatctgaaaattctgacaagggcgtggaggttgccttcctcggcactcgcacgggcctctccagaatcaacctgtttgtcggggctgagcagctcaccaatcaggacttcctgaaagctggcgacaaggagaacatttttaacgcagaccatttccctctctggtaccgaagagccgctgagcagattccagggagcttcgtctactcgatcccattcagcactggaccagtcaataaaagcaatgtggtgacagcaagtacatccatccagctcctggatgaacggaaatctcctgtggtggcagctgtaggcattcagatgaaacttgaatttttccaaaggaagttctggactgccagcagacagtgtgcttccctggatggcaaatgctccatcagctgtgatgatgagactgtgaattgttacctcatagacaataatggatttattttggtgtctgaagactacacacagactggagacttttttggtgagatcgagggagctgtgatgaacaaattgctaacaatgggctcctttaaaagaattaccctttatgactaccaagccatgtgtagagccaacaaggaaagcagcgatggcgcccatggcctcctggatccttataatgccttcctctctgcagtaaaatggatcatgacagaacttgtcttgttcctggtggaatttaacctctgcagttggtggcactccgatatgacagctaaagcccagaaattgaaacagaccctggagccttgtgatactgaatatccagcattcgtctctgagcgcaccatcaaggagactacagggaatattgcttgtgaagactgctccaagtcctttgtcatccagcaaatcccaagcagcaacctgttcatggtggtggtggacagcagctgcctctgtgaatctgtggcccccatcaccatggcacccattgaaatcaggtataatgaatcccttaagtgtgaacgtctaaaggcccagaagatcagaaggcgcccagaatcttgtcatggcttccatcctgaggagaatgcaagggagtgtgggggtgcgccgagtctccaagcccagacagtcctccttctgctccctctgcttttgatgctcttctcaaggtgacactgactgagatgttctcttactgactgagatgttctcttggcatgctaaatcatggataaactgtgaaccaaaatatggtgcaacatacgagacatgaatatagtccaaccatcagcatctcatcatgattttaaactgtgcgtgatataaactcttaaagatatgttgacaaaaagttatctatcatctttttactttgccagtcatgcaaatgtgagtttgccacatgataatcacccttcatcagaaatgggaccgcaagtggtaggcagtgtcccttctgcttgaaacctattgaaaccaatttaaaactgtgtactttttaaataaagtatattaaaatcataa

SEQ ID NO: 198203 - DNA, 3276 bp, Artificial Sequence
  derived and/or modified sequence
atggccggccccggcagccccagaagagccagcagaggcgccagcgccctgctggccgccgccctgctgtacgccgccctgggcgacgtggtgagaagcgagcagcagatccccctgagcgtggtgaagctgtgggccagcgccttcggcggcgagatcaagagcatcgccgccaagtacagcggcagccagctgctgcagaagaagtacaaggagtacgagaaggacgtggccatcgaggagatcgacggcctgcagctggtgaagaagctggccaagaacatggaggagatgttccacaagaagagcgaggccgtgagaagactggtggaggccgccgaggaggcccacctgaagcacgagttcgacgccgacctgcagtacgagtacttcaacgccgtgctgatcaacgagagagacaaggacggcaacttcctggagctgggcaaggagttcatcctggcccccaacgaccacttcaacaacctgcccgtgaacatcagcctgagcgacgtgcaggtgcccaccaacatgtacaacaaggaccccgccatcgtgaacggcgtgtactggagcgagagcctgaacaaggtgttcgtggacaacttcgacagagaccccagcctgatctggcagtacttcggcagcgccaagggcttcttcagacagtaccccggcatcaagtgggagcccgacgagaacggcgtgatcgccttcgactgcagaaacagaaagtggtacatccaggccgccaccagccccaaggacgtggtgatcctggtggacgtgagcggcagcatgaagggcctgagactgaccatcgccaagcagaccgtgagcagcatcctggacaccctgggcgacgacgacttcttcaacatcatcgcctacaacgaggagctgcactacgtggagccctgcctgaacggcaccctggtgcaggccgacagaaccaacaaggagcacttcagagagcacctggacaagctgttcgccaagggcatcggcatgctggacatcgccctgaacgaggccttcaacatcctgagcgacttcaaccacaccggccagggcagcatctgcagccaggccatcatgctgatcaccgacggcgccgtggacacctacgacaccatcttcgccaagtacaactggcccgacagaaaggtgagaatcttcacctacctgatcggcagagaggccgccttcgccgacaacctgaagtggatggcctgcgccaacaagggcttcttcacccagatcagcaccctggccgacgtgcaggagaacgtgatggagtacctgcacgtgctgagcagacccaaggtgatcgaccaggagcacgacgtggtgtggaccgaggcctacatcgacagcaccctgccccaggcccagaagctgaccgacgaccagggccccgtgctgatgaccaccgtggccatgcccgtgttcagcaagcagaacgagaccagaagcaagggcatcctgctgggcgtggtgggcaccgacgtgcccgtgaaggagctgctgaagaccatccccaagtacaagctgggcatccacggctacgccttcgccatcaccaacaacggctacatcctgacccaccccgagctgagactgctgtacgaggagggcaagaagagaagaaagcccaactacagcagcgtggacctgagcgaggtggagtgggaggacagagacgacgtgctgagaaacgccatggtgaacagaaagaccggcaagttcagcatggaggtgaagaagaccgtggacaagggcaagagagtgctggtgatgaccaacgactactactacaccgacatcaagggcacccccttcagcctgggcgtggccctgagcagaggccacggcaagtacttcttcagaggcaacgtgaccatcgaggagggcctgcacgacctggagcaccccgacgtgagcctggccgacgagtggagctactgcaacaccgacctgcaccccgagcacagacacctgagccagctggaggccatcaagctgtacctgaagggcaaggagcccctgctgcagtgcgacaaggagctgatccaggaggtgctgttcgacgccgtggtgagcgcccccatcgaggcctactggaccagcctggccctgaacaagagcgagaacagcgacaagggcgtggaggtggccttcctgggcaccagaaccggcctgagcagaatcaacctgttcgtgggcgccgagcagctgaccaaccaggacttcctgaaggccggcgacaaggagaacatcttcaacgccgaccacttccccctgtggtacagaagagccgccgagcagatccccggcagcttcgtgtacagcatccccttcagcaccggccccgtgaacaagagcaacgtggtgaccgccagcaccagcatccagctgctggacgagagaaagagccccgtggtggccgccgtgggcatccagatgaagctggagttcttccagagaaagttctggaccgccagcagacagtgcgccagcctggacggcaagtgcagcatcagctgcgacgacgagaccgtgaactgctacctgatcgacaacaacggcttcatcctggtgagcgaggactacacccagaccggcgacttcttcggcgagatcgagggcgccgtgatgaacaagctgctgaccatgggcagcttcaagagaatcaccctgtacgactaccaggccatgtgcagagccaacaaggagagcagcgacggcgcccacggcctgctggacccctacaacgccttcctgagcgccgtgaagtggatcatgaccgagctggtgctgttcctggtggagttcaacctgtgcagctggtggcacagcgacatgaccgccaaggcccagaagctgaagcagaccctggagccctgcgacaccgagtaccccgccttcgtgagcgagagaaccatcaaggagaccaccggcaacatcgcctgcgaggactgcagcaagagcttcgtgatccagcagatccccagcagcaacctgttcatggtggtggtggacagcagctgcctgtgcgagagcgtggcccccatcaccatggcccccatcgagatcagatacaacgagagcctgaagtgcgagagactgaaggcccagaagatcagaagaagacccgagagctgccacggcttccaccccgaggagaacgccagagagtgcggcggcgcccccagcctgcaggcccagaccgtgctgctgctgctgcccctgctgctgatgctgttcagcagatag

SEQ ID NO: 198204 - DNA, 2997 bp, Artificial Sequence
  derived and/or modified sequence
atgggcgagctgagacaggagagaagcaccgccctgcagagactggtggaggccgccgaggaggcccacctgaagcacgagttcgacgccgacctgcagtacgagtacttcaacgccgtgctgatcaacgagagagacaaggacggcaacttcctggagctgggcaaggagttcatcctggcccccaacgaccacttcaacaacctgcccgtgaacatcagcctgagcgacgtgcaggtgcccaccaacatgtacaacaaggaccccgccatcgtgaacggcgtgtactggagcgagagcctgaacaaggtgttcgtggacaacttcgacagagaccccagcctgatctggcagtacttcggcagcgccaagggcttcttcagacagtaccccggcatcaagtgggagcccgacgagaacggcgtgatcgccttcgactgcagaaacagaaagtggtacatccaggccgccaccagccccaaggacgtggtgatcctggtggacgtgagcggcagcatgaagggcctgagactgaccatcgccaagcagaccgtgagcagcatcctggacaccctgggcgacgacgacttcttcaacatcatcgcctacaacgaggagctgcactacgtggagccctgcctgaacggcaccctggtgcaggccgacagaaccaacaaggagcacttcagagagcacctggacaagctgttcgccaagggcatcggcatgctggacatcgccctgaacgaggccttcaacatcctgagcgacttcaaccacaccggccagggcagcatctgcagccaggccatcatgctgatcaccgacggcgccgtggacacctacgacaccatcttcgccaagtacaactggcccgacagaaaggtgagaatcttcacctacctgatcggcagagaggccgccttcgccgacaacctgaagtggatggcctgcgccaacaagggcttcttcacccagatcagcaccctggccgacgtgcaggagaacgtgatggagtacctgcacgtgctgagcagacccaaggtgatcgaccaggagcacgacgtggtgtggaccgaggcctacatcgacagcaccgtgagccaggccgagcagctgaccgacgaccagggccccgtgctgatgaccaccgtggccatgcccgtgttcagcaagcagaacgagaccagaagcaagggcatcctgctgggcgtggtgggcaccgacgtgcccgtgaaggagctgctgaagaccatccccaagtacaagctgggcatccacggctacgccttcgccatcaccaacaacggctacatcctgacccaccccgagctgagactgctgtacgaggagggcaagaagagaagaaagcccaactacagcagcgtggacctgagcgaggtggagtgggaggacagagacgacgtgctgagaaacgccatggtgaacagaaagaccggcaagttcagcatggaggtgaagaagaccgtggacaagggcaagagagtgctggtgatgaccaacgactactactacaccgacatcaagggcacccccttcagcctgggcgtggccctgagcagaggccacggcaagtacttcttcagaggcaacgtgaccatcgaggagggcctgcacgacctggagcaccccgacgtgagcctggccgacgagtggagctactgcaacaccgacctgcaccccgagcacagacacctgagccagctggaggccatcaagctgtacctgaagggcaaggagcccctgctgcagtgcgacaaggagctgatccaggaggtgctgttcgacgccgtggtgagcgcccccatcgaggcctactggaccagcctggccctgaacaagagcgagaacagcgacaagggcgtggaggtggccttcctgggcaccagaaccggcctgagcagaatcaacctgttcgtgggcgccgagcagctgaccaaccaggacttcctgaaggccggcgacaaggagaacatcttcaacgccgaccacttccccctgtggtacagaagagccgccgagcagatccccggcagcttcgtgtacagcatccccttcagcaccggccccgtgaacaagagcaacgtggtgaccgccagcaccagcatccagctgctggacgagagaaagagccccgtggtggccgccgtgggcatccagatgaagctggagttcttccagagaaagttctggaccgccagcagacagtgcgccagcctggacggcaagtgcagcatcagctgcgacgacgagaccgtgaactgctacctgatcgacaacaacggcttcatcctggtgagcgaggactacacccagaccggcgacttcttcggcgagatcgagggcgccgtgatgaacaagctgctgaccatgggcagcttcaagagaatcaccctgtacgactaccaggccatgtgcagagccaacaaggagagcagcgacggcgcccacggcctgctggacccctacaacgccttcctgagcgccgtgaagtggatcatgaccgagctggtgctgttcctggtggagttcaacctgtgcagctggtggcacagcgacatgaccgccaaggcccagaagctgaagcagaccctggagccctgcgacaccgagtaccccgccttcgtgagcgagagaaccatcaaggagaccaccggcaacatcgcctgcgaggactgcagcaagagcttcgtgatccagcagatccccagcagcaacctgttcatggtggtggtggacagcagctgcctgtgcgagagcgtggcccccatcaccatggcccccatcgagatcagccagcacaacgagagcctgaagtgcgagagactgaaggcccagaagatcagaagaagacccgagagctgccacggcttccaccccgaggagaacgccagagagtgcggcggcgcccccagcctgcaggcccagaccgtgctgctgctgctgcccctgctgctgatgctgttcagcagatag

SEQ ID NO: 198205 - DNA, 2994 bp, Artificial Sequence
  derived and/or modified sequence
atggaggagatgttccacaagaagagcgaggccgtgagaagactggtggaggccgccgaggaggcccacctgaagcacgagttcgacgccgacctgcagtacgagtacttcaacgccgtgctgatcaacgagagagacaaggacggcaacttcctggagctgggcaaggagttcatcctggcccccaacgaccacttcaacaacctgcccgtgaacatcagcctgagcgacgtgcaggtgcccaccaacatgtacaacaaggaccccgccatcgtgaacggcgtgtactggagcgagagcctgaacaaggtgttcgtggacaacttcgacagagaccccagcctgatctggcagtacttcggcagcgccaagggcttcttcagacagtaccccggcatcaagtgggagcccgacgagaacggcgtgatcgccttcgactgcagaaacagaaagtggtacatccaggccgccaccagccccaaggacgtggtgatcctggtggacgtgagcggcagcatgaagggcctgagactgaccatcgccaagcagaccgtgagcagcatcctggacaccctgggcgacgacgacttcttcaacatcatcgcctacaacgaggagctgcactacgtggagccctgcctgaacggcaccctggtgcaggccgacagaaccaacaaggagcacttcagagagcacctggacaagctgttcgccaagggcatcggcatgctggacatcgccctgaacgaggccttcaacatcctgagcgacttcaaccacaccggccagggcagcatctgcagccaggccatcatgctgatcaccgacggcgccgtggacacctacgacaccatcttcgccaagtacaactggcccgacagaaaggtgagaatcttcacctacctgatcggcagagaggccgccttcgccgacaacctgaagtggatggcctgcgccaacaagggcttcttcacccagatcagcaccctggccgacgtgcaggagaacgtgatggagtacctgcacgtgctgagcagacccaaggtgatcgaccaggagcacgacgtggtgtggaccgaggcctacatcgacagcaccctgccccaggcccagaagctgaccgacgaccagggccccgtgctgatgaccaccgtggccatgcccgtgttcagcaagcagaacgagaccagaagcaagggcatcctgctgggcgtggtgggcaccgacgtgcccgtgaaggagctgctgaagaccatccccaagtacaagctgggcatccacggctacgccttcgccatcaccaacaacggctacatcctgacccaccccgagctgagactgctgtacgaggagggcaagaagagaagaaagcccaactacagcagcgtggacctgagcgaggtggagtgggaggacagagacgacgtgctgagaaacgccatggtgaacagaaagaccggcaagttcagcatggaggtgaagaagaccgtggacaagggcaagagagtgctggtgatgaccaacgactactactacaccgacatcaagggcacccccttcagcctgggcgtggccctgagcagaggccacggcaagtacttcttcagaggcaacgtgaccatcgaggagggcctgcacgacctggagcaccccgacgtgagcctggccgacgagtggagctactgcaacaccgacctgcaccccgagcacagacacctgagccagctggaggccatcaagctgtacctgaagggcaaggagcccctgctgcagtgcgacaaggagctgatccaggaggtgctgttcgacgccgtggtgagcgcccccatcgaggcctactggaccagcctggccctgaacaagagcgagaacagcgacaagggcgtggaggtggccttcctgggcaccagaaccggcctgagcagaatcaacctgttcgtgggcgccgagcagctgaccaaccaggacttcctgaaggccggcgacaaggagaacatcttcaacgccgaccacttccccctgtggtacagaagagccgccgagcagatccccggcagcttcgtgtacagcatccccttcagcaccggccccgtgaacaagagcaacgtggtgaccgccagcaccagcatccagctgctggacgagagaaagagccccgtggtggccgccgtgggcatccagatgaagctggagttcttccagagaaagttctggaccgccagcagacagtgcgccagcctggacggcaagtgcagcatcagctgcgacgacgagaccgtgaactgctacctgatcgacaacaacggcttcatcctggtgagcgaggactacacccagaccggcgacttcttcggcgagatcgagggcgccgtgatgaacaagctgctgaccatgggcagcttcaagagaatcaccctgtacgactaccaggccatgtgcagagccaacaaggagagcagcgacggcgcccacggcctgctggacccctacaacgccttcctgagcgccgtgaagtggatcatgaccgagctggtgctgttcctggtggagttcaacctgtgcagctggtggcacagcgacatgaccgccaaggcccagaagctgaagcagaccctggagccctgcgacaccgagtaccccgccttcgtgagcgagagaaccatcaaggagaccaccggcaacatcgcctgcgaggactgcagcaagagcttcgtgatccagcagatccccagcagcaacctgttcatggtggtggtggacagcagctgcctgtgcgagagcgtggcccccatcaccatggcccccatcgagatcagatacaacgagagcctgaagtgcgagagactgaaggcccagaagatcagaagaagacccgagagctgccacggcttccaccccgaggagaacgccagagagtgcggcggcgcccccagcctgcaggcccagaccgtgctgctgctgctgcccctgctgctgatgctgttcagcagatag

SEQ ID NO: 198206 - protein, 414 aa, Artificial Sequence
  derived and/or modified sequence
MGGNHSHKPPVFDENEEVNFDHFQILRAIGKGSFGKVCIVQKRDTKKMYAMKYMNKQKCIERDEVRNVFRELQIMQGLEHPFLVNLWYSFQDEEDMFMVVDLLLGGDLRYHLQQNVHFTEGTVKLYICELALALEYLQRYHIIHRDIKPDNILLDEHGHVHITDFNIATVVKGAERASSMAGTKPYMAPEVFQVYMDRGPGYSYPVDWWSLGITAYELLRGWRPYEIHSVTPIDEILNMFKVERVHYSSTWCKGMVALLRKLLTKDPESRVSSLHDIQSVPYLADMNWDAVFKKALMPGFVPNKGRLNCDPTFELEEMILESKPLHKKKKRLAKNRSRDGTKDSCPLNGHLQHCLETVREEFIIFNREKLRRQQGQGSQLLDTDSRGGGQAQSKLQDGCNNNLLTHTCTRGCSS

SEQ ID NO: 198207 - protein, 367 aa, Artificial Sequence
  derived and/or modified sequence
MYAMKYMNKQKCIERDEVRNVFRELQIMQGLEHPFLVNLWYSFQDEEDMFMVVDLLLGGDLRYHLQQNVHFTEGTVKLYICELALALEYLQRYHIIHRDIKPDNILLDEHGHVHITDFNIATVVKGAERASSMAGTKPYMAPEVFQVYMDRGPGYSYPVDWWSLGITAYELLRGWRPYEIHSVTPIDEILNMFKVERVHYSSTWCKGMVALLRKLLTKDPESRVSSLHDIQSVPYLADMNWDAVFKKALMPGFVPNKGRLNCDPTFELEEMILESKPLHKKKKRLAKNRSRDGTKDSCPLNGHLQHCLETVREEFIIFNREKLRRQQGQGSQLLDTDSRGGGQAQSKLQDGCNNNLLTHTCTRGCSS

SEQ ID NO: 198208 - DNA, 1245 bp, Artificial Sequence
  derived and/or modified sequence
atgggcggcaaccacagccacaagccccccgtgttcgacgagaacgaggaggtgaacttcgaccacttccagatcctgagagccatcggcaagggcagcttcggcaaggtgtgcatcgtgcagaagagagacaccaagaagatgtacgccatgaagtacatgaacaagcagaagtgcatcgagagagacgaggtgagaaacgtgttcagagagctgcagatcatgcagggcctggagcaccccttcctggtgaacctgtggtacagcttccaggacgaggaggacatgttcatggtggtggacctgctgctgggcggcgacctgagataccacctgcagcagaacgtgcacttcaccgagggcaccgtgaagctgtacatctgcgagctggccctggccctggagtacctgcagagataccacatcatccacagagacatcaagcccgacaacatcctgctggacgagcacggccacgtgcacatcaccgacttcaacatcgccaccgtggtgaagggcgccgagagagccagcagcatggccggcaccaagccctacatggcccccgaggtgttccaggtgtacatggacagaggccccggctacagctaccccgtggactggtggagcctgggcatcaccgcctacgagctgctgagaggctggagaccctacgagatccacagcgtgacccccatcgacgagatcctgaacatgttcaaggtggagagagtgcactacagcagcacctggtgcaagggcatggtggccctgctgagaaagctgctgaccaaggaccccgagagcagagtgagcagcctgcacgacatccagagcgtgccctacctggccgacatgaactgggacgccgtgttcaagaaggccctgatgcccggcttcgtgcccaacaagggcagactgaactgcgaccccaccttcgagctggaggagatgatcctggagagcaagcccctgcacaagaagaagaagagactggccaagaacagaagcagagacggcaccaaggacagctgccccctgaacggccacctgcagcactgcctggagaccgtgagagaggagttcatcatcttcaacagagagaagctgagaagacagcagggccagggcagccagctgctggacaccgacagcagaggcggcggccaggcccagagcaagctgcaggacggctgcaacaacaacctgctgacccacacctgcaccagaggctgcagcagctag

SEQ ID NO: 198209 - DNA, 1245 bp, Artificial Sequence
  derived and/or modified sequence
atggggggtaaccatagtcataagccacctgtctttgatgagaacgaggaagtaaacttcgaccactttcaaatcttacgggctatcgggaaaggcagttttggcaaagtgtgcatagtacagaagcgggacacaaaaaaaatgtatgcaatgaaatacatgaataagcagaaatgtattgaaagggacgaagttaggaacgtttttagggaactgcagatcatgcagggcttggaacacccattcctggtaaacctctggtacagtttccaagacgaagaggacatgttcatggttgttgacctgttgctgggcggcgatctcaggtatcacctacaacagaacgtacatttcactgagggcactgttaaactttatatctgcgaactggccctggctctcgagtaccttcagaggtaccacattatacaccgggacatcaagccggacaatatcctgctcgacgaacacgggcacgtgcatatcactgactttaatatcgctaccgtagtgaagggtgccgaaagggcttccagtatggccgggactaagccatacatggccccggaagtgtttcaggtgtacatggaccggggaccggggtactcctacccggtggattggtggagcttggggataaccgcctatgagctgttgagggggtggagaccttatgagatccatagcgtaacacccatcgatgagatcctaaacatgtttaaggtcgagagggtgcattactccagtacctggtgcaaaggcatggtagctttgctcagaaagctgttgaccaaagaccccgaatctcgcgtctcttcacttcacgatatacagagcgtgccctacctcgcggatatgaattgggatgccgtgttcaaaaaggccctcatgcctgggttcgtgcctaataaaggtaggctcaactgcgatccaacgttcgaactggaggaaatgatcctagagagcaagccactgcacaaaaagaagaagcgcctggctaagaacaggtctagagatggaactaaggactcttgccccctgaatggccatcttcaacattgcctagagacagtacgagaggagttcattatattcaatcgcgagaagctgagaagacagcagggccagggcagtcagctcctggacactgatagcaggggaggtggccaggcccagtccaaactgcaggacggctgcaacaacaacttattgactcacacttgtaccagagggtgctcaagttag

SEQ ID NO: 198210 - DNA, 1245 bp, Artificial Sequence
  derived and/or modified sequence
atgggcggcaaccacagccacaagccccctgtgtttgatgaaaatgaggaggtgaactttgaccacttccagatcctgcgggccatcggcaagggcagctttgggaaggtgtgcatcgtgcagaagagggacaccaagaagatgtatgccatgaagtacatgaacaagcagaagtgcatcgagagagatgaggtgagaaatgtgttccgggagctgcagatcatgcagggcctggagcaccccttcctggtgaacctgtggtacagcttccaggatgaggaggacatgttcatggtggtggacctgctgctgggcggggacctgcgctaccacctgcagcagaatgtgcacttcacagagggcaccgtgaagctgtacatctgtgagctggccctggccctggagtacctgcagcgctaccacatcatccaccgggacatcaagccagacaacatcctgctggatgaacatggccacgtgcacatcacagacttcaacatcgccaccgtggtgaagggagctgagcgggccagctccatggccggcaccaagccctacatggcccctgaggtgttccaggtgtacatggaccggggccctggctacagctaccctgtggactggtggagcctgggcatcacagcctatgagctgctgcggggctggaggccctatgagatccacagcgtgacccccattgatgagatcctgaacatgttcaaggtggagcgggtgcactacagcagcacctggtgcaagggcatggtggccctgctgaggaagctgctgaccaaggaccctgagagccgggtgagcagcctgcatgacatccagagcgtgccctacctggccgacatgaactgggatgctgtgttcaagaaggccctgatgcctggctttgtgcccaacaagggccgcctgaactgtgaccccacctttgagctggaggagatgatcctggagagcaagcccctgcacaagaagaagaagaggctggccaagaacagaagcagagatggcaccaaggacagctgccccctgaatggccacctgcagcactgcctggagaccgtgcgggaggagttcatcatcttcaaccgggagaagctgcggcggcagcagggccagggcagccagctgctggacacagacagcagaggaggcggccaggcccagagcaagctgcaggacggctgcaacaacaacctgctgacccacacctgcacccggggctgcagcagctag

SEQ ID NO: 198211 - DNA, 1245 bp, Artificial Sequence
  derived and/or modified sequence
atgggcggcaaccacagccacaagccccccgtgttcgacgagaacgaggaagtcaattttgaccactttcaaattcttcgagccatcggcaaaggcagtttcgggaaggtgtgtatcgttcagaagcgggataccaaaaaaatgtacgctatgaaatacatgaataagcagaagtgtattgaaagggacgaggttaggaatgtattcagggagctgcaaattatgcagggactcgaacacccattccttgtcaacctatggtactcattccaagacgaggaagatatgttcatggtggtcgatcttctgttagggggcgatttgcggtatcatttacagcaaaacgtgcactttaccgaagggacggtaaagctctacatttgcgagctggctcttgctctcgagtacctgcagcggtatcacattatccaccgggacattaagcccgacaacatcctcttggacgaacacgggcacgtccacatcactgattttaacattgccactgtagtcaagggcgccgagcgagcctccagcatggctggaacaaaaccttatatggctcccgaagtattccaagtgtatatggatcgtggcccaggctactcctatcctgtggactggtggagcctggggattactgcgtatgaactgttacgcggctggcggccttatgaaattcacagcgtcactcctatcgacgagatcctcaatatgttcaaagtcgaaagggtgcactattcgtccacatggtgcaagggcatggtggccctgctaaggaaattattgacaaaggaccccgagtctcgcgtaagctctttacacgatatccaaagtgtaccctacctggccgacatgaactgggatgcggtgttcaagaaagcactgatgccaggttttgtccccaataagggcagactcaactgtgacccgactttcgagctcgaagagatgatcttggaatccaaacctttgcacaaaaagaaaaagagacttgccaagaatcgtagtcgtgacggtaccaaggactcttgcccactcaatgggcacttgcaacattgtcttgagacggtacgagaagaattcatcatcttcaacagagaaaagctacgtagacaacaggggcaggggtctcaactgctggataccgattctcgggggggtggccaagcccagtctaaattacaggacggctgcaataataacttactgactcatacctgcactaggggatgctcatcctag

SEQ ID NO: 198212 - DNA, 1245 bp, Artificial Sequence
  derived and/or modified sequence
atgggcggaaatcactctcacaaaccacccgtgtttgatgagaacgaagaagtcaattttgatcactttcaaatcttacgcgcaatcggcaaaggcagctttggtaaggtatgcattgtgcaaaagagggataccaaaaagatgtacgctatgaaatatatgaacaaacagaagtgtatcgaacgcgacgaagtgcggaacgtgttccgtgagctccaaattatgcagggactcgagcacccttttcttgtaaatctctggtactcctttcaagatgaggaggatatgttcatggtcgtggatcttctgctgggcggtgatttgcgctaccacctgcagcagaatgtacacttcactgagggtactgtcaaactttacatctgtgaacttgcccttgctctggagtacctgcagcgttatcatatcatccatcgggacattaagcctgacaacatcttattagacgagcacggtcacgttcacatcactgatttcaacattgccactgtggtgaagggggctgaaagagcctcctcaatggccggaacaaagccctatatggctccagaggtgtttcaggtatacatggacaggggtccgggatatagctatccggtggattggtggagccttggtatcactgcctatgagctcctgcggggatggcggccttacgagatccactcagtgacccccatagacgagattctcaacatgttcaaagtggaacgggtccattacagctcaacctggtgcaagggcatggtcgcacttctgcggaagctcctgaccaaggacccggaaagccgcgttagtagcttgcatgacattcagagtgtgccgtacctcgctgacatgaattgggacgcggtgtttaagaaggcactcatgcccggatttgtccctaacaaagggcgtctgaactgcgaccccactttcgaattagaagaaatgattttggaatcaaagccgctgcacaaaaagaagaagcggctcgctaagaaccgttccagggacggaaccaaggactcctgccctcttaatggccatctgcaacactgtttagaaaccgtgcgcgaggagtttatcatttttaatagagaaaaacttaggaggcagcagggtcaaggcagtcagctcctcgataccgattcaagaggaggaggccaggcccagtctaaactgcaggatgggtgtaataataatctccttacccacacatgtaccagaggctgtagctcatag

SEQ ID NO: 198213 - DNA, 3582 bp, Artificial Sequence
  derived and/or modified sequence
ctgcgtgctgccttcgtccgtcccctcctcccccgctccttcccctccttcccctgctcccgcgccgcctcgcgtctcccgcccgctgtagccggcgaggagcgccgcacgttggccccggcgcgaggagctcccgggttcccgggcgggcactggagtaaggagctgcgagcgcagcccgaggcggggcacggcggaaggcgcggcgagagcggggtccctgcgagcgcagtcggaagggcgtccaggagaagggggacgccgtccccgcccctgcacggtgctcggccccctcgggctccgcgcgcggctacaacccggactgggcgcgcccccggcatcccgcatctctgcgcgcgtcccacatcccgcatccggcatcccagcggccgggcatgtagcagcggcagcaacggcggaatatgggcgggaaccactcccacaagccccccgtgtttgacgagaatgaggaagtcaactttgaccattttcagattctgcgggccattggtaaagggagttttggaaaggtatgcatcgtgcagaagcgagacactaagaaaatgtatgcaatgaagtacatgaacaagcagaagtgcatcgagagggatgaggttcggaatgttttccgggagctgcagatcatgcaagggctggagcaccccttcctggtcaatctgtggtactccttccaggatgaggaggacatgttcatggtggtggacctgctcctgggaggcgacctgcgctaccatctgcagcagaatgtgcatttcacagaggggactgtgaaactctacatctgtgagctggcactggccctggagtatcttcagaggtaccacatcatccacagagacatcaagccagacaatatcctgctggatgaacacggacatgttcacattacagacttcaacatagcgacggtagtgaaaggagcagaaagggcttcctccatggctggcaccaagccctacatggctccagaagtattccaggtgtacatggacagaggccccggatactcgtaccctgtcgactggtggtccctgggcatcacagcctatgagctgctgcggggctggaggccgtacgaaatccactcggtcacgcccatcgatgaaatcctcaacatgttcaaggtggagcgtgtccactactcctccacgtggtgcaaggggatggtggccctgctgaggaagctcctgaccaaggatcctgagagccgcgtgtccagccttcatgacatacagagcgtgccctacttggccgacatgaactgggacgcggtgttcaagaaggcactgatgcccggctttgtgcccaataaagggaggttgaactgcgatcccacatttgagcttgaagagatgattctagaatccaagccacttcacaaaaagaagaagcgattggcaaagaacagatccagggatggcacaaaggacagctgcccgctgaatggacacctgcagcactgtttggagactgtccgggaggaattcatcatattcaacagagagaagctcaggaggcagcagggacagggcagccagctcttggacaccgacagccgagggggaggccaggcccaaagcaagctccaggacgggtgcaacaacaacctcctcacccacacctgcacccgtggctgcagcagctgagcccacacttgttgctgctcaacaggactgcactcgtctctgccctgcccacccagagcccctctttgtgccctgatggtccctgtctcacccctgaaaacatcagatgcagaaaaagccctggacttggagctgggaagcctgggttctggtcccatctccatgactgattcacgtgtgacctcagacaagtcacgccctctctgtgcctccgttttctgcatctgccaaaggggttaaacacttctgccccacttcaaattacaagattatggggagaacccaattaggtaggaaacatgaaaaacctttgatatttataaaatcatttttacgtgcaaaatataaccttaatatttgaagtgacccccattccccaaagcaatcaaaccgtcatgactttgcaatttggcacatcctagcttgttagagggcacttccgaaaaacacagccctgacagcaaaataaaggtctgatatgttggccccttctatggaaacaacgctgccaaatcctggagcaaaacctgaagtgtcttcatgtgcattctctggcaggccacagtcctgagcttgtaagatggtgcagcatgcagaccagacttgtccccaaggtctcagcgctgcggtctcactcctcccctcatttaagaagactatccttaccttttagtttcagcagtcctcaccaccaccatatccccagtgctgggatggcacacaggtgtccattcagatgagagttgggtcgctgagcattggttactcctgcagagtgtaatcagcaccccatccaactggcccgaaagcccagacctgcagcagaactctccaactctctatcagctttcagggttttctctcctgggaagggtgtaaaatcagcttgtcagattcttcttacagagagtatccaatcggtattggtggagcggctccctatttatacaataggaagcatgggtgcttagaaagtttatttcaggaggaaaatgggttcacacaaaaagcaaactacattctggtctgctcagggagaagcttgcctttgaactggaagatgttgggatgagcagggaaagcttagactttggagtcaggtttgtgttcagaatccagccctgctggctactaactaactgggagaccttaggcaaagcatgcaatcgctctgaatggcagtttcctcatttttaaacagggataataaaactaatattgcaggggagttacagggttaaataagatcctgtgtgtaaccccaagcattggatgactcatagaatggccttttttgtcagcataatcgtcatcattatttagatactttcttccttcactcacccagcaggtcagttttctgtgcaaacaaacctgtttaggattcttccaaatgttcttcctggggtctttgatatttgtttgttacatcctgctgaagttcgactgtgtttttattttttcatccaacttccatttttcactttttacatgattactcaatccttggggctgtccatgtcatctcttagatttcttaaaagacattttaatgtatggttaggttttatatttttattttttaaaaaagaaatagtcagtgttttcctcctttcaaccgagactatttctggattgtgtgctcctcgtcagttgacttgttttgcacacttttctttacttcatgtccccatcaacaaccgtcctgctccccacctcccccaggaaataaggggcctgctcctctccctactgtgaccctggaggctcttaagatgatgatggttttttttattgggctgagttcacgaattaggggcaggagctggaagtcgccctaggaacaccagatttcctggttctgttcaagttggcatttcttgtttggaataaactatttcttggacattccttc

SEQ ID NO: 198214 - DNA, 3241 bp, Artificial Sequence
  derived and/or modified sequence
gtagagagtgaagcagcaagactgcagagcctcatcaagaagtgtggagtgaagggaaggcttcagatggacaatttgtgtgctggggaaaaaatggaatgtgctgcaaattcccctgtggataagggtggacggctgctctgtcaactttgaccattttcagattctgcgggccattggtaaagggagttttggaaaggtatgcatcgtgcagaagcgagacactaagaaaatgtatgcaatgaagtacatgaacaagcagaagtgcatcgagagggatgaggttcggaatgttttccgggagctgcagatcatgcaagggctggagcaccccttcctggtcaatctgtggtactccttccaggatgaggaggacatgttcatggtggtggacctgctcctgggaggcgacctgcgctaccatctgcagcagaatgtgcatttcacagaggggactgtgaaactctacatctgtgagctggcactggccctggagtatcttcagaggtaccacatcatccacagagacatcaagccagacaatatcctgctggatgaacacggacatgttcacattacagacttcaacatagcgacggtagtgaaaggagcagaaagggcttcctccatggctggcaccaagccctacatggctccagaagtattccaggtgtacatggacagaggccccggatactcgtaccctgtcgactggtggtccctgggcatcacagcctatgagctgctgcggggctggaggccgtacgaaatccactcggtcacgcccatcgatgaaatcctcaacatgttcaaggtggagcgtgtccactactcctccacgtggtgcaaggggatggtggccctgctgaggaagctcctgaccaaggatcctgagagccgcgtgtccagccttcatgacatacagagcgtgccctacttggccgacatgaactgggacgcggtgttcaagaaggcactgatgcccggctttgtgcccaataaagggaggttgaactgcgatcccacatttgagcttgaagagatgattctagaatccaagccacttcacaaaaagaagaagcgattggcaaagaacagatccagggatggcacaaaggacagctgcccgctgaatggacacctgcagcactgtttggagactgtccgggaggaattcatcatattcaacagagagaagctcaggaggcagcagggacagggcagccagctcttggacaccgacagccgagggggaggccaggcccaaagcaagctccaggacgggtgcaacaacaacctcctcacccacacctgcacccgtggctgcagcagctgagcccacacttgttgctgctcaacaggactgcactcgtctctgccctgcccacccagagcccctctttgtgccctgatggtccctgtctcacccctgaaaacatcagatgcagaaaaagccctggacttggagctgggaagcctgggttctggtcccatctccatgactgattcacgtgtgacctcagacaagtcacgccctctctgtgcctccgttttctgcatctgccaaaggggttaaacacttctgccccacttcaaattacaagattatggggagaacccaattaggtaggaaacatgaaaaacctttgatatttataaaatcatttttacgtgcaaaatataaccttaatatttgaagtgacccccattccccaaagcaatcaaaccgtcatgactttgcaatttggcacatcctagcttgttagagggcacttccgaaaaacacagccctgacagcaaaataaaggtctgatatgttggccccttctatggaaacaacgctgccaaatcctggagcaaaacctgaagtgtcttcatgtgcattctctggcaggccacagtcctgagcttgtaagatggtgcagcatgcagaccagacttgtccccaaggtctcagcgctgcggtctcactcctcccctcatttaagaagactatccttaccttttagtttcagcagtcctcaccaccaccatatccccagtgctgggatggcacacaggtgtccattcagatgagagttgggtcgctgagcattggttactcctgcagagtgtaatcagcaccccatccaactggcccgaaagcccagacctgcagcagaactctccaactctctatcagctttcagggttttctctcctgggaagggtgtaaaatcagcttgtcagattcttcttacagagagtatccaatcggtattggtggagcggctccctatttatacaataggaagcatgggtgcttagaaagtttatttcaggaggaaaatgggttcacacaaaaagcaaactacattctggtctgctcagggagaagcttgcctttgaactggaagatgttgggatgagcagggaaagcttagactttggagtcaggtttgtgttcagaatccagccctgctggctactaactaactgggagaccttaggcaaagcatgcaatcgctctgaatggcagtttcctcatttttaaacagggataataaaactaatattgcaggggagttacagggttaaataagatcctgtgtgtaaccccaagcattggatgactcatagaatggccttttttgtcagcataatcgtcatcattatttagatactttcttccttcactcacccagcaggtcagttttctgtgcaaacaaacctgtttaggattcttccaaatgttcttcctggggtctttgatatttgtttgttacatcctgctgaagttcgactgtgtttttattttttcatccaacttccatttttcactttttacatgattactcaatccttggggctgtccatgtcatctcttagatttcttaaaagacattttaatgtatggttaggttttatatttttattttttaaaaaagaaatagtcagtgttttcctcctttcaaccgagactatttctggattgtgtgctcctcgtcagttgacttgttttgcacacttttctttacttcatgtccccatcaacaaccgtcctgctccccacctcccccaggaaataaggggcctgctcctctccctactgtgaccctggaggctcttaagatgatgatggttttttttattgggctgagttcacgaattaggggcaggagctggaagtcgccctaggaacaccagatttcctggttctgttcaagttggcatttcttgtttggaataaactatttcttgg

SEQ ID NO: 198215 - protein, 582 aa, Artificial Sequence
  derived and/or modified sequence
MEALSRAGQEMSLAALKQHDPYITSIADLTGQVALYTFCPKANQWEKTDIEGTLFVYRRSASPYHGFTIVNRLNMHNLVEPVNKDLEFQLHEPFLLYRNASLSIYSIWFYDKNDCHRIAKLMADVVEEETRRSQQAARDKQSPSQANGCSDHRPIDILEMLSRAKDEYERNQMGDSNISSPGLQPSTQLSNLGSTETLEEMPSGSQDKSAPSGHKHLTVEELFGTSLPKEQPAVVGLDSEEMERLPGDASQKEPNSFLPFPFEQLGGAPQSETLGVPSAAHHSVQPEITTPVLITPASITQSNEKHAPTYTIPLSPVLSPTLPAEAPTAQVPPSLPRNSTMMQAVKTTPRQRSPLLNQPVPELSHASLIANQSPFRAPLNVTNTAGTSLPSVDLLQKLRLTPQHDQIQTQPLGKGAMVASFSPAAGQLATPESFIEPPSKTAAARVAASASLSNMVLAPLQSMQQNQDPEVFVQPKVLSSAKRVAGAPLVTATTTAVSSVLLAPSVFQQTVTRSSDLERKASSPSPLTIGTPESQRKPSIILSKSQLQDTLIHLIKNDSSFLSTLHEVYLQVLTKNKDNHNL

SEQ ID NO: 198216 - DNA, 6025 bp, Artificial Sequence
  derived and/or modified sequence
gtagaggcggaagttgaggggactgacgcagatgggggaattttgcctcgatggcactttcctgtccgcgactccgcccccaccagaggggctaggctctgggattcaagatggaggcgctgagtcgagctgggcaggagatgagcctagcggccctgaagcaacacgacccctatatcaccagcatcgcagacctcacgggccaggtcgctctgtacaccttctgccccaaggccaaccagtgggagaagactgatatagaagggaccttattcgtatatcgaaggtcagcttccccttaccatggttttaccattgtgaatcgactaaatatgcacaatctagttgaaccagtgaataaagatttggaatttcagctccatgaaccatttcttctgtatagaaatgcaagcttgtcgatatatagtatctggttttatgacaagaatgactgtcaccgcatagcaaaactcatggctgatgtggtagaagaggagacacggcgatcccagcaagctgctcgggacaaacagagtcccagccaggccaatggctgcagcgaccacaggcccatcgacatcctggagatgctgagcagagccaaggatgagtatgagaggaatcagatgggtgactcaaatatctccagccctgggttacagccaagcactcagctctccaatctgggaagcaccgagactctagaagaaatgccctccgggtcacaggataagtctgctccatctggacacaagcatctgacggtagaagagttatttggaacctctttgccaaaggaacaaccagcagttgtgggtctggattcagaagaaatggagaggttgccaggagatgcctcccagaaagagcccaattcattcctaccatttccctttgagcagttaggaggagcccctcaatcagaaaccctgggtgtcccttctgctgcccaccattcagtccagcctgaaatcaccaccccggtgctaatcactccagcctccatcacacagtccaatgaaaagcatgctccaacctacacaatcccgttgagccctgttctcagtcccactctgccagctgaagctcctactgcacaggttccccccagcttacctcgaaacagcaccatgatgcaggcagtgaagaccacgcctagacagaggtctccactcctgaaccagccagtccctgagctaagccatgccagtctgattgccaaccagagccccttcagggccccattgaacgtgacgaacacagctggcacatccctcccaagcgttgatcttctccagaaactcaggttgaccccacagcatgaccaaatacagacacaaccacttgggaaaggtgcaatggtagccagcttttctccggcagctggtcagctagccacacctgagagcttcatagagcctccctctaagacagcagcagcaagagtggcggcctcagcctccctgagcaacatggtgcttgctccccttcagtctatgcagcagaaccaggatcctgaagtatttgtgcagcctaaggtgttatccagtgccatcccggttgcaggcgccccactggttactgcaacgaccactgcagtgtcttcagtcctgctggccccaagtgttttccagcagacagttacaagatcttcggaccttgagaggaaagccagctccccttctcctctaactattggaacgccagaaagtcagagaaagccttccattattctcagcaagtctcagctccaggatacattaatacatctaataaagaatgattccagcttcctcagtacacttcatgaagtctacttgcaggttctgaccaagaacaaagacaaccacaacctatgactggagcagaataagtctaaaggcagagccccagcctcagagacaaataggcttcatcatggaaacttctgagcagaacattgagtttgagaatcctgaaattgagcctatgagaaagagactcatttcttaagaatgttttccaagtgacattctcagtgataatggaggtttcactgtgaagcatcaccagcagatccttgttttgacaaaaaaaaaaaaaaaaaaaaaaaaaaagagagcgatcattgtgttaagttatgtgggtgttttcatcagctaggagcaaggctgtggaataaggagtcagattctcagcttgctttcactttcaaggacttacagaggagtagtcaccagcctcacagcagaagttcagcccggcccccaccgcttcccccagcctaccccatagaaacgggctttgggctgacaagtcaagttttgaacagagtagaaggcagctctgcaaagtagcttctagtttttaggaccagaatttaagccggcaaattaggaattatttcctcaagtgaagtatattttatatgaatgccccatttgggccttaaaagttgtgaaatttcttaatagcattttgtttttaagtgccccagtcctgccctgcagcaggcccccagtgcagcattaccatttgaatagggcactgtcaggctctggtggtgtggacacaggcatgtcatacctttgaaggaaaggctggggctgggaatgcccacatcctatcaaatcttcattttaggttaaactctccattggttctgaaaatgctaagtttgtgtgtgaagcacagccttattttccttttctgtcattgttgattgttttccttaacactttgacaaaaggaccagtggaccaatctgacaaagccattctggttcctttccttgagtgtactgagaatagttttaaagctatgcagaaaagggagctgttattcacactgcccttattttgttgtagaattatggagttaaaagaaaatgtgattccgaactctaccaatgtattcctaggctgtgagtactttcccggcccaaagtgtgaaaatatgtaaagaagctttgttatgctgctattgatctgccatgatttctatttattcttttatggcatgtaatggtgtttagtaatattttaatgtagattttgatttatttcagcaatagtaattttaagatattctttgaatgaaagtgtcttcgtttctatgatacaggtcattttgtagtatttaaccaattaagatgcactgcttacttttctgagcactatttaatgatggggtaaaaacccaattggctcaaccagctagcataaggattagctgtgaataatgctgacagatatgatggttccttaggaacaatcatttaagctttaatggtaactcaatcataagtccatagattatttttttctagctaaaattttagaaaattacttgtgaattacatacttgttttagtttggtcttagtttttagcataaagaatgattggcttttgttgatctaaacatgcttcctggacagggtttctgcttctcattttagtgtcttctattgctgtctacctaattatgtgtgaattgtgcagaattcagggaagcttataagttttcatgctcaattgtgaatagtttgttttcacagatagtatgtaaattaagcaaccaaaaatgaattccttatgcatcatctgggaacgagaaagctatagtgggatacagagtgttgctgacaccgggagatggtgtccagggagccacgtgacttccataaagtggacgcaccagtaggtgtgattgcacctcaagtgtagtctcagtgggcttcggtgaacagacgaatcaagggattcttgaatcgaaattatgcttttgagtatgtaatattatgagagagttaagagagaatatcctaaagagagtctgtgatcatactaattttcacctttaatgctaggaatggatatgatagacagtaaagagcatctatgataaggcttccttagtgtgaaagtaaacttaagtgcccaagtcatggagacttgaaaagggtaaacctgtttcacctcccaaatttatatattcaaagtatttacttaaaattcagaagccagaagttcatgtcatgattaccaggaagttcaggccagaatgaatccctagagaagccaggccaagcctggataattgcagctggatgaccctggcccgaaagtcacagttcagttgccttattcctagttcaggcttactatctagaacctcatgctagcttaggttgcatgtttacattgctgcagtgtctttactggaagcttagttggatcgaaatggacaccgagatggagatgcttctggctagatttcgcagaaccccaggagacctgcatttagaccactctgtccatttgtgtgcccacccccacccccagggtctaagtgtagactccaagaggagcagcccagagcttggaggagaggtgtgtctggggcaccactggtgggtggtgctgctcttctttttgttgtagttaatgcggtgtcttttaatggactctcaggcctcccagacagccttgttcctttaaggcagaagctcttcttcattgtgtacctcctgggattcatgaggtgtgagatttggcctgcttgactttgaattcaagtttttcaagtgactctcagtgtcagaagaagcatttcatgctgtccacatgtggtatgtccacagctcaccttcaaaggcttagatgtagccatcacagagagtggtattttattaagaacccaagtcccagcctgaccaacatggtgaaaccccatctctactaaaaatacaaaaattagccgggcgtggtggcacgcgcctatactcccagctacttaggaggctgaggcaggagaatcacttgaacccgggaggcagaggttgcagtgagccaagatcacaccactgcactctagcctgggcgacagtgagactccacctcaaaaaaaaaaaaaaaaaaaaaaaaaaaagtcacgctgggcccctctctacagggggacacacaggcttagtttagtatatgtctaaccagattttgcatgtcaagcatttgtccttttcctggcttatgttttcttgtagaaattatataaaccctatcaaatccactactaggtaaatttttaaaccatgcagctttattactctcctcccccaaagaatgtagtttgaaattttctcatttccatagtagaggccctaactgccattgtattactaataatgcaacatgaaattgaaggtgcctaactgctcaaaaaacaaaatcagccatcatactgtaactctgagaggaatgagaggtggcacaggcacgagtgggctcagcccgtgtgagtgaggagaactgaggaatcctagggtgcgcatcctgcatcctggctgcacgtttgctgcagagtatgtttttctttcttgcctcccttcagttttcttcagttgcgttcagtgtatcttctggaaccaatagtgccctgtgttctcaagtctctaaaatgctaagatctgagcaaagtcaagcagcttacactaggcttttttacagctgtgcttgagaacatttccgagtggaccagggccttgaggagcctgtttttcagcaaattcaacagatgtgtgcagtgattccctccgttttgtatttgacaccttcatttaaaatgctaagatgcaatatcattcacttcaaagtggggaaaatgcagaattgtgtttcctttttatctgtgtgattccttaagaaacatgtttttaaaatatgtgttctaaatggttttttattctgtattactgctttggccatgtggctctcatgactttcattgtaccagattctcagctccctgaaacatggggacgagaagctctggaattacagcaagatttttgttccatgagcgcaatactgtatcattaacatttttaatggtatggattttatagcatctgtgtatgtttgcaaatattaagttattacatgttttaaaatgagcgtttttcatcttaaattttatatgtttgcaaatatatttttttaataaaatttcaaaaccaagttttagcacctactaaaaaaaaaaaaaaa

SEQ ID NO: 198217 - DNA, 1749 bp, Artificial Sequence
  derived and/or modified sequence
atggaggccctgagcagagccggccaggagatgagcctggccgccctgaagcagcacgacccctacatcaccagcatcgccgacctgaccggccaggtggccctgtacaccttctgccccaaggccaaccagtgggagaagaccgacatcgagggcaccctgttcgtgtacagaagaagcgccagcccctaccacggcttcaccatcgtgaacagactgaacatgcacaacctggtggagcccgtgaacaaggacctggagttccagctgcacgagcccttcctgctgtacagaaacgccagcctgagcatctacagcatctggttctacgacaagaacgactgccacagaatcgccaagctgatggccgacgtggtggaggaggagaccagaagaagccagcaggccgccagagacaagcagagccccagccaggccaacggctgcagcgaccacagacccatcgacatcctggagatgctgagcagagccaaggacgagtacgagagaaaccagatgggcgacagcaacatcagcagccccggcctgcagcccagcacccagctgagcaacctgggcagcaccgagaccctggaggagatgcccagcggcagccaggacaagagcgcccccagcggccacaagcacctgaccgtggaggagctgttcggcaccagcctgcccaaggagcagcccgccgtggtgggcctggacagcgaggagatggagagactgcccggcgacgccagccagaaggagcccaacagcttcctgcccttccccttcgagcagctgggcggcgccccccagagcgagaccctgggcgtgcccagcgccgcccaccacagcgtgcagcccgagatcaccacccccgtgctgatcacccccgccagcatcacccagagcaacgagaagcacgcccccacctacaccatccccctgagccccgtgctgagccccaccctgcccgccgaggcccccaccgcccaggtgccccccagcctgcccagaaacagcaccatgatgcaggccgtgaagaccacccccagacagagaagccccctgctgaaccagcccgtgcccgagctgagccacgccagcctgatcgccaaccagagccccttcagagcccccctgaacgtgaccaacaccgccggcaccagcctgcccagcgtggacctgctgcagaagctgagactgaccccccagcacgaccagatccagacccagcccctgggcaagggcgccatggtggccagcttcagccccgccgccggccagctggccacccccgagagcttcatcgagccccccagcaagaccgccgccgccagagtggccgccagcgccagcctgagcaacatggtgctggcccccctgcagagcatgcagcagaaccaggaccccgaggtgttcgtgcagcccaaggtgctgagcagcgccaagagagtggccggcgcccccctggtgaccgccaccaccaccgccgtgagcagcgtgctgctggcccccagcgtgttccagcagaccgtgaccagaagcagcgacctggagagaaaggccagcagccccagccccctgaccatcggcacccccgagagccagagaaagcccagcatcatcctgagcaagagccagctgcaggacaccctgatccacctgatcaagaacgacagcagcttcctgagcaccctgcacgaggtgtacctgcaggtgctgaccaagaacaaggacaaccacaacctgtag

SEQ ID NO: 198218 - DNA, 1985 bp, Artificial Sequence
  derived and/or modified sequence
agaggggctaggctctgggattcaagatggaggcgctgagtcgagctgggcaggagatgagcctagcggccctgaagcaacacgacccctatatcaccagcatcgcagacctcacgggccaggtcgctctgtacaccttctgccccaaggccaaccagtgggagaagactgatatagaagggaccttattcgtatatcgaaggtcagcttccccttaccatggttttaccattgtgaatcgactaaatatgcacaatctagttgaaccagtgaataaagatttggaatttcagctccatgaaccatttcttctgtatagaaatgcaagcttgtcgatatatagtatctggttttatgacaagaatgactgtcaccgcatagcaaaactcatggctgatgtggtagaagaggagacacggcgatcccagcaagctgctcgggacaaacagagtcccagccaggccaatggctgcagcgaccacaggcccatcgacatcctggagatgctgagcagagccaaggatgagtatgagaggaatcagatgggtgactcaaatatctccagccctgggttacagccaagcactcagctctccaatctgggaagcaccgagactctagaagaaatgccctccgggtcacaggataagtctgctccatctggacacaagcatctgacggtagaagagttatttggaacctctttgccaaaggaacaaccagcagttgtgggtctggattcagaagaaatggagaggttgccaggagatgcctcccagaaagagcccaattcattcctaccatttccctttgagcagttaggaggagcccctcaatcagaaaccctgggtgtcccttctgctgcccaccattcagtccagcctgaaatcaccaccccggtgctaatcactccagcctccatcacacagtccaatgaaaagcatgctccaacctacacaatcccgttgagccctgttctcagtcccactctgccagctgaagctcctactgcacaggttccccccagcttacctcgaaacagcaccatgatgcaggcagtgaagaccacgcctagacagaggtctccactcctgaaccagccagtccctgagctaagccatgccagtctgattgccaaccagagccccttcagggccccattgaacgtgacgaacacagctggcacatccctcccaagcgttgatcttctccagaaactcaggttgaccccacagcatgaccaaatacagacacaaccacttgggaaaggtgcaatggtagccagcttttctccggcagctggtcagctagccacacctgagagcttcatagagcctccctctaagacagcagcagcaagagtggcggcctcagcctccctgagcaacatggtgcttgctccccttcagtctatgcagcagaaccaggatcctgaagtatttgtgcagcctaaggtgttatccagtgccaaaagagttgcaggcgccccactggttactgcaacgaccactgcagtgtcttcagtcctgctggccccaagtgttttccagcagacagttacaagatcttcggaccttgagaggaaagccagctccccttctcctctaactattggaacgccagaaagtcagagaaagccttccattattctcagcaagtctcagctccaggatacattaatacatctaataaagaatgattccagcttcctcagtacacttcatgaagtctacttgcaggttctgaccaagaacaaagacaaccacaacctatgactggagcagaataagtctaaaggcagagccccagcctcagagacaaataggcttcatcatggaaacttctgagcagaacattgagtttgagaatcctgaaattgagcctatgagaaagagactcatttcttaagaatgttttccaagtgacattctcagtgataatggaggtttcactgtgaagcatcaccagcagatccttgttttgac

SEQ ID NO: 198219 - DNA, 1749 bp, Artificial Sequence
  derived and/or modified sequence
atggaggccttgtcccgggccgggcaagagatgagtctggcagcgctaaaacagcatgatccttacattacgagcatagccgacctgaccggccaggtggctctttatactttctgtcccaaggctaatcaatgggaaaagactgacatagagggcactctgttcgtgtaccggcggtccgcgtccccctaccatgggtttaccatcgtgaatagattgaacatgcacaacctggtggagcccgtgaacaaggacttggagttccaattacatgaacctttcctgctctacaggaacgccagtctttcaatctacagcatttggttttacgacaagaatgattgtcacaggatcgcaaaactcatggcagacgtcgtagaggaggagacacgccgttcccagcaggccgccagagacaaacagagcccatcccaagctaatggatgtagtgaccacaggcctatcgatatcctcgaaatgcttagcagagctaaagacgaatacgaacgcaatcagatgggtgactctaacattagcagtccgggcctgcaaccgtctacccaactgtctaacctcgggtccaccgaaacattggaggagatgccttcaggatctcaggacaaatcagcgccctctggccacaagcaccttacagtggaggaactgttcggaacgtctctgcccaaagagcagcctgcagtagtaggtctagactctgaggagatggagagactccctggcgatgccagtcagaaagagccaaactccttcttgccgttccccttcgagcaactgggcggtgcgccccagtctgagacactgggcgttcctagtgcagctcaccatagcgttcaaccagaaatcacgacgcccgttcttatcacccccgcctctattactcagtctaacgaaaagcacgctcctacatacacgatcccactcagtccggtactcagtccaaccctcccagcggaggcccctactgcccaggtgcctcccagcctccccaggaacagcactatgatgcaggctgttaagacaacccctcgtcagcgctccccgcttcttaaccagccagtgcccgaattaagccacgcctcccttatcgcaaatcagtctcccttccgcgcgccactgaacgtgactaacacagctggcactagtctgccttccgtagacttgcttcaaaaactccgcctgaccccacaacatgaccagattcagacgcagccgctgggaaagggagcgatggtggccagtttctctccggccgccggccagttggctacaccagaaagcttcatcgagcctccgtctaaaacagccgctgcacgcgtggctgcaagtgcctctctgagcaacatggtgttggctccgctacagtctatgcaacagaatcaggatcccgaggtgttcgttcagcccaaggtactgtcatccgccaagagggtggcaggggcacccctagtgaccgcaacaaccacggccgtgagcagcgtactgctcgccccctcagtgttccagcagactgttacacgatcttccgatctggaaaggaaagcctcatcgccctctccactaacaataggcacccctgaatctcagcggaagccttcaatcatcctgtccaagtctcagcttcaggataccctgatccacctgattaagaatgattcctcatttcttagtaccctgcatgaggtgtacctccaggtgctcacaaagaacaaggacaatcataatttgtag

SEQ ID NO: 198220 - DNA, 1749 bp, Artificial Sequence
  derived and/or modified sequence
atggaggccctgagcagagctggccaggagatgagcctggccgccctgaagcagcacgacccctacatcaccagcattgctgacctgaccggccaggtggccctgtacaccttctgccccaaggccaaccagtgggagaagacagacatcgagggcaccctgtttgtgtaccgccgcagcgccagcccctaccacggcttcaccatcgtgaaccggctgaacatgcacaacctggtggagcctgtgaacaaggacctggagttccagctgcacgagcccttcctgctgtacagaaatgccagcctgagcatctacagcatctggttctatgacaagaatgactgccaccgcatcgccaagctgatggctgatgtggtggaggaggagaccaggaggagccagcaggccgcccgggacaagcagagccccagccaggccaacggctgcagcgaccaccggcccatcgacatcctggagatgctgagccgggccaaggatgaatatgaaagaaaccagatgggagacagcaacatcagcagccctggcctgcagcccagcacccagctgagcaacctgggcagcacagagaccctggaggagatgcccagcggcagccaggacaagagcgcccccagcggccacaagcacctgactgtggaggagctgtttggcaccagcctgcccaaggagcagcctgctgtggtgggcctggacagcgaggagatggagcggctgcctggagatgccagccagaaggagcccaacagcttcctgcccttcccctttgagcagctgggcggggccccccagagcgagaccctgggcgtgcccagcgctgcccaccacagcgtgcagcctgagatcaccacccctgtgctgatcaccccagccagcatcacccagagcaatgagaagcacgcccccacctacaccatccccctgagccctgtgctgagccccaccctgcctgctgaggcccccacagcccaggtgccccccagcctgcccaggaacagcaccatgatgcaggccgtgaagaccaccccccggcagaggagccccctgctgaaccagcctgtgcctgagctgagccacgccagcctgattgccaaccagagccccttccgggcccccctgaatgtgaccaacacagctggcaccagcctgcccagcgtggacctgctgcagaagctgcggctgaccccccagcacgaccagatccagacccagcccctgggcaagggggccatggtggccagcttctccccagctgctggccagctggccaccccagagagcttcatcgagccccccagcaagacagctgctgcccgggtggccgccagcgccagcctgagcaacatggtgctggcccccctgcagagcatgcagcagaaccaggaccctgaggtgtttgtgcagcccaaggtgctgagcagcgccaagagggtggccggggcccccctggtgacagccaccaccacagctgtgtcctctgtgctgctggcccccagcgtcttccagcagacagtgaccaggagcagtgacctggagaggaaggccagcagccccagccccctgaccatcggcaccccagagagccagaggaagcccagcatcatcctgagcaagagccagctgcaggacaccctcatccacctgatcaagaatgacagcagcttcctgagcaccctgcacgaggtgtacctgcaggtgctgaccaagaacaaggacaaccacaacctgtag

SEQ ID NO: 198221 - DNA, 1749 bp, Artificial Sequence
  derived and/or modified sequence
atggaggccctgagccgggccggccaggagatgagcctggccgccctcaagcagcacgatccatacattacgagcatagccgacctcactggccaggtcgccctttatactttttgcccaaaggccaaccagtgggagaagactgatatcgaaggaacactgtttgtataccgcaggtccgctagcccataccacgggtttaccattgtgaatcgccttaacatgcataacctggtagaaccagtcaacaaagatctggagtttcagctgcacgagccctttctgctctaccgaaacgcctccttgtcaatttacagcatttggttctacgacaaaaatgattgccatagaatcgctaagctcatggccgacgtggtggaagaggaaaccagacgcagccagcaagcggccagggataagcagagcccttcccaggcgaatggctgtagcgaccacagacctatcgacatcctggagatgctaagtagagctaaggacgaatatgagaggaaccaaatgggagacagtaatatatcatcccccggactccaaccatcaacacaactttctaatctcggctcgactgagactctcgaggaaatgccatccgggagccaagacaaatctgcgccatcaggtcacaagcatctgaccgtggaagagctgttcggcacttccctgccgaaggaacagcctgccgtggtgggcctagacagtgaagagatggaaagactgcctggcgacgcctcccagaaggagcccaactcctttttaccctttccattcgagcagcttgggggcgctcctcagtctgaaactctgggggtcccaagcgccgcacaccacagcgtccagcccgagattaccacaccagtcttgatcacaccagcatccattactcagtccaatgaaaaacatgcccctacctataccattcctttgtcaccagttctgagcccaaccttgccggcggaggcgcccaccgcgcaggttccaccaagtcttcctcgcaacagtactatgatgcaagccgtcaagacaaccccccggcagagatcccccttacttaatcagccagttcccgaactgagtcacgctagcctgattgccaatcaaagccccttcagagccccgttgaacgtcacaaataccgccggaacctcactgcctagcgtggatcttctgcagaagctccggttgaccccccaacatgatcagatccagacacagccgctggggaagggtgccatggtggcgagcttcagccccgccgcgggccaactagccacaccagaatcttttatagaaccaccttctaaaaccgctgccgcacgcgtcgctgcttctgcctcactctctaacatggtacttgctccactacaatccatgcagcaaaaccaggacccagaggtctttgtgcaaccaaaggtgttatctagcgccaagcgggtggctggagcgccactggtgacagctaccaccactgccgtcagctctgttctccttgcaccatccgtctttcaacaaaccgtcacgaggtctagtgacctggagaggaaggcaagctctcctagtcccctaacaattggtacgccggagtcccaacgaaaaccctcgataatcttatccaagagccagctgcaggatacgctgatccaccttattaaaaacgactccagcttcctcagtacattacatgaggtgtacctacaggtgctgaccaagaataaggacaaccataacctgtag

SEQ ID NO: 198222 - DNA, 1749 bp, Artificial Sequence
  derived and/or modified sequence
atggaggctcttagcagagcaggtcaggagatgagcctggccgcattgaagcagcacgatccttacattaccagcattgctgatttgaccggacaggtggcactgtatacattttgccctaaggcgaatcaatgggagaagacagatatcgaaggcaccttgtttgtctacagaagaagtgcttcgccttaccacggattcacaatagtgaaccggttgaatatgcacaatctggtggagccagttaataaggacctcgagtttcagctacacgagcctttcctgctctaccgcaacgcttctctgtctatttactctatttggttttatgacaaaaacgattgtcaccgaatagcgaagctcatggcagatgtggtggaggaggagacaaggcggtcgcagcaggccgcacgagacaaacaaagtccaagccaggccaacggctgctcagaccacagacccatagacatcttggaaatgttgagcagggcaaaagacgagtatgagagaaaccagatgggtgatagcaacatttcatcccccggtctgcagccctcgacgcagctgtccaacctcggatcaactgaaactttggaagaaatgccgtctggctcgcaagataagtccgccccaagtggccacaagcatctgacagtcgaagagctgtttggaacatctctccctaaagagcagcccgcagtggtaggtcttgattctgaagagatggagaggctgcccggtgatgcatcgcagaaagagcctaatagtttcttaccgtttcctttcgaacagctcggcggagcgcctcagtctgagacccttggtgtgcccagtgctgcacatcatagcgttcaaccggaaattacaactccagtgctgattacacccgcttctatcacccaaagcaacgaaaagcacgctcccacatacacgattccactctcacccgtgttatcacctacgctaccagcggaagccccaacagcgcaggtgccacccagcttgcccaggaactcaacaatgatgcaggcagttaagaccactccccgacagaggagcccgctgctgaatcagccagtgccagaacttagccacgcatctctgattgctaatcagagcccttttcgcgcacctctcaatgtcaccaacaccgctggaacctcgttacccagcgtggacctgcttcagaaactgcgactgacacctcagcatgaccagattcagacccaacctttgggtaagggcgctatggtagctagtttctcaccagcggctggtcagctggcaaccccggagtctttcatcgagcccccttccaaaaccgctgccgcaagagtcgcagcctctgctagtcttagtaacatggtgctggccccactgcagtcaatgcaacaaaatcaggaccctgaggtgttcgttcaacccaaagttttgagctctgcaaaacgggtggcaggagccccattagtgactgctacaaccacagctgttagtagtgtgctcctcgccccatccgtgttccagcagaccgtgactcgtagctccgacctcgaacgaaaagcttcttccccttcccccctcacaatcggcacgcctgagtcacaacgaaaacctagcatcattctcagcaaaagccagctccaggatacactgatccaccttattaaaaacgacagctcttttctgtccactctgcacgaggtttatttgcaagtgttaacgaaaaacaaagataatcacaatttgtag

SEQ ID NO: 198223 - protein, 381 aa, Artificial Sequence
  derived and/or modified sequence
MGDRERNKKRLLELLRAPDTGNAHCADCGAADPDWASYKLGIFICLNCCGVHRNFPDISRVKSVRLDFWDDSIVEFMIHNGNLRVKAKFEARVPAFYYIPQANDCLVLKEQWIRAKYERREFMADGETISLPGNREGFLWKRGRDNSQFLRRKFVLLAREGLLKYFTKEQGKSPKAVISIKDLNATFQTEKIGHPHGLQITYRRDGHTRNLFVYHESGKEIVDWFNALRAARLQYLKMAFPELPESELVPFLTRNYLKQGFMEKTGPKQKEPFKKRWFALDCHERRLLYYKNPLDAFEQGQVFLGNKEQGYEAYEDLPKGIRGNRWKAGLTIVTPERRFVLTCPSEKEQQEWLESLRGVLSSPLTPLNRLTASTESGRSSR

SEQ ID NO: 198224 - DNA, 1146 bp, Artificial Sequence
  derived and/or modified sequence
atgggcgacagagagagaaacaagaagagactgctggagctgctgagagcccccgacaccggcaacgcccactgcgccgactgcggcgccgccgaccccgactgggccagctacaagctgggcatcttcatctgcctgaactgctgcggcgtgcacagaaacttccccgacatcagcagagtgaagagcgtgagactggacttctgggacgacagcatcgtggagttcatgatccacaacggcaacctgagagtgaaggccaagttcgaggccagagtgcccgccttctactacatcccccaggccaacgactgcctggtgctgaaggagcagtggatcagagccaagtacgagagaagagagttcatggccgacggcgagaccatcagcctgcccggcaacagagagggcttcctgtggaagagaggcagagacaacagccagttcctgagaagaaagttcgtgctgctggccagagagggcctgctgaagtacttcaccaaggagcagggcaagagccccaaggccgtgatcagcatcaaggacctgaacgccaccttccagaccgagaagatcggccacccccacggcctgcagatcacctacagaagagacggccacaccagaaacctgttcgtgtaccacgagagcggcaaggagatcgtggactggttcaacgccctgagagccgccagactgcagtacctgaagatggccttccccgagctgcccgagagcgagctggtgcccttcctgaccagaaactacctgaagcagggcttcatggagaagaccggccccaagcagaaggagcccttcaagaagagatggttcgccctggactgccacgagagaagactgctgtactacaagaaccccctggacgccttcgagcagggccaggtgttcctgggcaacaaggagcagggctacgaggcctacgaggacctgcccaagggcatcagaggcaacagatggaaggccggcctgaccatcgtgacccccgagagaagattcgtgctgacctgccccagcgagaaggagcagcaggagtggctggagagcctgagaggcgtgctgagcagccccctgacccccctgaacagactgaccgccagcaccgagagcggcagaagcagcagatag

SEQ ID NO: 198225 - DNA, 1146 bp, Artificial Sequence
  derived and/or modified sequence
atgggggatcgggaaagaaacaaaaagagactgctggagcttctgagagctcccgacactggcaatgcccactgtgcagattgcggcgccgctgacccagactgggcctcctataagcttggcatattcatctgtcttaactgttgcggagtgcatcgcaacttccctgacatcagcagagtgaaatctgtgaggctggatttctgggatgacagtattgtagaattcatgattcacaacggcaatcttcgggtgaaggcaaagttcgaagccagggttcccgccttctattatattccgcaggcaaacgattgtttagtgctgaaggagcagtggattagggcaaaatacgagaggagggagtttatggccgacggggagacaataagcctgcccggaaatagagagggcttcttgtggaagaggggcagggataattcacagttccttagaagaaagttcgttctgttagcacgggaggggctgctgaaatacttcacaaaagaacagggtaagtctcctaaagcagtgattagcatcaaggatttgaatgccacgtttcagactgaaaaaatcggtcaccctcacgggttacagataacgtatagacgtgacgggcacaccaggaacctttttgtttaccacgagtctggcaaggagatcgtggattggtttaacgcgctgagggccgcacggcttcagtaccttaaaatggcctttcctgaactgcccgaatctgagctagtcccctttctgacgcggaattacctaaaacagggcttcatggagaaaaccggcccaaaacagaaagagcccttcaagaagaggtggtttgctttagattgccacgagcgcagactactctactacaaaaaccctttggacgctttcgaacaaggtcaagtatttctgggcaataaagaacaggggtacgaggcttatgaggacctgcctaaaggcatcaggggcaaccgttggaaggcggggctcacgatcgtgaccccggagcgacgcttcgtgctgacctgtcccagtgaaaaagaacaacaggaatggcttgagtctttacgtggcgtcctcagctccccactgacgcctcttaatagactcactgcctcaactgagagtggaagatcttcacgctag

SEQ ID NO: 198226 - DNA, 1146 bp, Artificial Sequence
  derived and/or modified sequence
atgggagaccgggagaggaacaagaagaggctgctggagctgctgcgggccccagacacaggaaatgcccactgtgccgactgtggggctgctgaccctgactgggccagctacaagctgggcatcttcatctgcctgaactgctgcggcgtgcacaggaacttcccagacatcagccgggtgaagtctgtgcggctggacttctgggatgacagcatcgtggagttcatgatccacaacggcaacctgcgggtgaaggccaagtttgaggcccgggtgcctgccttctactacatcccccaggccaatgactgcctggtgctgaaggagcagtggatccgggccaagtatgaaagaagagagttcatggctgatggagagaccatcagcctgcccggcaaccgggagggcttcctgtggaagaggggccgggacaacagccagttcctgcggaggaagtttgtgctgctggcccgggagggcctgctgaagtacttcaccaaggagcagggcaagagccccaaggccgtcatcagcatcaaggacctgaatgccaccttccagacagagaagattggccacccccacggcctgcagatcacctacagaagagatggccacaccaggaacctgtttgtgtaccatgaaagtggcaaggagatcgtggactggttcaatgccctgcgggccgcccggctgcagtacctgaagatggccttccctgagctgcctgagagcgagctggtgcccttcctgaccaggaactacctgaagcagggcttcatggagaagacaggccccaagcagaaggagcccttcaagaagcgctggtttgccctggactgccatgaaagaaggctgctgtactacaagaaccccctggatgcctttgagcagggccaggtgttcctgggcaacaaggagcagggctatgaggcctatgaggacctgcccaagggcatccggggcaaccgctggaaggccggcctgaccatcgtgaccccagagaggagatttgtgctgacctgccccagcgagaaggagcagcaggagtggctggagagcctgcggggcgtgctgagcagccccctgacccccctgaaccggctgacagccagcacagagagcggccgcagcagcaggtag

SEQ ID NO: 198227 - DNA, 1146 bp, Artificial Sequence
  derived and/or modified sequence
atgggcgaccgggagcggaacaagaagcggctgctggagctgctgagggccccagataccgggaatgcccattgcgctgattgtggagcagcggaccctgattgggccagctacaagcttggaatattcatttgtctgaactgctgtggagtgcatcggaattttcccgacatcagcagagtaaaatctgttcgtctggacttctgggacgatagcattgtggagttcatgattcacaacggaaatcttcgcgtcaaagccaagttcgaggctcgtgtgcccgcgttttactacatcccccaggccaacgattgcctggtattgaaagagcagtggataagagctaagtacgaacgtcgagagttcatggccgacggggagactatctccctcccagggaatcgcgaagggtttctgtggaaacggggacgggacaacagtcaatttctcaggcgtaagttcgtgcttctggcacgcgagggtctgctcaagtacttcactaaagaacagggaaaaagtccaaaggccgtaatctctattaaagacctcaatgccacatttcaaaccgagaagatcgggcatcctcatggcttacagatcacatatcgacgcgatgggcacacaagaaatttgtttgtgtaccacgagagcgggaaagaaatcgtggattggttcaatgccttgcgagctgcgcgactgcaatacctgaaaatggcttttccagagctcccggagtccgaactggtcccatttctgacccggaactacctaaaacaaggattcatggagaagaccgggccgaagcaaaaagagcctttcaagaaaagatggttcgcgctcgattgccatgagcggcgcctgctctattacaaaaatccactggacgccttcgaacagggacaagtgttcctcgggaacaaggagcagggatatgaggcttacgaggatttgcctaagggtatccgaggcaaccggtggaaggccgggctgaccatcgtgacccctgagcggaggtttgtcttgacatgcccatctgaaaaggaacaacaggaatggttggagagtttaagaggtgtgttgtcttctcctctcacccccctaaacagactgactgctagcactgagtctggcaggagctcaagatag

SEQ ID NO: 198228 - DNA, 2934 bp, Artificial Sequence
  derived and/or modified sequence
tatgcccttgttcctctttcatagacgcggaaactgagacccacagaggttgaataggttgtccacagtctcgtagctaccaagtgacaggccacgatttgatctcaggccagtgtgttaaactccaatttgcgtgctcctgtccctccccgcgcgtcggcggagctcggggccggactggacctgccgagggaggggcggacagtcctgacggtgcggggcggggctggcggctgcccaggcctggctgaggcgccgcggccgggtccctctccacctgccgggcggagcgcacgggccatgggctgagccccgctgagcccgccgggccggccatgggcgatcgcgagcgcaacaagaagcggctgctggagctgctgcgggcgccggacacaggcaacgcgcactgcgccgactgcggggcggcagatcccgactgggcctcttacaagctggggatcttcatctgtctcaactgctgcggcgtccaccgtaacttccctgacatcagcagagttaaatctgtgcgacttgacttctgggacgacagtattgtggagtttatgatccacaatggaaacctccgtgtgaaggccaagttcgaagccagagtcccagctttctactacatcccccaggccaacgactgcctggtcttaaaggaacaatggattcgagctaagtatgagagacgggaatttatggctgatggggaaaccatctcgctcccaggtaaccgagaaggattcctgtggaagcgaggaagggacaactcacagtttctgagaaggaagtttgtacttctggcaagagaaggcctcctgaagtacttcacaaaggaacagggtaaaagccccaaagctgtcatcagcattaaggacttgaatgccaccttccagacagagaagatagggcacccccatgggctgcagatcacctacaggagagatggccacaccaggaacctgtttgtgtatcatgaaagtgggaaggagatagtggactggttcaatgccctccgtgcagcccgtctgcagtacctaaaaatggcctttcctgaactcccagagtctgagctcgtgccattcctcaccaggaactacctcaaacaaggcttcatggaaaagactgggccaaagcagaaagaacctttcaagaaaaggtggttcgccctggattgccatgagcggaggctgctctattacaagaacccactggatgccttcgagcagggccaggtttttcttgggaacaaggagcagggatatgaagcctacgaagacctgcccaagggcatccgaggaaatcgctggaaagccggactcaccattgtcaccccagagcggagatttgtcctcacttgccccagtgagaaggaacagcaggaatggctggaaagtttgcggggtgtcctgtccagccccttgacgcccctcaaccggcttactgcatcaacagagagtggccgcagcagcaggtgacccattaactgaggaactggctgccactgaacacctggaactccttgtgggaagaagtttgcacctcggccctggctgcccaccatcagtgccccgcagtcagcagccattcctggcagtgaactctgccaggactgaagctgtggctttatccatcagctccctgggccttccccgcaacccacctcggggatctgaggatctggtgcatagatgaacatctatcccctcctcccccatacacacctaggcttgaaatgccctacaggcccagaactttctcacatctgaaatggaggcattgcaatgaaaaggcacccacagcatcatgcaagtggcatcttgtaaaaaaaaaaaaaaagtttaatctgaatctaaccatgaggaaataatcagacaaatccacattaggggcattctgctaaacatctgacccagactcttcaaaaatgaagagtgaaagataaagtagtcaatggccgggcgcagtgagattgcgccattgcattccagcctgggtgacagagcgagactccgtatcagaaagaaaaagaggaactgaatgaaatctcagatggctgaaatgttagagaaacagagcaccaagtcccctgctctgtgactcgttgttcctttcctctgtcttcaagcaccacgcagaaatacactggatgttctctctttgcttcaatggagacccaaggagctgggaggtctcttaagagactctctgattctccgtggctgggtgtgatggctcatgcccataatcccagccctttgggaagctgaggcaggaggattgagaccaggagttcgagaagagcctgggcaacatagtgagaccccatctctacaaagaaaaaaaaattagctggacatggtaatgaatgcctgtagtcccagctactccggacactgatgtgagaggatcacttgagccagggaggtcatggctacagtgacccctcattgcaccactttacttagcctgggtgacagagtgagaccctatctcaaaaaaaaaaaaaatctatgcattgtatgggactttcctttggatcccccaatcaaaggataagcaatgcgtaagcctgtgtccttcctgaagcttctcgactgcccagatagggaggtgagtcctctctatctcctctggctctggaagcaccttgaaaatgtgcattttcaaggacacttgctgggttgtgcattaagggccagtttacttgtctgcctctttgaccacctgtgaactctgttgggtgtactctgctaagttctggggatgaggaaattaataaaggtacagtcttgccttcaaggaacttatggtctagaggagaagaacgagaagtatagataggcagtaacaaagctacttgaagaggccaactgggattctaagggtgggaaagaacagacacaagagataaagtcctaatgaaatgga

SEQ ID NO: 198229 - DNA, 1146 bp, Artificial Sequence
  derived and/or modified sequence
atgggcgatcgggagcggaacaaaaagcgcctgctggagctgctgcgagccccagacacgggcaacgcgcactgcgccgactgcggcgcagctgacccggactgggcctcgtataagctgggcatctttatatgcctgaattgctgcggggtgcaccgcaatttccccgatatcagcagagtgaagtccgttaggcttgacttctgggacgattctatcgtggaatttatgatccataacggcaatctgagagtaaaggccaagtttgaggctagagtgccagccttttattatatcccacaggccaatgattgcctggtgcttaaggaacaatggatcagagcaaagtacgagcggagggaatttatggcggatggagagacgattagcctgcccggaaatagggaagggttcctgtggaaaagaggcagggacaacagccagttcctgcgtagaaagttcgttcttctggcgagagaaggcctgctgaagtactttacaaaggagcagggcaaaagcccaaaggctgttattagcatcaaggacctcaacgccacatttcaaaccgagaagatcggccatccccacgggctccagatcacctaccggagggacggtcacacacggaacctgttcgtctatcatgagtctggcaaagagatagtagattggtttaatgcactgagagccgcacggctgcaatatcttaagatggctttccccgagctgccagagagcgagctggtgccgttccttacacgaaactatctcaaacaggggttcatggagaagaccggaccaaagcagaaagaaccattcaaaaagaggtggttcgctcttgattgtcacgaacgcagattgctctattataaaaatccattagacgcttttgagcaaggccaggtgtttctggggaacaaagaacagggatacgaagcttacgaggatcttcccaaaggcatccgcggtaatcgctggaaagctggcctcaccattgttacccctgagcgacgattcgtgttgacctgcccatcagaaaaggagcagcaggaatggcttgaaagccttcggggagtgctgtcatctccattaactcccctgaaccggctgacagcaagcacagaatcagggaggagttctaggtag

SEQ ID NO: 198230 - protein, 184 aa, Artificial Sequence
  derived and/or modified sequence
MDLQAAGAQAQGAAEPSRGPPLPSARGAPPSPEAGFATADHSSQERETEKAMDRLARGTQSIPNDSPARGEGTHSEEEGFAMDEEDSDGELNTWELSEGTNCPPKEQPGDLFNEDWDSELKADQGNPYDADDIQESISQELKPWVCCAPQGDMIYDPSWHHPPPLIPYYSKMVFETGQFDDAED

SEQ ID NO: 198231 - DNA, 555 bp, Artificial Sequence
  derived and/or modified sequence
atggatttgcaggctgcaggtgcacaggcgcagggggccgctgagccgagcagagggccacccttaccgtctgcccgcggtgcgccaccttcacctgaggcaggcttcgccactgccgatcactctagccaagaacgtgagaccgaaaaagccatggacagacttgcccgcggaacacagtctattcccaatgactctcccgccaggggtgagggcacccattcagaagaggaaggatttgccatggatgaggaggatagtgacggcgaactaaacacctgggagctgtcagaaggcacaaactgcccacctaaagaacaacctggtgacctttttaatgaagattgggactcagagttgaaagcagaccagggaaatccctatgatgctgatgatatccaggagtcaatttcacaggaattgaagccttgggtatgttgcgcacctcaaggcgatatgatctacgatccgagctggcaccacccacctcccctaataccctattacagtaagatggtatttgaaacagggcaattcgacgatgctgaagattag

SEQ ID NO: 198232 - DNA, 555 bp, Artificial Sequence
  derived and/or modified sequence
atggacctgcaggccgccggggcccaggcccagggcgctgctgagcccagccggggcccccccctgcccagcgcccggggggccccacccagccctgaggccggctttgccacagctgaccacagcagccaggagcgggagacagagaaggccatggaccggctggcccggggcacccagagcatccccaatgacagccctgcccggggggagggcacccacagcgaggaggagggctttgccatggatgaagaagattctgatggagagctgaacacctgggagctgtctgagggcaccaactgcccccccaaggagcagcccggggacctcttcaatgaagactgggacagcgagctgaaggctgaccagggcaacccctatgatgctgatgacatccaggagagcatcagccaggagctgaagccctgggtgtgctgtgccccccagggcgacatgatctatgaccccagctggcaccaccccccacccctcatcccctactacagcaagatggtgtttgagaccggccagtttgatgatgctgaagattag

SEQ ID NO: 198233 - DNA, 555 bp, Artificial Sequence
  derived and/or modified sequence
atggacctgcaggccgccggcgcccaggcccagggcgccgccgagccgagcagaggaccccccctgccctcagccagaggcgcccccccctctccagaagccgggtttgccaccgcggatcacagctcgcaggagcgcgagacagagaaagccatggaccgcctggctcggggtacacagtccatccccaacgattccccagccagaggcgagggaacccattccgaggaagaggggtttgctatggacgaggaggattcggatggggaactcaacacatgggaactttcagaggggactaattgcccccctaaggagcagcccggtgacctgttcaacgaggactgggacagtgagctgaaggccgaccaaggaaacccatacgatgcggatgatatccaggagagtatttcccaggagctgaagccttgggtctgctgtgccccacagggagatatgatctacgacccatcttggcaccacccccctccgcttattccgtactactccaaaatggtcttcgagacggggcaatttgatgatgcagaggattag

SEQ ID NO: 198234 - DNA, 555 bp, Artificial Sequence
  derived and/or modified sequence
atggacctgcaagcggcaggtgcccaggcacagggagccgctgagccatcccgaggcccacctctcccgtccgctagaggagcccctccttcccccgaggccggttttgccaccgccgaccatagctcacaggagcgggagaccgagaaagccatggaccggctcgcgaggggaacccagagtatccccaatgacagtccagccagaggagaaggaactcactctgaggaggagggcttcgcaatggacgaggaggattcggatggcgagcttaacacatgggaactaagcgagggaaccaactgcccccctaaagagcaaccaggggacctctttaacgaagactgggattctgagttaaaagcagaccaggggaacccctacgacgccgacgacatccaggagtccataagccaggagttaaagccttgggtgtgctgcgcgccacagggtgacatgatatatgatcccagctggcaccaccccccacccttgattccatattattcaaagatggtctttgagacaggacaattcgatgatgccgaagactag

SEQ ID NO: 198235 - DNA, 868 bp, Artificial Sequence
  derived and/or modified sequence
ccacggcgtccagggcgaccagccgcgggccgcagggcatggaccttcaggccgccggggcccaggcgcagggggccgcggagccgtctcggggcccgccgctgcctagcgcgcggggggcgccccccagcccggaggctggctttgctacagctgaccactccagtcaggagagagagactgagaaggctatggatcgactagcccgtggaacacagagcattcctaatgacagtcctgcccggggtgagggcacccattctgaagaggaaggctttgccatggatgaggaggactctgatggagaactgaatacctgggagctgtcagaagggacaaactgtccacccaaggaacagcctggcgatctttttaatgaggactgggactcggagttgaaagcagatcaagggaatccatatgatgctgacgacatccaggagagcatttctcaagagcttaaaccttgggtgtgctgtgccccacaaggagacatgatctatgaccccagctggcaccatccgcctccactgataccctattattccaagatggtctttgaaacaggacagtttgacgatgctgaagattgagtgtggagctttctgccttgtaggtgggcgggcctccacgtcaagatctcttttcctgtcttggaggtgaaaagtcatatctgagaaaatgtttgcagtgacccctagtctggggtacacagaccagtgttccttattgacagtgttcaataaggccccgtcattctcgccagtctgttgttgttcttaatgggctcctccttgaaatgtgtgtgtgtttgtgtcaagaggagttgtgttctttgtaaataaaggttaaaaagagaaaccagtat

SEQ ID NO: 198236 - DNA, 555 bp, Artificial Sequence
  derived and/or modified sequence
atggacctgcaggccgccggcgcccaggcccagggcgccgccgagcccagcagaggcccccccctgcccagcgccagaggcgccccccccagccccgaggccggcttcgccaccgccgaccacagcagccaggagagagagaccgagaaggccatggacagactggccagaggcacccagagcatccccaacgacagccccgccagaggcgagggcacccacagcgaggaggagggcttcgccatggacgaggaggacagcgacggcgagctgaacacctgggagctgagcgagggcaccaactgcccccccaaggagcagcccggcgacctgttcaacgaggactgggacagcgagctgaaggccgaccagggcaacccctacgacgccgacgacatccaggagagcatcagccaggagctgaagccctgggtgtgctgcgccccccagggcgacatgatctacgaccccagctggcaccaccccccccccctgatcccctactacagcaagatggtgttcgagaccggccagttcgacgacgccgaggactag

SEQ ID NO: 198237 - protein, 1176 aa, Artificial Sequence
  derived and/or modified sequence
MKGARWRRVPWVSLSCLCLCLLPHVVPGMTTPSLKTDGGRRTATSPPPTTSQTIISTIPSTAMHTRSTAAPIPILPERGVSLFPYGAGAGDLEFVRRTVDFTSPLFKPATGFPLGSSLRDSLYFTDNGQIIFPESDYQIFSYPNPLPTGFTGRDPVALVAPFWDDADFSTGRGTTFYQEYETFYGEHSLLVQQAESWIRKMTNNGGYKARWALKVTWVNAHAYPAQWTLGSNTYQAILSTDGSRSYALFLYQSGGMQWDVAQRSGNPVLMGFSSGDGYFENSPLMSQPVWERYRPDRFLNSNSGLQGLQFYRLHREERPNYRLECLQWLKSQPRWPSWGWNQVSCPCSWQQGRRDLRFQPVSIGRWGLGSRQLCSFTSWRGGVCCSYGPWGEFREGWHVQRPWQLAQELEPQSWCCRWNDKPYLCALYQQRRPHVGCATYRPPQPAWMFGDPHITTLDGVSYTFNGLGDFLLVGAQDGNSSFLLQGRTAQTGSAQATNFIAFAAQYRSSSLGPVTVQWLLEPHDAIRVLLDNQTVTFQPDHEDGGGQETFNATGVLLSRNGSEVSASFDGWATVSVIALSNILHASASLPPEYQNRTEGLLGVWNNNPEDDFRMPNGSTIPPGSPEEMLFHFGMTWQINGTGLLGKRNDQLPSNFTPVFYSQLQKNSSWAEHLISNCDGDSSCIYDTLALRNASIGLHTREVSKNYEQANATLNQYPPSINGGRVIEAYKGQTTLIQYTSNAEDANFTLRDSCTDLELFENGTLLWTPKSLEPFTLEILARSAKIGLASALQPRTVVCHCNAESQCLYNQTSRVGNSSLEVAGCKCDGGTFGRYCEGSEDACEEPCFPSVHCVPGKGCEACPPNLTGDGRHCAALGSSFLCQNQSCPVNYCYNQGHCYISQTLGCQPMCTCPPAFTDSRCFLAGNNFSPTVNLELPLRVIQLLLSEEENASMAEVNASVAYRLGTLDMRAFLRNSQVERIDSAAPASGSPIQHWMVISEFQYRPRGPVIDFLNNQLLAAVVEAFLYHVPRRSEEPRNDVVFQPISGEDVRDVTALNVSTLKAYFRCDGYKGYDLVYSPQSGFTCVSPCSRGYCDHGGQCQHLPSGPRCSCVSFSIYTAWGEHCEHLSMKLDAFFGIFFGALGGLLLLGVGTFVVLRFWGCSGARFSYFLNSAEALP

SEQ ID NO: 198238 - protein, 1125 aa, Artificial Sequence
  derived and/or modified sequence
MKGARWRRVPWVSLSCLCLCLLPHVVPGVSLFPYGAGAGDLEFVRRTVDFTSPLFKPATGFPLGSSLRDSLYFTDNGQIIFPESDYQIFSYPNPLPTGFTGRDPVALVAPFWDDADFSTGRGTTFYQEYETFYGEHSLLVQQAESWIRKMTNNGGYKARWALKVTWVNAHAYPAQWTLGSNTYQAILSTDGSRSYALFLYQSGGMQWDVAQRSGNPVLMGFSSGDGYFENSPLMSQPVWERYRPDRFLNSNSGLQGLQFYRLHREERPNYRLECLQWLKSQPRWPSWGWNQVSCPCSWQQGRRDLRFQPVSIGRWGLGSRQLCSFTSWRGGVCCSYGPWGEFREGWHVQRPWQLAQELEPQSWCCRWNDKPYLCALYQQRRPHVGCATYRPPQPAWMFGDPHITTLDGVSYTFNGLGDFLLVGAQDGNSSFLLQGRTAQTGSAQATNFIAFAAQYRSSSLGPVTVQWLLEPHDAIRVLLDNQTVTFQPDHEDGGGQETFNATGVLLSRNGSEVSASFDGWATVSVIALSNILHASASLPPEYQNRTEGLLGVWNNNPEDDFRMPNGSTIPPGSPEEMLFHFGMTWQINGTGLLGKRNDQLPSNFTPVFYSQLQKNSSWAEHLISNCDGDSSCIYDTLALRNASIGLHTREVSKNYEQANATLNQYPPSINGGRVIEAYKGQTTLIQYTSNAEDANFTLRDSCTDLELFENGTLLWTPKSLEPFTLEILARSAKIGLASALQPRTVVCHCNAESQCLYNQTSRVGNSSLEVAGCKCDGGTFGRYCEGSEDACEEPCFPSVHCVPGKGCEACPPNLTGDGRHCAALGSSFLCQNQSCPVNYCYNQGHCYISQTLGCQPMCTCPPAFTDSRCFLAGNNFSPTVNLELPLRVIQLLLSEEENASMAEVNASVAYRLGTLDMRAFLRNSQVERIDSAAPASGSPIQHWMVISEFQYRPRGPVIDFLNNQLLAAVVEAFLYHVPRRSEEPRNDVVFQPISGEDVRDVTALNVSTLKAYFRCDGYKGYDLVYSPQSGFTCVSPCSRGYCDHGGQCQHLPSGPRCSCVSFSIYTAWGEHCEHLSMKLDAFFGIFFGALGGLLLLGVGTFVVLRFWGCSGARFSYFLNSAEALP

SEQ ID NO: 198239 - protein, 1912 aa, Artificial Sequence
  derived and/or modified sequence
PGTTEDTLITGSKTAAPVTSTGSTTATLEGQSTAASSRTSNQDISASSQNHQTKSTETTSKAQTDTLTQMMTSTLFSSPSVHNVMETAPPDEMTTSFPSSVTNTLMMTSKTITMTTSTDSTLGNTEETSTAGTESSTPVTSAVSITAGQEGQSRTTSWRTSIQDTSASSQNHWTRSTQTTRESQTSTLTHRTTSTPSFSPSVHNVTGTVSQKTSPSGETATSSLCSVTNTSMMTSEKITVTTSTGSTLGNPGETSSVPVTGSLMPVTSAALVTFDPEGQSPATFSRTSTQDTTAFSKNHQTQSVETTRVSQINTLNTLTPVTTSTVLSSPSGFNPSGTVSQETFPSGETTTSSPSSVSNTFLVTSKVFRMPTSRDSTLGNTEETSLSVSGTISAITSKVSTIWWSDTLSTALSPSSLPPKISTAFHTQQSEGAETTGRPHERSSFSPGVSQEIFTLHETTTWPSSFSSKGHTTWSQTELPSTSTGAATRLVTGNPSTGTAGTIPRVPSKVSAIGEPGEPTTYSSHSTTLPKTTGAGAQTQWTQETGTTGEALLSSPSYSVTQMIKTATSPSSSPMLDRHTSQQITTAPSTNHSTIHSTSTSPQESPAVSQRGHTQAPQTTQESQTTRSVSPMTDTKTVTTPGSSFTASGHSPSEIVPQDAPTISAATTFAPAPTGDGHTTQAPTTALQAAPSSHDATLGPSGGTSLSKTGALTLANSVVSTPGGPEGQWTSASASTSPDTAAAMTHTHQAESTEASGQTQTSEPASSGSRTTSAGTATPSSSGASGTTPSGSEGISTSGETTRFSSNPSRDSHTTQSTTELLSASASHGAIPVSTGMASSIVPGTFHPTLSEASTAGRPTGQSSPTSPSASPQETAAISRMAQTQRTRTSRGSDTISLASQATDTFSTVPPTPPSITSTGLTSPQTETHTLSPSGSGKTFTTALISNATPLPVTYASSASTGHATPLAVSSATSASTVSSDSPLKMETPGMTTPSLKTDGGRRTATSPPPTTSQTIISTIPSTAMHTRSTAAPIPILPERGVSLFPYGAGAGDLEFVRRTVDFTSPLFKPATGFPLGSSLRDSLYFTDNGQIIFPESDYQIFSYPNPLPTGFTGRDPVALVAPFWDDADFSTGRGTTFYQEYETFYGEHSLLVQQAESWIRKMTNNGGYKARWALKVTWVNAHAYPAQWTLGSNTYQAILSTDGSRSYALFLYQSGGMQWDVAQRSGNPVLMGFSSGDGYFENSPLMSQPVWERYRPDRFLNSNSGLQGLQFYRLHREERPNYRLECLQWLKSQPRWPSWGWNQVSCPCSWQQGRRDLRFQPASLPPEYQNRTEGLLGVWNNNPEDDFRMPNGSTIPPGSPEEMLFHFGMTWQINGTGLLGKRNDQLPSNFTPVFYSQLQKNSSWAEHLISNCDGDSSCIYDTLALRNASIGLHTREVSKNYEQANATLNQYPPSINGGRVIEAYKGQTTLIQYTSNAEDANFTLRDSCTDLELFENGTLLWTPKSLEPFTLEILARSAKIGLASALQPRTVVCHCNAESQCLYNQTSRVGNSSLEVAGCKCDGGTFGRYCEGSEDACEEPCFPSVHCVPGKGCEACPPNLTGDGRHCAALGSSFLCQNQSCPVNYCYNQGHCYISQTLGCQPMCTCPPAFTDSRCFLAGNNFSPTVNLELPLRVIQLLLSEEENASMAEVNASVAYRLGTLDMRAFLRNSQVERIDSAAPASGSPIQHWMVISEFQYRPRGPVIDFLNNQLLAAVVEAFLYHVPRRSEEPRNDVVFQPISGEDVRDVTALNVSTLKAYFRCDGYKGYDLVYSPQSGFTCVSPCSRGYCDHGGQCQHLPSGPRCSCVSFSIYTAWGEHCEHLSMKLDAFFGIFFGALGGLLLLGVGTFVVLRFWGCSGARFSYFLNSAEALP

SEQ ID NO: 198240 - protein, 5412 aa, Artificial Sequence
  derived and/or modified sequence
MKGARWRRVPWVSLSCLCLCLLPHVVPGTTEDTLITGSKTAAPVTSTGSTTATLEGQSTAASSRTSNQDISASSQNHQTKSTETTSKAQTDTLTQMMTSTLFSSPSVHNVMETAPPDEMTTSFPSSVTNTLMMTSKTITMTTSTDSTLGNTEETSTAGTESSTPVTSAVSITAGQEGQSRTTSWRTSIQDTSASSQNHWTRSTQTTRESQTSTLTHRTTSTPSFSPSVHNVTGTVSQKTSPSGETATSSLCSVTNTSMMTSEKITVTTSTGSTLGNPGETSSVPVTGSLMPVTSAALVTFDPEGQSPATFSRTSTQDTTAFSKNHQTQSVETTRVSQINTLNTLTPVTTSTVLSSPSGFNPSGTVSQETFPSGETTTSSPSSVSNTFLVTSKVFRMPTSRDSTLGNTEETSLSVSGTISAITSKVSTIWWSDTLSTALSPSSLPPKISTAFHTQQSEGAETTGRPHERSSFSPGVSQEIFTLHETTTWPSSFSSKGHTTWSQTELPSTSTGAATRLVTGNPSTGTAGTIPRVPSKVSAIGEPGEPTTYSSHSTTLPKTTGAGAQTQWTQETGTTGEALLSSPSYSVTQMIKTATSPSSSPMLDRHTSQQITTAPSTNHSTIHSTSTSPQESPAVSQRGHTQAPQTTQESQTTRSVSPMTDTKTVTTPGSSFTASGHSPSEIVPQDAPTISAATTFAPAPTGDGHTTQAPTTALQAAPSSHDATLGPSGGTSLSKTGALTLANSVVSTPGGPEGQWTSASASTSPDTAAAMTHTHQAESTEASGQTQTSEPASSGSRTTSAGTATPSSSGASGTTPSGSEGISTSGETTRFSSNPSRDSHTTQSTTELLSASASHGAIPVSTGMASSIVPGTFHPTLSEASTAGRPTGQSSPTSPSASPQETAAISRMAQTQRTRTSRGSDTISLASQATDTFSTVPPTPPSITSTGLTSPQTETHTLSPSGSGKTFTTALISNATPLPVTYASSASTGHTTPLHVTDASSVSTGHATPLPVTSPSSVSTGHTTPLPVTDTSSESTGHVTPLPVTSFSSASTGDSTPLPVTDTSSASTGHVTPLPVTSLSSASTGDTTPLPVTDTSSASTGHATSLPVTDTSSVSTGHTTPLPVTDTSSASTGHATSLPVTDTSSVSTGHTTPLHVTDASSASTGQATPLPVTSLSSVSTGDTTPLPVTSPSSASTGHATPLLVTDTSSASTGHATPLPVTDASSVSTDHATSLPVTIPSAASTGHTTPLPVTDTSSASTGQATSLLVTDTSSVSTGDTTPLPVTSTSSASTGHVTPLHVTSPSSASTGHATPLPVTSLSSASTGDTMPLPVTSPSSASTGDTTPLPVTDASSVSTGHTTPLHVTDASSASTGQATPLPVTSLSSVSTGDTTPLPVTSPSSASTGHATPLLVTDTSSASTGHATPLPVTDASSVSTDHATSLPVTIPSAASTGHTTPLPVTDTSSASTGQATSLLVTDTSSVSTGDTTPLPVTSTSSASTGHVTPLHVTSPSSASTGHATPLPVTSLSSASTGDTMPLPVTSPSSASTGDTTPLPVTDASSVSTGHTTPLPVTSPSSASTGHTTPLPVTDTSSASKGDTTPLPVTSPSSASTGHTTPLPVTDTSSASTGDTTPLPVTNASSLSTGHATPLHVTSPSSASTGHATPLPVTSTSSASTGHATPLPVTGLSSATTDDTTRLPVTDVSSASTGQATPLPVTSLSSVSTGDTTPLPVTSPSSASTGHASPLLVTDASSASTGQATPLPVTDTSSVSTAHATPLPVTGLSSASTDDTTRLPVTDVSSASTGQAIPLPVTSPSSASTGDTTPLPVTDASSASTGDTTSLPVTIPSSASSGHTTSLPVTDASSVSTGHATSLLVTDASSVSTGDTTPLPVTDTNSASTGDTTPLHVTDASSVSTGHATSLPVTSLSSASTGDTTPLPVTSPSSASSGHTTPLPVTDASSVPTGHATSLPVTDASSVSTGHATPLPVTDASSVSTGHATPLPVTDTSSVSTGQATPLPVTSLSSASTGDTTPLPVTDTSSASTGQDTPLPVTSLSSVSTGDTTPLPVTNPSSASTGHATPLLVTDASSISTGHATSLLVTDASSVSTGHATALHDTDASSLSTGDTTPLPVTSPSSTSTGDTTPLPVTETSSVSTGHATSLPVTDTSSASTGHATSLPVTDTSSASTGHATPLPVTDTSSASTGQATPLPVTSPSSASTGHAIPLLVTDTSSASTGQATPLPVTSLSSASTGDTTPLPVTDASSVSTGHATSLPVTSLSSVSTGDTTPLPVTSPSSASTGHATPLHVTDASSASTGHATPLPVTSLSSASTGDTTPLPVTSPSSASTGHATPLHVTDASSVSTGDTTPLPVTSSSSASSGHTTPLPVTDASSASTGDTTPLPVTDTSSASTGHATHLPVTGLSSASTGDTTRLPVTNVSSASTGHATPLPVTSTSSASTGDTTPLPGTDTSSVSTGHTTPLLVTDASSVSTGDTTRLPVTSPSSASTGHTTPLPVTDTPSASTGDTTPLPVTNASSLSTRHATSLHVTSPSSASTGHATSLPVTDTSAASTGHATPLPVTSTSSASTGDTTPLPVTDTYSASTGQATPLPVTSLSSVSTGDTTPLPVTSPSSASTGHATPLLVTDASSASTGQATPLPVTSLSSVSTGDTTPLPVTSPSSASTGHATSLPVTDTSSASTGDTTSLPVTDTSSAYTGDTTSLPVTDTSSSSTGDTTPLLVTETSSVSTGDTTPLPVTDTSSASTGHATPLPVTNTSSVSTGHATPLHVTSPSSASTGHTTPLPVTDASSVSTGHATSLPVTDASSVFTGHATSLPVTIPSSASSGHTTPLPVTDASSVSTGHATSLPVTDASSVSTGHATPLPVTDASSVSTGHATPLPLTSLSSVSTGDTTPLPVTDTSSASTGQATPLPVTSLSSVSTGDTTPLPVTDTSSASTGHATSLPVTDTSSASTGHATPLPDTDTSSASTGHATLLPVTDTSSASIGHATSLPVTDTSSISTGHATPLHVTSPSSASTGHATPLPVTDTSSASTGHANPLHVTSPSSASTGHATPLPVTDTSSASTGHATPLPVTSLSSVSTGDTTPLPVTSPSSASTGHTTPLPVTDTSSASTGQATALPVTSTSSASTGDTTPLPVTDTSSASTGQATPLPVTSLSSVSTGDTTPLPVTSPSSASTGHATPLLVTDASSASTGQATPLPVTSLSSVSTGDTTPLPVTSPSSASTGHATSLPVTDTSSASTGDTTSLPVTDTSSAYTGDTTSLPVTDTSSSSTGDTTPLLVTETSSVSTGHATPLLVTDASSASTGHATPLHVTSPSSASTGDTTPVPVTDTSSVSTGHATPLPVTGLSSASTGDTTRLPVTDISSASTGQATPLPVTNTSSVSTGDTMPLPVTSPSSASTGHATPLPVTSTSSASTGHATPVPVTSTSSASTGHTTPLPVTDTSSASTGDTTPLPVTSPSSASTGHTTPLHVTIPSSASTGDTSTLPVTGASSASTGHATPLPVTDTSSVSTGHATPLPVTSLSSVSTGDTTPLPVTDASSASTGQATPLPVTSLSSVSTGDTTPLLVTDASSVSTGHATPLPVTDTSSASTGDTTRLPVTDTSSASTGQATPLPVTSLSSVSTGDTTPLLVTDASSVSTGHATPLPVTDTSSASTGDTTRLPVTDTSSASTGQATPLPVTIPSSSSSGHTTPLPVTSTSSVSTGHVTPLHVTSPSSASTGHVTPLPVTSTSSASTGHATPLLVTDASSVSTGHATPLPVTDASSASTGDTTPLPVTDTSSASTGQATPLPVTSLSSVSTGDTTPLPVTDASSASTGHATPLPVTIPSSVSTGDTMPLPVTSPSSASTGHATPLPVTGLSSASTGDTTPLPVTDTSSASTRHATPLPVTDTSSASTDDTTRLPVTDVSSASTGHATPLPVTSTSSASTGDTTPLPVTDTSSVSTGHATSLPVTSRSSASTGHATPLPVTDTSSVSTGHATPLPVTSTSSVSTGHATPLPVTSPSSASTGHATPVPVTSTSSASTGDTTPLPVTNASSLSTGHATPLHVTSPSSASRGDTSTLPVTDASSASTGHATPLPLTSLSSVSTGDTTPLPVTDTSSASTGQATPLPVTSLSSVSTGDTTPLPVTIPSSASSGHTTSLPVTDASSVSTGHGTPLPVTSTSSASTGDTTPLPVTDTSSASTGHATPLPVTDTSSASTGHATPLPVTSLSSVSTGHATPLAVSSATSASTVSSDSPLKMETPGMTTPSLKTDGGRRTATSPPPTTSQTIISTIPSTAMHTRSTAAPIPILPERGVSLFPYGAGAGDLEFVRRTVDFTSPLFKPATGFPLGSSLRDSLYFTDNGQIIFPESDYQIFSYPNPLPTGFTGRDPVALVAPFWDDADFSTGRGTTFYQEYETFYGEHSLLVQQAESWIRKMTNNGGYKARWALKVTWVNAHAYPAQWTLGSNTYQAILSTDGSRSYALFLYQSGGMQWDVAQRSGNPVLMGFSSGDGYFENSPLMSQPVWERYRPDRFLNSNSGLQGLQFYRLHREERPNYRLECLQWLKSQPRWPSWGWNQVSCPCSWQQGRRDLRFQPVSIGRWGLGSRQLCSFTSWRGGVCCSYGPWGEFREGWHVQRPWQLAQELEPQSWCCRWNDKPYLCALYQQRRPHVGCATYRPPQPAWMFGDPHITTLDGVSYTFNGLGDFLLVGAQDGNSSFLLQGRTAQTGSAQATNFIAFAAQYRSSSLGPVTVQWLLEPHDAIRVLLDNQTVTFQPDHEDGGGQETFNATGVLLSRNGSEVSASFDGWATVSVIALSNILHASASLPPEYQNRTEGLLGVWNNNPEDDFRMPNGSTIPPGSPEEMLFHFGMTWQINGTGLLGKRNDQLPSNFTPVFYSQLQKNSSWAEHLISNCDGDSSCIYDTLALRNASIGLHTREVSKNYEQANATLNQYPPSINGGRVIEAYKGQTTLIQYTSNAEDANFTLRDSCTDLELFENGTLLWTPKSLEPFTLEILARSAKIGLASALQPRTVVCHCNAESQCLYNQTSRVGNSSLEVAGCKCDGGTFGRYCEGSEDACEEPCFPSVHCVPGKGCEACPPNLTGDGRHCAALGSSFLCQNQSCPVNYCYNQGHCYISQTLGCQPMCTCPPAFTDSRCFLAGNNFSPTVNLELPLRVIQLLLSEEENASMAEVNASVAYRLGTLDMRAFLRNSQVERIDSAAPASGSPIQHWMVISEFQYRPRGPVIDFLNNQLLAAVVEAFLYHVPRRSEEPRNDVVFQPISGEDVRDVTALNVSTLKAYFRCDGYKGYDLVYSPQSGFTCVSPCSRGYCDHGGQCQHLPSGPRCSCVSFSIYTAWGEHCEHLSMKLDAFFGIFFGALGGLLLLGVGTFVVLRFWGCSGARFSYFLNSAEALP

SEQ ID NO: 198241 - protein, 5360 aa, Artificial Sequence
  derived and/or modified sequence
MKGARWRRVPWVSLSCLCLCLLPHVVPGTTEDTLITGSKTAAPVTSTGSTTATLEGQSTAASSRTSNQDISASSQNHQTKSTETTSKAQTDTLTQMMTSTLFSSPSVHNVMETAPPDEMTTSFPSSVTNTLMMTSKTITMTTSTDSTLGNTEETSTAGTESSTPVTSAVSITAGQEGQSRTTSWRTSIQDTSASSQNHWTRSTQTTRESQTSTLTHRTTSTPSFSPSVHNVTGTVSQKTSPSGETATSSLCSVTNTSMMTSEKITVTTSTGSTLGNPGETSSVPVTGSLMPVTSAALVTFDPEGQSPATFSRTSTQDTTAFSKNHQTQSVETTRVSQINTLNTLTPVTTSTVLSSPSGFNPSGTVSQETFPSGETTTSSPSSVSNTFLVTSKVFRMPTSRDSTLGNTEETSLSVSGTISAITSKVSTIWWSDTLSTALSPSSLPPKISTAFHTQQSEGAETTGRPHERSSFSPGVSQEIFTLHETTTWPSSFSSKGHTTWSQTELPSTSTGAATRLVTGNPSTGTAGTIPRVPSKVSAIGEPGEPTTYSSHSTTLPKTTGAGAQTQWTQETGTTGEALLSSPSYSVTQMIKTATSPSSSPMLDRHTSQQITTAPSTNHSTIHSTSTSPQESPAVSQRGHTQAPQTTQESQTTRSVSPMTDTKTVTTPGSSFTASGHSPSEIVPQDAPTISAATTFAPAPTGDGHTTQAPTTALQAAPSSHDATLGPSGGTSLSKTGALTLANSVVSTPGGPEGQWTSASASTSPDTAAAMTHTHQAESTEASGQTQTSEPASSGSRTTSAGTATPSSSGASGTTPSGSEGISTSGETTRFSSNPSRDSHTTQSTTELLSASASHGAIPVSTGMASSIVPGTFHPTLSEASTAGRPTGQSSPTSPSASPQETAAISRMAQTQRTRTSRGSDTISLASQATDTFSTVPPTPPSITSTGLTSPQTETHTLSPSGSGKTFTTALISNATPLPVTYASSASTGHTTPLHVTDASSVSTGHATPLPVTSPSSVSTGHTTPLPVTDTSSESTGHVTPLPVTSFSSASTGDSTPLPVTDTSSASTGHVTPLPVTSLSSASTGDTTPLPVTDTSSASTGHATSLPVTDTSSVSTGHTTPLPVTDTSSASTGHATSLPVTDTSSVSTGHTTPLHVTDASSASTGQATPLPVTSLSSVSTGDTTPLPVTSPSSASTGHATPLLVTDTSSASTGHATPLPVTDASSVSTDHATSLPVTIPSAASTGHTTPLPVTDTSSASTGQATSLLVTDTSSVSTGDTTPLPVTSTSSASTGHVTPLHVTSPSSASTGHATPLPVTSLSSASTGDTMPLPVTSPSSASTGDTTPLPVTDASSVSTGHTTPLHVTDASSASTGQATPLPVTSLSSVSTGDTTPLPVTSPSSASTGHATPLLVTDTSSASTGHATPLPVTDASSVSTDHATSLPVTIPSAASTGHTTPLPVTDTSSASTGQATSLLVTDTSSVSTGDTTPLPVTSTSSASTGHVTPLHVTSPSSASTGHATPLPVTSLSSASTGDTMPLPVTSPSSASTGDTTPLPVTDASSVSTGHTTPLPVTSPSSASTGHTTPLPVTDTSSASKGDTTPLPVTSPSSASTGHTTPLPVTDTSSASTGDTTPLPVTNASSLSTGHATPLHVTSPSSASTGHATPLPVTSTSSASTGHATPLPVTGLSSATTDDTTRLPVTDVSSASTGQATPLPVTSLSSVSTGDTTPLPVTSPSSASTGHASPLLVTDASSASTGQATPLPVTDTSSVSTAHATPLPVTGLSSASTDDTTRLPVTDVSSASTGQAIPLPVTSPSSASTGDTTPLPVTDASSASTGDTTSLPVTIPSSASSGHTTSLPVTDASSVSTGHATSLLVTDASSVSTGDTTPLPVTDTNSASTGDTTPLHVTDASSVSTGHATSLPVTSLSSASTGDTTPLPVTSPSSASSGHTTPLPVTDASSVPTGHATSLPVTDASSVSTGHATPLPVTDASSVSTGHATPLPVTDTSSVSTGQATPLPVTSLSSASTGDTTPLPVTDTSSASTGQDTPLPVTSLSSVSTGDTTPLPVTNPSSASTGHATPLLVTDASSISTGHATSLLVTDASSVSTGHATALHDTDASSLSTGDTTPLPVTSPSSTSTGDTTPLPVTETSSVSTGHATSLPVTDTSSASTGHATSLPVTDTSSASTGHATPLPVTDTSSASTGQATPLPVTSPSSASTGHAIPLLVTDTSSASTGQATPLPVTSLSSASTGDTTPLPVTDASSVSTGHATSLPVTSLSSVSTGDTTPLPVTSPSSASTGHATPLHVTDASSASTGHATPLPVTSLSSASTGDTTPLPVTSPSSASTGHATPLHVTDASSVSTGDTTPLPVTSSSSASSGHTTPLPVTDASSASTGDTTPLPVTDTSSASTGHATHLPVTGLSSASTGDTTRLPVTNVSSASTGHATPLPVTSTSSASTGDTTPLPGTDTSSVSTGHTTPLLVTDASSVSTGDTTRLPVTSPSSASTGHTTPLPVTDTPSASTGDTTPLPVTNASSLSTRHATSLHVTSPSSASTGHATSLPVTDTSAASTGHATPLPVTSTSSASTGDTTPLPVTDTYSASTGQATPLPVTSLSSVSTGDTTPLPVTSPSSASTGHATPLLVTDASSASTGQATPLPVTSLSSVSTGDTTPLPVTSPSSASTGHATSLPVTDTSSASTGDTTSLPVTDTSSAYTGDTTSLPVTDTSSSSTGDTTPLLVTETSSVSTGDTTPLPVTDTSSASTGHATPLPVTNTSSVSTGHATPLHVTSPSSASTGHTTPLPVTDASSVSTGHATSLPVTDASSVFTGHATSLPVTIPSSASSGHTTPLPVTDASSVSTGHATSLPVTDASSVSTGHATPLPVTDASSVSTGHATPLPLTSLSSVSTGDTTPLPVTDTSSASTGQATPLPVTSLSSVSTGDTTPLPVTDTSSASTGHATSLPVTDTSSASTGHATPLPDTDTSSASTGHATLLPVTDTSSASIGHATSLPVTDTSSISTGHATPLHVTSPSSASTGHATPLPVTDTSSASTGHANPLHVTSPSSASTGHATPLPVTDTSSASTGHATPLPVTSLSSVSTGDTTPLPVTSPSSASTGHTTPLPVTDTSSASTGQATALPVTSTSSASTGDTTPLPVTDTSSASTGQATPLPVTSLSSVSTGDTTPLPVTSPSSASTGHATPLLVTDASSASTGQATPLPVTSLSSVSTGDTTPLPVTSPSSASTGHATSLPVTDTSSASTGDTTSLPVTDTSSAYTGDTTSLPVTDTSSSSTGDTTPLLVTETSSVSTGHATPLLVTDASSASTGHATPLHVTSPSSASTGDTTPVPVTDTSSVSTGHATPLPVTGLSSASTGDTTRLPVTDISSASTGQATPLPVTNTSSVSTGDTMPLPVTSPSSASTGHATPLPVTSTSSASTGHATPVPVTSTSSASTGHTTPLPVTDTSSASTGDTTPLPVTSPSSASTGHTTPLHVTIPSSASTGDTSTLPVTGASSASTGHATPLPVTDTSSVSTGHATPLPVTSLSSVSTGDTTPLPVTDASSASTGQATPLPVTSLSSVSTGDTTPLLVTDASSVSTGHATPLPVTDTSSASTGDTTRLPVTDTSSASTGQATPLPVTSLSSVSTGDTTPLLVTDASSVSTGHATPLPVTDTSSASTGDTTRLPVTDTSSASTGQATPLPVTIPSSSSSGHTTPLPVTSTSSVSTGHVTPLHVTSPSSASTGHVTPLPVTSTSSASTGHATPLLVTDASSVSTGHATPLPVTDASSASTGDTTPLPVTDTSSASTGQATPLPVTSLSSVSTGDTTPLPVTDASSASTGHATPLPVTIPSSVSTGDTMPLPVTSPSSASTGHATPLPVTGLSSASTGDTTPLPVTDTSSASTRHATPLPVTDTSSASTDDTTRLPVTDVSSASTGHATPLPVTSTSSASTGDTTPLPVTDTSSVSTGHATSLPVTSRSSASTGHATPLPVTDTSSVSTGHATPLPVTSTSSVSTGHATPLPVTSPSSASTGHATPVPVTSTSSASTGDTTPLPVTNASSLSTGHATPLHVTSPSSASRGDTSTLPVTDASSASTGHATPLPLTSLSSVSTGDTTPLPVTDTSSASTGQATPLPVTSLSSVSTGDTTPLPVTIPSSASSGHTTSLPVTDASSVSTGHGTPLPVTSTSSASTGDTTPLPVTDTSSASTGHATPLPVTDTSSASTGHATPLPVTSLSSVSTGHATPLAVSSATSASTVSSDSPLKMETPGMTTPSLKTDGGRRTATSPPPTTSQTIISTIPSTAMHTRSTAAPIPILPERGVSLFPYGAGAGDLEFVRRTVDFTSPLFKPATGFPLGSSLRDSLYFTDNGQIIFPESDYQIFSYPNPLPTGFTGRDPVALVAPFWDDADFSTGRGTTFYQSNTYQAILSTDGSRSYALFLYQSGGMQWDVAQRSGNPVLMGFSSGDGYFENSPLMSQPVWERYRPDRFLNSNSGLQGLQFYRLHREERPNYRLECLQWLKSQPRWPSWGWNQVSCPCSWQQGRRDLRFQPVSIGRWGLGSRQLCSFTSWRGGVCCSYGPWGEFREGWHVQRPWQLAQELEPQSWCCRWNDKPYLCALYQQRRPHVGCATYRPPQPAWMFGDPHITTLDGVSYTFNGLGDFLLVGAQDGNSSFLLQGRTAQTGSAQATNFIAFAAQYRSSSLGPVTVQWLLEPHDAIRVLLDNQTVTFQPDHEDGGGQETFNATGVLLSRNGSEVSASFDGWATVSVIALSNILHASASLPPEYQNRTEGLLGVWNNNPEDDFRMPNGSTIPPGSPEEMLFHFGMTWQINGTGLLGKRNDQLPSNFTPVFYSQLQKNSSWAEHLISNCDGDSSCIYDTLALRNASIGLHTREVSKNYEQANATLNQYPPSINGGRVIEAYKGQTTLIQYTSNAEDANFTLRDSCTDLELFENGTLLWTPKSLEPFTLEILARSAKIGLASALQPRTVVCHCNAESQCLYNQTSRVGNSSLEVAGCKCDGGTFGRYCEGSEDACEEPCFPSVHCVPGKGCEACPPNLTGDGRHCAALGSSFLCQNQSCPVNYCYNQGHCYISQTLGCQPMCTCPPAFTDSRCFLAGNNFSPTVNLELPLRVIQLLLSEEENASMAEVNASVAYRLGTLDMRAFLRNSQVERIDSAAPASGSPIQHWMVISEFQYRPRGPVIDFLNNQLLAAVVEAFLYHVPRRSEEPRNDVVFQPISGEDVRDVTALNVSTLKAYFRCDGYKGYDLVYSPQSGFTCVSPCSRGYCDHGGQCQHLPSGPRCSCVSFSIYTAWGEHCEHLSMKLDAFFGIFFGALGGLLLLGVGTFVVLRFWGCSGARFSYFLNSAEALP

SEQ ID NO: 198242 - DNA, 5739 bp, Artificial Sequence
  derived and/or modified sequence
cctgggaccacagaggacaccctgatcaccggaagcaaaaccgcagccccggtgacctccactgggagcaccacagccactctggagggccaaagcacagccgcctcaagtcgaactagtaatcaagacatctctgcaagctcacagaatcatcagactaagagtacagaaaccacatctaaagcacagacagacaccctcactcagatgatgacgagcacgctgttctccagcccatctgttcacaatgtgatggagaccgctcctcctgacgaaatgaccacctcctttcccagttccgttaccaataccctgatgatgacgtccaagacgatcactatgactacctctaccgatagtacgctgggtaataccgaggagacctctaccgctggcaccgaaagtagtactccggtgactagcgccgtgtctattaccgccggacaggaggggcagtcacgcactacttcctggagaacttcaattcaggacacgtctgcctcctcgcagaatcactggacaaggtctacgcagacgacccgggaatctcaaacaagcaccctgacccaccgaaccacatctactcctagctttagcccttccgttcataatgtaacagggacagtgagtcagaagacgtccccctctggggagaccgccacttccagcctgtgcagcgttacaaacacatcaatgatgacttcagagaagattacagtcacaacctctactggttcgacactgggtaatcccggagagactagctctgtacccgtcacagggtccctcatgcctgtgacctccgccgcactcgtaaccttcgacccggaaggacagtcaccagctaccttctccagaactagcacacaggataccacagccttctctaaaaaccaccagactcagagcgtggagaccactagagtcagtcagattaacaccctgaacacactcacacctgtcacaacgtctactgtcctgtcgtcaccgtcaggcttcaatccttctggtacagtctcccaggagacttttcccagcggcgagacgacaacatccagcccctcttctgtttcgaatacattcttagttacatccaaagtattccgcatgcctacgtcgagggacagtacactagggaataccgaggagaccagcctgagcgtgtctggtacaatctcagcgataacatccaaggttagtacaatctggtggtctgacacactttctaccgcactctcgccctcatcccttccaccgaagattagtaccgcatttcacacccagcagagcgaaggtgctgaaaccaccggccggccccatgaacgttcctctttttcccccggcgtcagccaggaaatatttacactgcacgagacaactacctggccaagttctttttcttctaagggccacacgacgtggagccagactgagcttccaagtacttctacaggagccgctactaggctggtgaccggcaacccttccacaggaacagctggaactattcctcgcgtgcctagtaaggtatccgcaataggtgaaccgggggaacccactacctatagctctcactcaaccactctcccaaaaaccaccggcgccggagcacagacccagtggacccaggaaacaggcactaccggcgaggctctgctgagctcccccagctactcggttacacaaatgattaaaaccgccacaagcccatcttcatcaccaatgttggacagacacacctctcagcaaattacaactgccccctcgaccaaccattccaccatccattctacttctacttccccccaggagagcccagccgtgagtcagcggggacacacacaggcgcctcagacaacacaggaaagccagacgacacgatctgtaagccccatgacagatactaagaccgtgacgacacctggctcctcatttaccgcatccggacattctccttctgagatcgtcccccaggatgcgccaactatttctgccgcaaccaccttcgctcccgctccgaccggtgatggtcacaccacacaagcccctactaccgctttacaagcggcaccaagtagtcacgacgcgaccctgggaccaagcggtggcactagcctgagcaaaaccggcgctctgacactagccaactccgtggtcagcacccccggtggccccgagggccagtggacttcagctagcgccagcactagtcctgatacggccgccgcaatgacgcatacacatcaagccgagtctaccgaggcaagcggccaaacacaaacatcggagccggcatcgtctgggagcaggactacttcagctggcacagctacgccaagctcctctggggcaagcggtacgacgcctagcggatcagagggaatctctaccagtggagaaaccacccgcttttcatctaacccctcacgcgatagccataccactcagtcaactaccgagcttctttctgccagtgcaagccatggcgctatcccggtctccactgggatggccagctcgatcgtgcctggaacctttcatccaacactgtcggaagcatctactgctggaagacccaccggtcaatcatctcctacatccccatccgcctcaccacaggagacagccgccatctccagaatggctcaaacccagaggaccagaacctcccggggttctgacaccattagcctcgcctctcaggccactgatacattctctacagtgccccccacaccacctagcatcacctctacaggattaacaagtccacagacagagacccacactctgagcccatcaggaagcggaaagaccttcacaacggctctgattagcaacgcaactccactccctgtgacctacgcatccagcgcctccaccggacacgcaactccactggctgtgagcagcgccaccagcgccagcaccgtgagcagcgatagcccccttaagatggagacgcccggaatgaccactccttctctcaaaacagacggtgggcggagaactgcaacctctccacctccaaccacgagccagacaattattagcaccatacccagtaccgcaatgcatacgaggtctactgcggccccaatcccaatcctgcccgaacgcggggtctcccttttcccatacggcgccggggcgggagatctcgaatttgtgcgccggactgtggattttactagccctttgttcaaaccagcaaccggttttcccctcgggtctagcctgcgggactcactttattttaccgataacggccagataatcttcccggagagcgattaccagatttttagctacccgaatcccctgcccactgggttcaccggtagggaccccgtcgcactggtggcccctttctgggacgatgctgatttcagtactggcagaggcaccacattctaccaagagtacgaaaccttctatggggaacacagtctgctcgttcagcaggctgagtcctggatcagaaaaatgacgaacaacggcggctacaaggccaggtgggctttaaaagtaacgtgggtgaatgcacatgcgtatcccgcacagtggacactggggagcaacacataccaggcaatcctatctacagatggcagtagaagctacgcactgtttctgtaccagagcggcggtatgcaatgggatgttgcccaacggagcggaaatccagtcctcatgggcttttccagtggagacggttatttcgaaaattctccactaatgtctcagcctgtgtgggagaggtacagaccagataggttcctgaattcaaattcaggtctacaaggcctgcagttttatagactgcatagagaagaaagacctaactacagattagagtgtctgcagtggctgaaatcccagcctcggtggccatcttggggctggaatcaggttagctgcccctgctcctggcaacagggccgcagagacctgagattccagcccgcaagcttgccacccgagtatcagaaccggaccgaaggcctgctgggggtgtggaacaataaccccgaggacgactttcgaatgccaaatgggtccaccattccgccgggctctcctgaggagatgctgttccattttggcatgacctggcagattaacggcaccgggctactgggcaagagaaacgaccagctgccgtcaaactttacccccgtcttttattctcagctccagaaaaacagctcctgggctgagcacttaataagtaactgtgatggtgactcctcatgtatttacgacacgctagctctgagaaacgcgtctatcggcctccatacccgagaggttagcaaaaattacgaacaggctaatgctacattgaaccagtacccacctagtataaacggcggacgggtgatagaagcctacaaagggcagaccaccctcattcaatacacctccaatgcagaggacgcaaacttcacacttcgagactcatgtacggatctggagctcttcgagaacgggaccctgctatggaccccgaagtcactggagccatttacactggagatactcgccaggagtgccaagattggccttgcttccgcactgcagccaaggactgtggtttgtcattgcaatgccgagagccagtgcctgtacaaccagaccagtcgagtcgggaattccagtctggaagtagccggctgcaaatgcgatggaggaacttttggcaggtactgcgagggctccgaagacgcctgcgaagaaccctgcttccctagcgtgcactgcgtgcccggtaagggctgtgaggcatgccccccaaacctgacaggcgatggacgacactgcgcagctcttggatcctcgtttctttgtcaaaatcagagctgccccgtcaactactgctacaatcagggacattgctatatctctcagaccctcggttgccagcctatgtgcacctgcccaccagcctttacagatagtagatgcttcttagctggaaacaatttttctcctaccgtgaatcttgaactgcccttaagagtcattcagttgctgctgtctgaggaagaaaacgccagcatggcagaggtgaacgctagcgtggcttacagattggggactctggatatgagggccttcctccgcaatagccaggtagagcgcattgactcggctgcccctgcatcagggtcccctatacaacactggatggtcattagcgagtttcagtataggccgaggggccctgtgatcgactttctaaacaatcaactgctcgctgcggttgtcgaggcctttctgtatcacgtgcctcggaggtccgaggaaccccgtaatgacgtagtcttccagcctatatctggtgaagacgtccgggatgtaaccgccttgaacgttagcactctgaaggcctactttcgatgcgatggctataagggctatgacctggtctacagcccgcagtctgggtttacttgtgtgtctccttgttcgagggggtactgcgaccacggggggcaatgtcagcatctgcccagtgggccgagatgttcttgtgtgagtttttcaatctatactgcctggggggagcattgtgagcatttgtctatgaagttagacgccttctttggcattttctttggggccctgggtggcctgttactgctcggggtggggacatttgtggtcctgcgcttctggggatgctccggagcccgcttttcttattttctgaatagcgctgaggccttgccttag

SEQ ID NO: 198243 - DNA, 16239 bp, Artificial Sequence
  derived and/or modified sequence
atgaagggcgcccgctggaggagggtcccttgggtctccctgtcctgcctttgcctgtgcctgctccctcatgtagtccccggaaccacggaggacacactgatcaccgggtcgaaaaccgctgccccagttacttcgacaggatccaccacggccaccctggagggtcagtcaactgcagccagttccagaacctccaatcaggatatctctgccagctcgcagaatcatcagacgaagagcacagaaactacatcaaaggctcaaacagacaccctgacccaaatgatgaccagcacactattcagctcccctagtgtccacaatgtaatggagacagcccctcccgatgaaatgacaacctcattccccagcagcgtcaccaatactctgatgatgacctctaagactatcacgatgacgacatctacagactctaccctcggaaacactgaagaaacctctaccgccgggaccgagtcttcaactcccgtgacatctgccgtgtctattacggccggccaggaggggcagtcaagaactacttcatggcgaaccagcatccaggatactagtgcatcctcacagaatcactggacaagatccactcagaccacgcgtgaaagccagacaagcactttgactcaccggaccacatccacaccttctttttctccctccgtgcacaacgtgacaggaaccgtcagtcagaaaactagtccatcaggagagacagctacctcatccttgtgctccgtgaccaacacttctatgatgacctcagagaaaatcaccgtgaccacttctaccgggagcacgcttggaaatcccggggagacatcatccgtccccgttacaggctcactgatgcctgtgacctcggcggctcttgtaacgtttgatccagaggggcagagcccagccacattctcaaggaccagcacccaggacaccactgcgttctccaagaaccaccaaactcagagtgtggagacaacgagggtgtcacagataaataccttaaacacactgacacccgtcactactagcaccgtcttaagcagtccttctggcttcaatccatctggaacggtgagccaggagacgttccccagcggcgagactactacctctagtccatcatccgtgtccaatacttttcttgtgactagcaaagtctttcggatgcccacatcgcgggatagtaccttggggaacactgaggagacctccctctccgtctccggcacaatctcggcaattactagtaaggtgtccaccatttggtggtcggatacactctcaacagctctaagccccagttctctacctcctaagatttcaaccgctttccatactcagcagagcgagggagccgaaactaccggtcgccctcacgaacgttctagtttctcccccggcgtgtcccaggaaatctttactctacacgagaccactacatggccatcttcattcagttccaagggacatacaacctggtcgcagactgagttgccttctacgagcacgggagccgccacacggctcgtgactggtaatcctagcacaggaacagctggcacaatccccagggtgccctcaaaggtctccgccataggcgaacccggagagcccaccacctattctagtcactctactacgcttccaaaaaccacaggtgcaggggcacagacacaatggacacaggagaccgggacaaccggggaggcactcctgtcgtctccgagctactcggtaacgcagatgattaaaacggccaccagcccctcatcctcacccatgttggaccgccatacctcccaacagatcaccactgcgccaagtaccaaccactcaacaattcactcaacatctactagcccccaggaaagtcccgcagtgtcacagcgtggccatacacaggctcctcagactactcaagagagccaaacaactagatctgtctctcctatgaccgacaccaagacggtgaccacaccaggttcttccttcacggcctcaggccattctccttccgagatcgtcccccaggacgcccctactatctctgcggcgaccactttcgcccctgcccccacgggggacggccataccacgcaggcccctacgactgcgctgcaggccgccccttcttcacatgatgcgaccttgggtccatcagggggcacctcacttagcaaaaccggagccctaacgctcgccaacagtgtggtatcgactccaggcggccccgagggtcagtggaccagcgcatcagcgtctacctctccagacacggctgcagcaatgacccatacccatcaggctgagtccaccgaagctagtggacagacacagacaagcgaaccagccagtagcggatcgagaacgacctctgcaggtaccgccacacctagctcctctggagcaagcggtacaaccccaagtggcagtgagggcatttccacatctggtgaaaccactcgtttcagtagcaaccccagcagagacagccatactactcagagtacaaccgaactactatctgctagtgcaagtcacggggccatccctgtctccaccggcatggccagtagcatcgtgcccggcacttttcacccaacactgtcagaagccagcacggcgggccgccctaccggccagtcaagtccaacttcaccatcagcaagcccacaggaaaccgctgcaatctccaggatggcccaaactcagagaacaaggactagccggggatccgacaccatctccctcgcctcacaagccacagataccttcagcaccgtacccccaacacccccgtcgattacatctacggggctgacatctccacagacggagacacacactttgtctccctctggcagcggcaagacattcactacagccctcatctccaacgccacacccctccccgtgacctatgcttcgagtgcttccacaggtcacacaacccctttgcacgtcacagatgcatcgtcagtttctactggacacgctactcccttaccagtgacatcaccctcctccgtgagcacaggccacaccacgccattgcctgtgactgatacctcctcagagagtacgggacatgtgacgcctctccctgttacctccttcagcagtgcctcaacaggtgattccaccccactacctgtgacagacacgtcgtctgcatccaccggacatgtaaccccgttgccagtgaccagcctgtcctccgcgtcaacgggagatacgacaccattgccagtgaccgacacctctagcgcgagcaccggccatgccacgtccttacctgtgactgacacctcctccgtctccactgggcacaccacccccctgcccgtcacagatacgtcctcagcctccactggacatgccacctctctgcccgtgaccgatacttcttcagtgagcactggacatactacgccgctgcatgtgactgatgcttcttctgcttcaaccggtcaggccacccctctgcccgtcacttcattgtctagcgtctcaactggtgataccaccccactcccggttacttcgccttcctcagctagcaccggccacgccacaccattgcttgtgaccgatacatcctccgcctccacgggacacgctactccgctccctgtgactgatgcctcttccgttagcacggatcatgctaccagcctgcctgttaccatccctagtgccgccagtacgggccacactacccccctcccagtcacggacacatcgtcggcgtcaacaggccaggcaacaagcttacttgtaactgacaccagctcagtgtccacaggcgatacgacccccctccctgttacatcaacttcctccgccagtactggccatgtgacacccctccacgtgaccagcccctcttccgcatccactggacatgctacgcccctccccgtcacttcactgtcgtccgccagtacaggcgacaccatgccactgccagtgacttcaccatcctccgctagcactggagataccacaccgctccccgttactgatgcctcaagtgtttccaccggacataccacgcccctgcacgtcactgacgcatccagcgcttcaacaggccaggccacgcccctacctgtaacctccctgtcatcagtgtcgacgggagacacgacccccttaccggtcaccagcccttccagcgctagtaccggacatgcaaccccactcttggtgacggacacttctagtgcgagtaccggacacgccacgccgctgcccgtcaccgacgcaagttcagtaagcaccgaccacgctaccagcttgcccgtgacaattccatctgcggctagcacagggcacacgactccactccctgtcaccgacacctcctctgcctcgacaggccaggccacatccctgctggtgactgatacctctagcgtgtccaccggcgatactaccccgctgccagtgacctccacatcttctgcttcaacggggcacgtaacacctctccacgttacgtccccgtctagcgcgtccacaggacacgccactcccctcccagtcacctccctgagttctgcctctactggcgataccatgcccctgcccgtcacatctccgtcttccgcctctacaggggatacaaccccgttgccagtcaccgacgccagttcagtgtcgaccgggcatacaacacccctccccgttacaagcccttcaagcgccagtaccggacacaccacaccactgcctgtaacggatacgagctcagcctctaaaggggacactacacctctccccgtcacctctccatcctcagctagtactggtcacacgacgccactcccagttaccgacactagttctgcatccacaggcgacaccacccctctccctgttactaacgcatcatccttaagcactggacacgccaccccactccatgttacatctcccagctctgccagcaccgggcacgcgacaccacttccagtgactagcacaagttcggcatctacaggccacgctaccccacttcctgtgactggccttagtagcgccacgacagatgacacgacccgattgccagtcacagacgtaagtagcgcctccactgggcaggccacccctctgcccgttacatccctgtcctccgtttcaactggagatacaactccactgcctgtgaccagtcctagctccgctagcaccggccacgcaagccccttactggttacagacgcttcatccgcctcgactggccaggctactcccctacccgtgacagatacatcctctgtgagcacggctcacgccaccccattgcctgtgacggggctctctagtgccagcactgatgataccactagactgccagttaccgacgtctcttcagcatctaccggccaggccattcctctaccggtcacctccccctcatcagctagcaccggggacaccacaccccttccggtgactgacgcctcttctgctagcaccggagacactacctcattgccagtgaccattccatcatccgcttccagcgggcacaccaccagtttgccagttaccgacgccagctctgtcagtacagggcatgccacttcactgctcgttactgacgcctcatcagtttccacgggcgacactacccccctgccagttacagacaccaattctgccagcacaggggacaccaccccgctgcacgtgaccgatgcctcttctgtgtccacgggccacgctacctctctccccgtgacaagtctgtctagtgcgagcaccggagacaccactcctctgcccgtgacatcccctagcagcgcttcaagcggacataccaccccactgccagtcacagacgcgtcgagtgtaccaactgggcatgccacatccctacctgttactgatgcctcttcggtctccaccgggcatgccaccccactcccagtcaccgatgcaagtagcgtttccacaggtcatgccactcccttgcctgtcactgacacaagcagcgtctctaccggtcaggccacaccgctcccagttacatcactgagctccgcctccacaggcgatacaactccacttcctgtaactgacacttctagcgcctccactggccaggatacacccctgccagtgacatccctgagtagtgtctcaactggcgatactacacccctgcccgtcaccaaccccagctcggcatcgacggggcacgcaacacccctattagtgacagacgcatccagcatcagtaccggccacgcaaccagcttgctagtaactgatgcctcctccgttagtactggccatgccactgcgcttcatgacactgatgcttcgtctctgtccacgggagataccactcctctgccagttacctctcctagcagcacctcaacaggcgacactacgccattgccagtaaccgaaaccagtagcgtaagcaccggacatgctaccagcctccctgtgaccgatactagcagtgctagtaccgggcacgccactagcctccctgtgacagatacgagctccgcgagcaccggacatgctacccctctccctgttactgatacctcctccgcttcgacgggccaggccacgccactccccgtgacaagtcctagctctgcctctacaggccatgccatacccctgctggtgaccgacacatcctccgcttctacagggcaggccacaccacttcctgtcacaagtttgagctctgcatctaccggagacactacccccctgccggtaactgatgcctccagcgtgagcaccggccacgcaacgtccctacctgtgacctcactgtccagcgtttctactggtgacaccaccccacttcctgtgacaagccctagctctgcctccaccggacatgccactcccttacatgttacagatgcctcctccgcctccaccgggcatgcaactcctctgcccgtgaccagcttatccagcgcatccacaggcgataccacccccctcccggtgacatcaccctcatctgcaagcaccggacacgccacaccactgcatgtcaccgacgcctcctcagtgtctacgggcgataccacccccctgcccgtgacctctagctcctcggcaagctcaggccataccacgccactgccagtgactgatgcgtcaagcgcgagtaccggcgacaccacccccctccctgtcacagacacatcctctgccagtaccggtcatgcgacacacttgccagttaccggactgagttctgcctcgactggagacacaactcgcctcccagtgacgaacgtgtcatctgcaagcaccgggcatgcaactccccttcctgttacgagcaccagctctgcttccacaggagatactacacccttacccggaactgatacatcttcggtcagtaccggccacacaacccccctgcttgttaccgacgcaagctccgtttcaactggagatacaacccgactacccgttacgtctccctcctctgcttccacggggcacaccactcctctgcctgtcacagacactccctcagcttctacaggcgacacaacccccctgcctgtgactaacgccagctcactttcaactcggcacgcaacgtccttacacgtgactagtcctagttctgcatcaacaggccatgccacgtcactgcctgtaaccgatacttccgctgcaagtactggacatgccactcccctgcccgtcactagcacatcatcggcaagtactggagacactaccccgcttcccgtgacagacacctactcggcctctaccggccaggccacccctcttcccgtgaccagtctgagctctgttagcaccggagataccacaccactgccagttacttccccatcaagtgcctccacagggcacgcaacccccctgctggttacagacgcttccagcgcctcaacagggcaggctacccctttaccggttacatctctttccagtgttagcactggcgataccacccccttacctgttacttcaccctcgagcgcttctacagggcacgctacaagtctgcctgttaccgatacatcctccgcctctactggcgacactacatcactccccgtgacggacacaagcagcgcgtacactggggatactacaagtctcccagtgaccgatacttcttctagcagtaccggtgacactacaccattactagtaacagaaacgagttccgtgtccacaggcgacaccaccccattgccagtgacagacacgtcaagtgcctccactggtcacgctacacccttaccagtcaccaacacatcatctgtatcaactgggcacgccacacccttgcatgtcacgagcccaagcagtgcatctacaggacatacaacacctctgccagtgacggacgcttcaagcgtgtccactggccatgccactagcttaccggtgacagacgcatcgtcagtctttacaggacatgcaactagcttacctgtgactattccttccagcgctagctccggacatacgacccccctccccgtaaccgacgcaagctccgtcagcactgggcacgctacatccctgccagtgacagatgcttcaagtgtaagcaccgggcatgctacccccttgccggtgaccgacgcctcatctgtctctaccggccacgcgaccccgcttcctctaacatcactctcctctgtctccaccggagacaccacacccctgcctgtcaccgatacatcaagtgcttccacaggacaagcaactccgctccctgtgacctctctctcgtccgtaagcactggtgacactacccctctcccggtaacagacacatcctctgcttccaccgggcacgctaccagcttgcccgtgacagatacatccagcgcctctacagggcacgctactccactgcccgacacagacacaagctcagctagcaccggccatgcaacgctgttgcctgtgacagatacgtcatccgctagcattggccacgctactagtctccccgtcaccgatacctccagcataagcacaggccatgcaactccactccatgtgacgagcccttctagcgcaagcaccggacacgccacacctctgccagtgaccgacaccagctcagcctccactggccatgcaaaccctcttcacgtgaccagccccagcagtgccagtactgggcacgccacaccccttcctgtaacagatacttcctcagcctcgacggggcacgctactcctctgcccgtcacatctctctcaagcgtgagcacaggtgacacaaccccactacccgtaacttctccgtctagcgcttcaacgggacatacaactccactgcccgtgacagacactagtagtgcttccactggacaggcaacagcactgccagtgacctcaacctccagcgcgtctacaggggatacgacccctcttcctgtgaccgacacgtcatccgccagtaccggccaggcaacgcctctccctgtcaccagtctctcctccgtctccacaggagatacaaccccattgcctgtgacttctccctcctccgcctccaccggccatgcgactccattgttggtcaccgatgcatcctccgcctccacaggtcaggctacacccctcccagttacatctttatcctcggtgagcactggggatacaacacctctgccagtgacatcaccatcctccgccagcactgggcacgcaacaagtttgcctgtgacggatacatccagcgccagcactggcgataccacatcccttcctgtgaccgatacttcgagcgcctacactggcgacacgacatccctgccggtgacagacacatcatcttcttccacaggtgacacaacacccttgctggtcaccgagacctcctcagtgtcaacaggccatgccacccctcttttggtgaccgacgccagtagcgcctcgacgggtcatgccaccccactacacgtgactagccctagctctgccagtaccggggatacaactccagtaccggtgacagacaccagcagcgtgtccacagggcacgcgacccccctgcccgtgacagggctgtctagtgccagtacaggcgatacaacccgcctgccggtcactgacatctcctctgcatcaaccgggcaagctacgcccttgccagttactaatacaagctcagtgtccacgggggataccatgcctttacccgtgacttccccttccagcgcctcaactggtcatgcgactcctttacccgtgacttccacgagtagcgcttcaaccgggcatgcaacccccgttccagtgacatcaacatcgtcggccagcaccggccacactacacctctgcccgtgacagacacaagttccgcctccacaggagacacgaccccacttccagtgacaagtccctcctcagcctcaacagggcacacgaccccacttcacgtgacaattccgtcatcagcctccaccggggacacatcaaccctgccagtgaccggcgccagttccgcgtctacgggacatgcaactccactaccagtgactgacactagttccgtatctaccggacatgcaactcccctccctgtcacctcgttgtcctcagtgtcgacgggcgatactactccacttccagtaacagacgcttctagcgcatcaactggccaggccaccccattgcctgtgacaagcctgagcagcgtcagcacaggagacaccacccctctgctcgtgacagacgcctctagcgtcagtacaggacacgccacacccttacccgtgacagacaccagttccgcctcaactggcgataccacaagattgccagtgacagacacttcaagcgccagcacaggccaagcgacgccattgccggttacctccctgagcagcgttagcactggcgacacgactcctctgctcgtaacagacgcgagtagtgtgtccacgggccacgccaccccattacccgtgaccgataccagcagcgcaagcacaggcgatacaactcgactacccgtgaccgacacaagctccgcctctaccggccaggcaactccacttcctgttacaatccccagcagtagcagtagtggccatacaactcccctgcccgtgacgtctacgtccagcgtgtccaccggccatgtaacacccctgcacgtcacatctccaagcagtgcttctactggccatgttacccctctgccagtgacgtctaccagctcagcgtctacaggacatgcaacacccctcctcgtcaccgatgcttcttctgtcagtacaggtcacgctactccactgcctgttactgacgcctctagtgctagcaccggcgacactactccgctgcctgtgacagacacatccagtgccagcacaggtcaagctacccccctccctgtcacctctctgagtagcgtcagcaccggagacacaacacccctccctgttaccgacgccagctctgctagcacaggtcatgccacgcctctccccgtgacgattcctagctcagtctcaaccggagatacaatgccgctgccagtcacgagtccaagtagtgcatctactggtcatgccaccccgttaccggtgaccggcttatcctcggcctccacaggggacaccacaccacttcctgtcaccgatactagctccgcaagtacccgtcatgctacaccattacccgtgactgatacctcttcagccagtaccgatgacaccacccgattacctgtgactgacgtgtcttccgcgtcaactggccatgccacccctctgcctgttacatccacatcctcagcctctaccggggataccacacctttaccagtcaccgacaccagtagcgtcagtactggacacgctactagtctccctgtgacttcacgatctagcgcctcaacaggccatgctacacccctgccggtgacagacacaagttccgttagtacagggcatgccactcctctgcccgtgacctccacctctagcgtgtccaccggccatgccacccccttgccagtgacaagcccctcctccgccagcaccggacatgctacaccagtgccagtgacatccacaagttccgcaagcactggggacaccacaccattaccagtcactaatgccagttcactgagtacaggccatgccacacccctacatgtgacaagcccctcatctgcgtccagaggggacacctctactctccctgtgactgacgctagctccgcgtccacgggtcacgctactcccctgcctctgaccagcctgtcgagcgtatctaccggcgacactacgccattgcctgtgacagacacaagctctgcatctaccggccaggccacacccctgcctgtgaccagcctgtcttccgtgagtacaggcgataccacgcccctgccagtgacaattccctccagcgccagcagcggccataccacatcacttccagtaacggatgcctcctccgtcagcactggccatgggactcctcttcctgttacatcaactagcagtgcaagcaccggagataccacccccctgccagtgaccgatactagctcggcaagtacaggccacgccacacccctgcccgtcacagacactagttctgcttcgaccgggcacgctacccctcttccagtgacttcactgtcctctgtctccacaggccacgcgacaccactcgctgttagctcagccacatctgcatctaccgtgtccagcgattctccactgaagatggagaccccaggcatgactacaccctccctgaaaactgatggtggccgtagaacagctacatccccgcctcccactactagccaaactatcatatctacaattccctccactgctatgcacaccaggtccacagctgcacctattcccattctgccagagcgaggtgtgagcctctttccatatggggccggagcgggggatctcgagttcgttcgacgcaccgttgacttcacttcccccctgttcaagcccgcaactgggttccccctcggctctagtctacgtgactccctgtacttcaccgacaatggtcagataatttttcccgagagcgattaccagattttttcctacccaaaccccctccccacaggctttaccggcagagacccagtcgccctggtcgcgcccttctgggatgatgctgattttagtacaggccgaggcactactttctaccaggagtacgaaactttctacggggaacactccttacttgttcaacaggccgaatcttggatcaggaagatgacaaataatgggggatacaaggcacgttgggcattgaaggttacttgggtgaatgcccacgcatacccagcccagtggacattggggtccaatacctaccaagcgattctgtcaaccgacggcagccggtcttacgccttgttcttgtaccagagtggaggcatgcagtgggacgtggcccaaaggtccggaaaccccgtactgatggggttttcatccggcgacggttacttcgagaactccccattgatgagtcaacctgtgtgggaacggtacaggcctgatagatttcttaatagtaatagtggactgcaaggcctgcagttttaccggctgcaccgagaggaacgccctaattatcggctggagtgcctgcagtggctcaaatctcagccccggtggcccagttggggctggaaccaagtgtcctgcccttgttcttggcagcaggggagaagggacttgcgattccaacccgtgagtatcgggcgatggggtttaggtagcagacagctgtgcagtttcactagctggaggggcggagtgtgttgcagctacggtccatggggggagttcagagaaggatggcatgtccagcgcccctggcaactggcccaggagctcgagccccaaagctggtgttgtcgctggaacgataagccatatttatgcgctctgtaccagcagagacggccacacgtggggtgtgccacctatcgccctccccaacccgcctggatgtttggggaccctcacattacgacattagatggtgtctcctatacctttaatgggttaggcgactttcttctggtgggagctcaggacgggaattcttccttccttctgcaggggcgtactgcccagacggggagtgctcaggcgactaacttcatcgccttcgctgcacagtaccgttcctcatctctgggcccggtgaccgtgcagtggctcctggaaccccacgatgccattagggttctgctggataaccagaccgtgactttccaaccagatcacgaagacggtgggggtcaggagacatttaatgccacaggtgtccttctgagtcgaaacggcagcgaagtgtctgcttcatttgacgggtgggccactgtctctgttatagcgctgtctaacattctccacgcctccgcgagcctgcccccagaatatcagaacaggaccgaggggttactgggcgtttggaacaataaccccgaggatgactttaggatgccaaatggttcaaccattccaccgggatctccggaggaaatgttattccatttcggtatgacttggcagattaacggcacgggcctcctcggcaagaggaacgaccaattgcccagtaactttacacctgtgttttactcgcagctccagaaaaactcttcctgggccgaacatctcatttctaactgtgatggggattcaagttgcatctatgacaccctcgcactgcgcaatgctagcatcgggctgcacaccagggaagtgtctaaaaattacgaacaagcaaacgcgaccctcaaccaatacccaccatccatcaatgggggaagagttatcgaggcttataagggccagacgaccctgatccagtacactagcaacgcagaggacgcaaatttcaccctgcgtgatagctgcacagacctggagctgttcgaaaatgggacgctcctttggacacctaagagcctcgagccatttacactggaaatcttagcccgctctgctaagattggattagcttccgcactacagccccgaacagtggtgtgccattgtaacgccgagtcccagtgcttgtataatcagacgtcacgtgtggggaattccagtttagaagtagctgggtgcaagtgtgacggcgggacttttggcaggtactgcgaagggtctgaggacgcctgcgaggaaccctgtttcccaagcgtgcactgcgttcccggcaagggctgtgaggcttgtcccccaaacctgactggagacgggaggcactgcgccgcccttgggtcttcttttctctgccagaaccagagctgtccggtgaattactgttataatcagggccactgctacatatcccagacactggggtgccagccaatgtgtacgtgcccaccagcctttacagattcgcgttgttttctggctggcaataatttcagccccacagtcaacctcgaactgcctctccgtgtaatccagctcctgttatccgaggaggagaatgcttctatggctgaagttaatgctagcgttgcctatcggctcggtactctggatatgagagccttcctgaggaattctcaggtcgagcgtatcgactccgcagctccagcaagcggctctccaatccagcactggatggtgatttctgaatttcaatatagacctcgtggccctgttatagacttccttaataaccagctgcttgcggccgtcgttgaggcgtttctttatcacgtaccacgacggagtgaggagccccgcaacgacgttgtattccagcctatcagtggcgaggacgtgagagacgttaccgcgttaaatgtgtcaaccctaaaggcatatttccgatgtgacggctataagggctacgacttagtgtactctccgcagagtggcttcacctgcgtgtccccatgtagtagagggtactgtgatcatggaggacagtgccaacatctgccttcaggtccgcgctgctcttgcgtcagcttctccatctacacagcctggggcgagcattgcgagcatttgtcaatgaagctggacgcattctttggtatcttcttcggggctctcggcggcctcctcctgctcggcgtggggacctttgtagtgttgcggttctggggctgctctggagcccggtttagttattttctgaacagcgctgaagcactgccatag

SEQ ID NO: 198244 - DNA, 16083 bp, Artificial Sequence
  derived and/or modified sequence
atgaagggtgcccggtggaggagggtaccatgggttagtctttcctgtttatgcctgtgtctgcttccacatgttgtgcccgggaccacagaagacactctgatcaccggatccaagacagccgctccagtgacaagtaccggcagcacaacggccacattagaagggcagtccacagcagccagtagcaggacctcaaaccaagacatcagcgcctcctcccagaatcaccagaccaaaagtaccgaaaccaccagtaaagctcagacagataccctgacccagatgatgacctccaccctgtttagtagcccaagtgtgcataacgtcatggagactgctccgccagacgagatgacaaccagcttcccatccagtgtcacaaacacccttatgatgactagtaagaccataaccatgacaacctctacggactctacactgggcaacactgaagagacatctacggcgggcactgagagttccacaccagtaacttcagccgtcagcattacggctgggcaggaagggcagagccgcacaacttcctggcgaaccagcattcaggacacaagtgcgtcaagccagaatcattggacccgctccacccaaacgacgcgtgagtctcaaaccagtacactgacccaccgtacaacttctacaccctctttttccccttcggtacataacgtcactgggaccgtaagtcagaaaacctcaccttccggggaaacagccacgtcgtccctctgttcagtgacgaacacatcaatgatgacctccgaaaaaattactgtgacaacctctactggctctacgctcgggaatcctggtgagacttccagtgtcccagtcacagggtccctgatgcccgtgacaagcgccgccctggttaccttcgaccccgaggggcaatccccggctaccttttctcgcaccagcactcaggatactaccgccttttctaaaaaccaccagacacaatctgtggagaccacgagagtgtctcagatcaacaccctcaacaccctgacgccagtgaccacaagtacagtgttaagtagcccgtcaggcttcaacccttccgggactgtatcccaggaaaccttcccatccggagaaactaccactagcagcccaagtagtgtgtcaaacacgtttctggtcacgtcaaaggtgtttcgtatgcccacaagccgagactcgaccctcggcaacaccgaagagacctctctgagcgtgagcgggacgatctccgctattacttctaaggtcagtactatatggtggtccgatacgctgtcaacagccctgtcaccttcgagtttaccccccaaaatcagtactgcattccatacacaacaatcggagggcgctgagaccacaggccgtccacacgagcgatcctcctttagcccaggggtttctcaggaaattttcaccttgcacgagactacgacctggcctagctcgttctcttctaagggccacactacgtggagccaaaccgagctcccctccaccagtactggggccgctactcgcttagtgaccggcaacccaagcacaggcacggccggtactataccacgagtgccctcaaaagtttcggctatcggggaaccaggagagccgaccacatacagcagccacagcacaacccttcctaagacgaccggggcaggagcacagacccagtggacccaagagacagggaccaccggggaggctctgctgtcatccccgtcgtattctgtgacccagatgattaaaacggccacgagcccatctagcagtcctatgctcgacaggcatacttcccagcaaataacaactgcccctagcactaaccactccaccatccatagcacgtctacttccccccaggaaagccctgccgtctcccaacggggacacacccaggctcctcaaacaacacaagagagccagactacgaggagcgtgtcaccaatgaccgataccaaaaccgtcactactcctggtagttcattcaccgcttccggacattccccatcagaaattgtaccccaggacgccccgaccatttccgcggccaccactttcgcccctgcaccaacaggtgacgggcatacgactcaggcccctaccacagcgttgcaagccgctccaagctcacatgacgctaccctaggccccagtggcggaacatcactgagtaaaaccggggccctgaccctcgctaatagcgtggtaagcacacccggagggccagagggtcagtggacctctgctagcgcctccacaagtccagacacagccgctgccatgacccacactcatcaggccgagtccaccgaggccagcgggcagacccagaccagtgaacccgcttcctccggttctcgaacgaccagcgcgggaacagctacccctagctcatcaggggcatcaggcactactcctagcggctccgagggaatctccacttctggtgagacaaccaggttttcttcaaatccatcccgagatagccataccacgcagagcaccaccgaactgctgagtgccagcgccagccacggggccatcccagtttctaccggaatggccagttcaattgtgcccggaaccttccatccaactctctctgaagccagtactgctggacggcccaccggacaatcctcccctaccagtccgtccgcttcacctcaggagacagccgccataagtcgcatggcccagacgcagaggacgagaaccagccgcggatcggacacgatttccctcgcaagccaggcaacagacacattctctacagtcccccccactccccccagcatcacaagtacaggactgactagtccacagaccgagacacatactctgagtccgtcaggcagcgggaagaccttcactacagccctcatttcgaatgcaaccccactccccgttacatacgctagctcggcctccacagggcacacaacacccctccacgtcaccgacgccagctcagtttcaaccggtcacgccacccccctgcccgttacttcccccagttccgtcagcacaggccataccacccctttacccgtaactgatacctccagcgagagcaccgggcacgttacacctctgcccgtcactagttttagcagcgccagcacaggtgactccacccccctgcctgtgacggacacctcctccgcctctaccggccacgtgacacctttgcctgtcacctcccttagtagtgcctccaccggagatacaaccccgctgcccgttacggataccagcagcgcatctaccggccacgcaacctctctccccgtcaccgacacctcctcagtgtccacaggccacaccacccccctccccgtgaccgatacgtcttccgctagtaccggccatgctacaagtcttccggtgaccgacacatcatccgtgtccactggccataccaccccccttcacgtgaccgacgcatcttcagcatcaaccggtcaagctacccctttgcccgtaacctccctgtcgtcagtgtcaacaggggacacaaccccactaccagtaacgagcccaagcagcgctagcacaggccacgcaaccccccttctcgtcacggacacaagctcagctagcacaggccatgcaacccccctgcctgtcacagatgcctctagcgtctcaaccgatcatgctactagcctccccgttaccattccttctgccgccagcaccgggcacactaccccactgcctgtcaccgacaccagctccgcttctaccggccaagcgacatcccttctagtgacggacacttccagcgtgtccacaggcgacactacccctctgcccgtgacaagcacatctagtgctagcactggccacgtgacacctcttcacgttacatctcctagtagtgcctccacaggacatgcaacacctttacccgttacctctctgagtagcgcttccaccggagacactatgccacttcctgttacgtcaccctcgtcggccagcaccggcgataccaccccattaccagtcaccgatgccagtagcgtgtccacgggccacacgacaccactgcacgtcacagacgcctcttccgcttctaccggacaggccaccccgttaccagtgacatcgctgtcttcagtgtcgacgggagacacaacccccctcccggtgactagtccttcctctgcgtcaactggccatgccaccccattactggtgacagatacatcaagcgcttcgaccgggcatgccactccactccctgttacagatgcctcatccgtcagcaccgaccacgccacttcccttcctgtaacgatcccttctgcggcgtcgaccggacatacaactccactgcctgtgaccgacacttctagcgcaagcaccggtcaggctacatccctcctggtgacggacacgtccagcgtttctacaggagacacaacgccacttcccgtcacttccacatcaagcgccagcaccggtcacgtcacccctctgcatgtgacctcgccaagctctgcctcgacagggcacgcaacgcccctccccgtgacatctctgtcatccgcctctaccggcgatactatgccactccccgtcacttcgcccagcagcgcctctactggagatacaacccccctgccagtgaccgacgccagctccgtgagcaccggtcacaccacacctctgcctgtaacttccccgagcagcgcctccaccgggcatacaacccccttacccgttacggacaccagttccgccagtaagggggacacgacccccctcccggtgacttcaccctcgtccgcttccaccgggcacacgacccctctgccggtgacagatacctcttcggcatcaaccggcgacaccacccctctgcctgtcacgaacgcctcaagtctgagcaccggtcacgctacccccctgcacgtcacaagcccatcgtccgcctccacaggacatgcgacaccactgcccgtgacatcaacgtcctctgcttccaccggccacgcaacacctctgcctgttacaggcctgtcatccgcaacaacggacgataccacccgcctcccagtaacggacgtatcctcagcgtcaactgggcaggccacacctctgcccgtgacgtctttgtcctcagtgagcactggtgataccactcctctcccagtcaccagtccttcttctgcatcaaccggccatgccagtcctctgttagttaccgacgccagttccgcatccaccgggcaggcgactccattgcctgtcacagacacttcttctgtgagcaccgcacacgcaacccctcttccagttacggggctgagctcagcctctaccgatgatactacaagattaccagtgaccgacgtgtctagcgccagcacgggacaggcaataccactgcccgtaaccagtccctcgtcagctagtacgggcgatactaccccactgcccgtcacggacgccagcagcgccagcaccggggacactactagtctccccgtaaccatcccgagctccgcatcatctggacacactacctcgctgccagtgacagatgctagttccgtatccactggccatgctacctcacttttagtcaccgatgcaagttcagtgagcaccggggatacaactccacttcccgttaccgacacgaacagcgcaagcaccggggacaccacgccacttcacgtgacagatgcctcgtcagtatcaacaggtcacgccacctctcttccggtgactagtctgagcagtgcatccacaggggatactaccccattgccagttactagtcccagctccgcatcttcggggcacaccactccactgccagtgacagacgcgtctagcgtcccaaccgggcacgccacttcgctccccgttactgatgcatcctcagtgtcgaccggacatgccaccccgctgcccgtcacagatgcttcatctgttagtaccggacacgcaacaccactgcccgtgactgacacaagctctgtgagcaccggccaagcgaccccactaccagtgacgtccctctccagtgcaagtactggagatacgacacccctgcctgtgacagacacctcatctgcctccaccggtcaggatacgcccctgcccgttacctccctgagttctgtctctacgggtgacaccactccccttcctgtaacaaatccatcctccgcgagtacaggccatgcaactcccctgctggtgactgatgctagctcgatcagtacaggacacgcaacgagcctgctggtcacagatgcgagctccgtaagcactgggcacgcaacagcactgcacgacactgacgcctccagcttgagcactggcgacacaacacctttgccggtgacctcgcctagtagcactagcactggcgatacaactcctttgcccgtcacagagaccagctctgtctccactgggcatgcgacatcattgcctgtcaccgacacatcttctgccagcactggacacgccaccagccttcccgtcactgatacctcatccgcctccaccggacacgctacgccactccccgtaaccgatacatcttctgccagtaccggacaggcaactcccctgcccgtcacatctccttctagtgcttccacaggtcatgctatcccgctgctggtgactgatacctcctcagcctcgaccggacaggctactcccctgcccgtcaccagtctgtccagtgcctctaccggagatacgactcctctgcctgtgacggacgcaagttcagtctctactggacacgcaacatcactgccagttacctcacttagttcagtctcgacaggggacaccacgccgttgcctgtcaccagcccatcttccgcatcgaccggccacgccacacccctccacgtcactgacgcctctagcgcgtctacaggacatgccacacctctaccagtaacttcactgtcttcagcaagcaccggcgataccacaccactgccggttacttccccctcatccgccagcactggccacgcaacaccgctccacgtaactgatgcgagctcagtgagcactggagacactacccctctgccggtgacttcaagtagctcagccagctctggccacactacgccacttcccgtaacagatgccagttccgctagtacgggggatacaactccgttaccagtgaccgataccagtagtgctagcacaggtcatgctacgcatttacccgtaacgggactgagctctgcaagcaccggcgacacaacccggcttccagtaactaacgtaagctctgcttccactggacatgccacccctctgcccgtaacttcaacgagttccgcctctactggggacaccacaccactccctggaacagataccagcagtgtaagcacaggccacaccactcccctcctcgtaaccgacgcctcgagcgtgagcacgggagatactacgagacttccagtgacgtcaccttccagcgcttcaacaggccatacaaccccactgcccgttaccgatacaccaagtgcaagcacaggggatactactcctttgcctgttacaaacgcttcctccttgtcaactaggcacgctaccagccttcatgtcacaagcccctcaagcgcaagcactgggcatgccacgtccttaccggttacggatacatccgccgcctcaacaggccatgccactccattgcctgtaaccagtacaagcagcgcctctactggcgatacaacccctctgcctgtaaccgatacatatagcgcgagtaccggtcaggcaaccccacttcctgtgacgtctctgtcaagtgtctcaacaggcgatactaccccgttacctgttacaagcccatccagtgcttcaacgggtcacgccacgccccttctcgtcacggacgcctcgagcgcttccaccgggcaagcaacaccactgcccgtgacttccctcagtagcgtgtctaccggcgataccactccactgccagtaacttccccttcatcagccagcacaggccatgcaactagtctacctgtgactgatacctcaagcgcctccactggcgatacaacctctctaccggtcacagatacatccagcgcctacaccggcgatacaactagtctccctgtcacagacacttcaagctcatctaccggagatacaacacccctgctcgtgactgagacttccagcgtgagtactggcgatactacacctctaccggtgaccgatacaagctcagcctccaccggccatgctaccccattacccgtaactaataccagtagtgtgtccactggccacgccacaccactgcacgtaacgagtccttcctccgcctccacgggacacacaacacctctccccgtgacagacgcatcttcagtgtccacgggccatgcaacttcactgccggtaaccgatgcttcttctgtctttaccgggcatgccacaagtttgcccgtgaccattccaagtagtgcatcatcggggcacaccacaccactgcctgtgaccgatgcctcaagcgtgtctactggacacgcaacttcattgcctgtgaccgatgcatcaagcgtgagcactgggcatgccacccccctacctgtgacagatgcaagctctgttagcaccggccacgccacccccttgcctttgaccagcttatcctctgtgagtactggggacacgactcctttgcccgtgacagatacgagttcagcgtccactgggcaggccacgccactgccggtcacctccctgtccagcgtaagtacgggagatacaacacctctcccagtcactgacacatctagtgcatctactggccatgccacatcgctccctgtgactgacacatcttctgctagcactggccatgccacaccattgccggacaccgacacctccagcgcttctaccggccacgcgacattgttacctgtaactgataccagcagcgcatccatcgggcatgccacatctctgcctgtgaccgacacgagctccatcagtacagggcatgctacgcctttacatgtgacatcacctagttctgcatcaactggtcacgccaccccactacccgtcactgacacctcatcagcgtcaaccggccatgccaaccccctgcacgttaccagcccttccagcgcttcaaccggccacgcaacgcccctgccagtgactgacacctctagtgcgtcaaccggtcacgccaccccattacctgtcacgtcactaagctcagtttcaactggagatacaactccgctgccagttacatcacccagctctgcaagcaccggtcacactaccccccttcccgttaccgatacttctagcgctagtacaggtcaggccacggcacttcccgtcacatccacaagcagtgcctctacgggtgatacaacacccctaccagtgacagatacgtcgtccgccagcacgggacaggctacgcctctgcccgtgacttctttaagcagcgtgtccacaggagacaccactcccctccccgtgacctctccatcatccgcctcaacagggcacgcgaccccgttgctggtgaccgatgcaagttccgctagtaccggtcaggctacccctctgccagtcacatccctgtcttcagtcagcacaggcgacacaaccccattgcccgttaccagtccatcttccgcctcaactgggcacgccacaagtctgcccgtcaccgacacctcctcggcgtctaccggagatacaacaagtctgcctgttacagatacgtcgtctgcttacaccggtgataccacgagcctgccagtcacagacacctccagctccagcacaggagacaccactcctctgctggtcaccgaaacctctagcgtgtcaacaggccacgcgacacccctccttgtgacagatgccagctccgcgtcaaccggccacgcaacccccctgcacgttacgtctccatcttccgcttcaaccggagacaccacaccagtaccagtgaccgatacttcgagtgtgtcaacaggtcatgctacaccgctgccagtgacagggctatcatcagcttctaccggcgacacaacaagactcccagtaaccgacatctcaagcgccagcacgggccaggccactcccctgcctgttaccaatactagctcagtatccaccggtgacactatgcccctccctgtcacttcgccttcatctgcgagtactggccatgccacccctctccccgtgacctccacatcatctgcatccaccggtcacgcaaccccggtccctgtgacttctactagttcagcaagcacaggccatacaactcccctgcctgtcactgacacgtccagtgcgtcgaccggtgatactacacccctgcccgttacgtctccaagtagcgcatctacaggacacaccacaccccttcacgttacaatccccagcagtgcctccaccggggacacaagcaccctgccagtcacgggcgctagcagtgccagcaccggccacgccacaccactgcctgtaacagacactagtagcgtcagcaccggacatgccacaccattgccggtcacttcactgagcagcgttagcaccggggacaccaccccacttcccgtgaccgatgctagcagtgcctctacgggccaggcaacaccccttccagtcacaagcctctcatccgtttcaacaggcgacacgacaccactgctggtcaccgatgccagtagcgtgtctaccggccatgccacgcccctgcctgtaacggataccagcagtgcgtctactggagacactacccgccttcccgtgacggacactagcagcgcatcgacaggccaagcaactcccctcccggtgacctctctatcctctgtgtcaactggcgacacaactcctctgcttgtgacagatgcgagctcagtgagcaccggccatgccacaccactccctgtcactgatacgagcagcgcctccaccggcgataccacccgactgcccgtgactgacacatcgtctgccagcacgggacaagctacccctttacctgtgaccattcctagcagctctagttcaggccacactacaccactccccgtgacaagtaccagctccgttagcactggacacgtcacaccgctgcatgtgacctctccgagctctgcgtcaacgggccacgtcacccccttacccgttactagcactagctccgcctcaactggacacgccactcctctgcttgttacagacgcttctagcgttagtaccggacacgccactcctctcccggtgaccgacgcttcatcagcctcaacaggagataccaccccgcttcctgtcaccgacacttcctcagcctccacaggacaagccacgccccttccggtgacttctctgagttccgtgagtaccggcgacacaactccgcttcccgtcactgatgcttcctcggcatcaacaggacacgccacccccctgcctgtgacgattccaagctcagtgtctacaggggacaccatgcctctacccgtgacctctccctctagcgcaagcactggtcacgcgactccattgcccgtcaccggtctgtccagcgcaagcaccggcgacaccaccccacttccagtgactgataccagtagcgccagcacccgccacgccacacctctgccagtcaccgatactagttctgcatctaccgacgacacaacccggcttccagtgaccgacgtgagtagcgcgagcactggccatgccactcccctacccgtcacaagcaccagctctgcatccaccggcgacactacccccttgcctgttaccgatacatcttccgtgtcaacgggacacgcgacctccctgcctgtcacctctcgttcctctgcctctactggtcatgccacccctctgcccgtgacagatacgtcgagcgtcagcaccggacacgcaactcccctaccagtcacttctacgtcaagcgttagtacagggcacgcgaccccactcccagtcacatcaccgtcatccgccagtacaggtcacgccacccctgtgccagtgacctcaactagtagcgcctcaaccggagataccacccctctgcccgtaaccaatgcatcttcgctctctacaggccacgcgacacctttacacgtgacttctcctagtagcgcttcccgaggtgacacaagcacgttacccgtgactgacgcaagctccgcatcaacaggacacgcgacccctctcccacttacaagcctttcttcagtgagcactggagataccacgccgcttccggtaacagatactagttccgccagcaccgggcaggccacacccctgccagttacgagcctctcatcggtgagtacgggcgatactacacctctgcccgtgacaatccctagcagcgcgagctcaggccatacaacctctttgcccgtgactgacgcgtccagtgttagcactggacatggcactcctctgccagtgacgtctacctcttctgcctctacaggcgacacgactccgctgcccgtgaccgatacctccagcgcctccaccggccacgccacaccactacctgtcacagacactagctccgccagtacgggtcatgccactcctctgcccgtgacatcgctgtccagcgtgagcacaggacacgctacacccctagcagtgagcagcgctacttctgccagcaccgtgtctagtgatagcccactgaagatggagacccctggaatgacaacgccctcgctgaaaacagatggtggccgcaggactgcgacctccccgccgcctaccacgtcccagaccattattagcaccataccctctacagcaatgcacaccagaagcacagctgccccgattcctatccttccagagagaggagtgagcctgttcccttacggagctggagcaggagacctggagttcgttagacggacagttgactttacatcacccctgttcaagcccgcaaccggattcccactaggaagctccttaagggactcactctattttacagacaacggacaaatcatattccctgaatccgactatcagattttttcgtaccctaatcccctgcccacaggatttactgggagagatccagtcgccctggtggcccctttttgggacgatgccgacttctccacaggccgtgggacaaccttttaccagagtaatacttaccaggccattcttagcacagatgggagtcgcagctatgccttgttcctctaccagagcggtggaatgcagtgggatgtcgctcaacgcagtggaaatcccgtgctaatggggttcagcagtggagacggttactttgaaaacagtccgcttatgtctcagcctgtctgggagagatacaggcctgaccggtttctcaattcaaattcggggcttcagggactgcagttttaccggctccaccgtgaggagcggcctaactacaggctcgagtgtttgcagtggttgaagtcgcagccgcggtggccttcctggggatggaatcaagtctcgtgcccttgctcttggcagcagggccgcagggacctgaggtttcagccagttagtatcgggcgatgggggctgggcagtcggcagctttgtagctttacaagctggagggggggggtgtgctgctcctacggaccttggggggaattcagagaggggtggcacgtgcagcgtccctggcaactggcccaagaactggaaccccagtcatggtgctgtaggtggaatgacaagccctacctgtgcgctctgtatcagcagcggcgccctcacgtgggctgcgctacttatcgccctccacagcccgcctggatgtttggagaccctcacatcaccactttggatggcgtgagttatacttttaacgggctcggggactttctcttggtgggagctcaggatggcaactcttcctttttgctgcaaggaagaaccgctcagaccgggtcggcccaggcaactaacttcattgcctttgcggctcagtacaggagttccagcctgggcccggtcactgtgcagtggctgcttgagccccacgacgcaataagggttctcctggacaatcaaaccgtgaccttccagcctgatcacgaagacggagggggacaggaaactttcaacgcgactggggtgctgctcagtcgtaatggctctgaagtgagcgcatcttttgacggctgggctacagtgtccgttattgctctttcaaatattctgcatgcttccgccagcctgcctcctgaatatcagaaccgcaccgaaggccttctgggggtctggaacaacaaccctgaggacgactttcgcatgcctaatggctctacaattcctccaggctctcctgaggagatgttatttcactttgggatgacttggcagattaacgggaccggactcctgggtaaacggaacgaccaattgccgtctaacttcacacctgtgttctatagccaactccagaaaaattcctcgtgggcagagcacctgattagcaattgcgatggtgattcaagctgtatctacgacaccctggcattacgcaatgccagtattggtttgcacactcgtgaggtgagtaagaactacgagcaagccaatgcgacgttaaatcagtatcctccaagcattaacggcggcagggtgattgaagcttataagggacagacaacccttatccagtatacaagcaacgccgaggatgctaactttacgctgagagacagttgcacagacctggaactgtttgaaaacggcacattgctttggacgccaaagtctctggaaccgtttacccttgagatcctcgcccgtagtgccaagataggacttgcgagtgcactgcaaccgcgaacagtggtgtgccactgtaatgccgagagtcagtgcctgtataaccagacctcacgggtggggaacagcagcctcgaggttgcgggatgtaagtgcgacggcgggacatttggacgatattgtgaaggctcggaggacgcatgcgaggagccttgtttccctagcgtacattgcgtgccaggaaaaggatgtgaggcctgtcctcccaatctcacaggagatggtaggcattgcgccgcactgggttcaagcttcctctgtcagaaccagagctgccccgtcaattactgctacaatcagggccactgctacatctctcagaccctgggatgtcaacccatgtgcacatgtcctccggctttcactgactccagatgcttcctggcggggaataacttttcaccaactgtgaatctagagttgcccctgagagtgattcagctgttgctgtctgaggaagaaaacgccagcatggcagaagtgaacgctagtgtggcatacagattgggtacgctggacatgagagcctttctacgcaacagtcaggtggagcggatcgactccgccgctcctgcgtcgggatcaccaatccagcactggatggtcatctctgaatttcaatacagaccgcgggggcctgtgattgactttttaaataatcaactccttgccgccgtggtcgaggcctttttgtatcatgtgcccagacggtcagaagaacctcgcaacgatgttgttttccaaccaatatccggagaggatgtccgcgacgtgactgctctcaatgtgtctacacttaaggcatatttccgctgtgacggatacaaaggatatgacctggtgtacagccctcagagtgggtttacatgtgtgtccccctgttctaggggatattgcgatcacggtggtcagtgtcaacatttgccatcagggcctcgatgctcgtgtgtttcattcagcatctacacagcatggggtgagcattgtgagcacttgagcatgaaactagacgcgttcttcgggatttttttcggagccctaggcgggttacttctcctcggcgtggggacattcgttgtacttcgcttttggggatgtagtggcgctaggttctcttattttttgaactcagcagaagcgctgccctag

SEQ ID NO: 198245 - DNA, 5739 bp, Artificial Sequence
  derived and/or modified sequence
cctggcaccacagaggacaccctcatcaccggcagcaagacagctgcccctgtgaccagcacaggcagcaccacagccaccctggagggccagagcacagctgccagcagcaggaccagcaaccaggacatcagcgccagcagccagaaccaccagaccaagagcacagagaccaccagcaaggcccagacagacaccctgacccagatgatgaccagcaccctcttcagcagccccagcgtgcacaacgtgatggagacagcccccccagatgagatgaccaccagcttccccagctctgtgaccaacaccctgatgatgaccagcaagaccatcaccatgaccaccagcacagacagcaccctgggcaacacagaggagaccagcacagctggaacagagagcagcacccctgtgaccagcgctgtgtccatcacagctggccaggagggccagagcaggaccacctcctggaggaccagcatccaggacaccagcgccagcagccagaaccactggaccaggagcacccagaccacccgggagagccagaccagcaccctgacccacaggaccaccagcacccccagcttcagccccagcgtgcacaacgtgacaggcaccgtgtcccagaagaccagccccagcggggagacagccaccagcagcctgtgcagcgtgaccaacacctccatgatgaccagcgagaagatcaccgtgaccaccagcacaggcagcaccctgggcaaccctggagagaccagctctgtgcctgtgacaggcagcctgatgcctgtgaccagcgctgccctggtgacctttgatcctgagggccagagccctgccaccttcagcaggaccagcacccaggacaccacagccttcagcaagaaccaccagacccagagcgtggagaccaccagggtgtcccagatcaacaccctgaacaccctgacccctgtgaccaccagcacagtgctgagcagccccagcggcttcaaccccagcggcaccgtgtcccaggagaccttccccagcggggagaccaccaccagcagccccagctctgtgagcaacaccttcctggtgaccagcaaggtgttcaggatgcccaccagccgggacagcaccctgggcaacacagaggagaccagcctgtctgtgtctggcaccatcagcgccatcaccagcaaggtgtccaccatctggtggagcgacaccctgagcacagccctgagccccagcagcctgccccccaagatcagcacagccttccacacccagcagagcgagggcgctgagaccaccggccggccccatgagaggagcagcttcagccctggggtgtcccaggagatcttcaccctgcacgagaccaccacctggcccagcagcttcagcagcaagggccacaccacctggagccagacagagctgcccagcaccagcactggagctgccacccggctggtgacaggcaaccccagcactggaacagctggcaccatcccccgggtgcccagcaaggtgtctgccatcggggagcccggggagcccaccacctacagcagccacagcaccaccctgcccaagaccactggagctggggcccagacccagtggacccaggagaccggcaccaccggggaggccctgctgagcagccccagctacagcgtgacccagatgatcaagacagccaccagccccagcagcagccccatgctggacagacacaccagccagcagatcaccacagcccccagcaccaaccacagcaccatccacagcaccagcaccagcccccaggagagccctgctgtgtcccagaggggccacacccaggccccccagaccacccaggagagccagaccaccaggtctgtgagccccatgacagacaccaagacagtgaccaccccaggcagcagcttcaccgccagcggccacagccccagcgagatcgtgccccaggatgcccccaccatctctgctgccaccacctttgccccagcccccactggagatggccacaccacccaggcccccaccacagccctgcaggccgcccccagcagccatgatgccaccctgggccccagcggcggcaccagcctgagcaagacaggagccctgaccctggccaacagcgtggtgtccacccctgggggccctgagggccagtggaccagcgccagcgccagcaccagcccagacacagctgctgccatgacccacacccaccaggccgagagcacagaggccagcggccagacccagaccagcgagcccgccagcagcggcagcaggaccaccagcgctggaacagccacccccagcagcagcggggccagcggcaccacccccagcggcagcgagggcatcagcaccagcggggagaccacccgcttcagcagcaaccccagccgggacagccacaccacccagagcaccacagagctgctgagcgccagcgccagccacggggccatccctgtgtccacaggcatggccagcagcatcgtgcccggcaccttccaccccaccctgtctgaggccagcacagctggccggcccaccggccagagcagccccaccagccccagcgccagcccccaggagacagctgccatcagcaggatggcccagacccagaggaccaggaccagccggggcagtgacaccatcagcctggccagccaggccacagacaccttcagcacagtgccccccaccccacccagcatcaccagcacaggcctgaccagcccccagacagagacccacaccctgagccccagcggcagcggcaagaccttcaccacagccctgatcagcaatgccacccccctgcctgtgacctacgccagcagcgccagcactggacatgccacccccctggccgtgtcctctgccaccagcgccagcacagtgtccagtgacagccccctgaagatggagaccccaggcatgaccacccccagcctgaagacagatggcggccgcaggacagccaccagccccccacccaccaccagccagaccatcatcagcaccatccccagcacagccatgcacaccaggagcacagctgcccccatccccatcctgcctgagcggggcgtgtccctcttcccctatggagctggagctggggacctggagtttgtgcggaggacagtggacttcaccagccccctcttcaagccagccaccggcttccccctgggcagcagcctgcgggacagcctgtacttcacagacaatggccagatcatcttccctgagagtgactaccagatcttctcctaccccaaccccctgcccaccggcttcaccggccgggaccctgtggccctggtggcccccttctgggatgatgctgacttcagcacaggccggggcaccaccttctaccaggagtatgagaccttctacggggagcacagcctgctggtgcagcaggccgagagctggatcaggaagatgaccaacaacggcggctacaaggcccgctgggccctgaaggtgacctgggtgaatgcccacgcctacccagcccagtggaccctgggcagcaacacctaccaggccatcctgagcacagatggcagccgctcctatgccctcttcctgtaccagagcggcggcatgcagtgggatgtggcccagaggagcggcaaccctgtgctgatgggcttcagcagtggagatggctactttgagaacagccccctgatgagccagcctgtgtgggagcgctacagaccagaccgcttcctgaacagcaacagcggcctgcagggcctgcagttctaccgcctgcaccgggaggagcggcccaactaccgcctggagtgcctgcagtggctgaagagccagccccgctggcccagctggggctggaaccaggtgtcctgcccctgctcctggcagcagggcagaagagacctgcgcttccagcctgccagcctgcccccagagtaccagaacagaacagagggcctgctgggcgtgtggaacaacaacccagaagatgacttcaggatgcccaacggcagcaccatccccccaggcagccctgaggagatgctgttccacttcggcatgacctggcagatcaatggaacaggcctgctgggcaagagaaatgaccagctgcccagcaacttcacccctgtgttctacagccagctgcagaagaacagctcctgggccgagcacctgatcagcaactgtgatggagacagcagctgcatctatgacaccctggccctgagaaatgccagcatcggcctgcacacccgggaggtgtccaagaactatgagcaggccaatgccaccctgaaccagtacccacccagcatcaatggaggccgggtcatcgaggcctacaagggccagaccaccctcatccagtacaccagcaatgcagaagatgccaacttcaccctgcgggacagctgcacagacctggagctgtttgaaaatggcaccctgctgtggacccccaagagcctggagcccttcaccctggagatcctggcccggagcgccaagattggcctggccagcgccctgcagcccaggacagtggtgtgccactgcaatgctgagagccagtgcctgtacaaccagaccagccgggtgggcaacagcagcctggaggtggccggctgcaagtgtgatggcggcaccttcggccgctactgtgagggctctgaagatgcctgtgaggagccctgcttccccagcgtgcactgtgtgcctgggaagggctgtgaggcctgcccccccaacctgactggagatggccgccactgtgccgccctgggcagcagcttcctgtgccagaaccagagctgccctgtgaactactgctacaaccagggccactgctacatcagccagaccctgggctgccagcccatgtgcacctgccccccagccttcacagacagccgctgcttcctggccggcaacaacttcagccccaccgtgaacctggagctgcccctgcgggtcatccagctgctgctgtctgaggaggagaatgcctccatggccgaggtgaatgcctctgtggcctaccgcctgggcaccctggacatgagggccttcctgaggaacagccaggtggagagaattgacagcgctgccccagccagcggcagccccatccagcactggatggtgatcagcgagttccagtaccggccccggggccctgtgattgacttcctgaacaaccagctgctggccgctgtggtggaggccttcctgtaccacgtgccccggcgctctgaggagcccagaaatgatgtggtgttccagcccatctctggagaagatgtgagagatgtgacagccctgaatgtgtccaccctgaaggcctacttccgctgtgatggctacaagggctatgacctggtgtacagcccccagagcggcttcacctgtgtgagcccctgcagccggggctactgtgaccatggaggccagtgccagcacctgcccagcggcccccgctgcagctgtgtgtccttcagcatctacacagcctggggcgagcactgtgagcacctgtccatgaagctggatgccttcttcggcatcttcttcggggccctgggcggcctgctgctgctgggcgtgggcacctttgtggtgctgcgcttctggggctgcagcggggcccgcttctcctacttcctgaacagcgctgaggccctgccctag

SEQ ID NO: 198246 - DNA, 16239 bp, Artificial Sequence
  derived and/or modified sequence
atgaagggggcccgctggaggagagtgccctgggtgtccctgagctgcctgtgcctgtgcctgctgccccacgtggtgcccggcaccacagaggacaccctcatcaccggcagcaagacagctgcccctgtgaccagcacaggcagcaccacagccaccctggagggccagagcacagctgccagcagcaggaccagcaaccaggacatcagcgccagcagccagaaccaccagaccaagagcacagagaccaccagcaaggcccagacagacaccctgacccagatgatgaccagcaccctcttcagcagccccagcgtgcacaacgtgatggagacagcccccccagatgagatgaccaccagcttccccagctctgtgaccaacaccctgatgatgaccagcaagaccatcaccatgaccaccagcacagacagcaccctgggcaacacagaggagaccagcacagctggaacagagagcagcacccctgtgaccagcgctgtgtccatcacagctggccaggagggccagagcaggaccacctcctggaggaccagcatccaggacaccagcgccagcagccagaaccactggaccaggagcacccagaccacccgggagagccagaccagcaccctgacccacaggaccaccagcacccccagcttcagccccagcgtgcacaacgtgacaggcaccgtgtcccagaagaccagccccagcggggagacagccaccagcagcctgtgcagcgtgaccaacacctccatgatgaccagcgagaagatcaccgtgaccaccagcacaggcagcaccctgggcaaccctggagagaccagctctgtgcctgtgacaggcagcctgatgcctgtgaccagcgctgccctggtgacctttgatcctgagggccagagccctgccaccttcagcaggaccagcacccaggacaccacagccttcagcaagaaccaccagacccagagcgtggagaccaccagggtgtcccagatcaacaccctgaacaccctgacccctgtgaccaccagcacagtgctgagcagccccagcggcttcaaccccagcggcaccgtgtcccaggagaccttccccagcggggagaccaccaccagcagccccagctctgtgagcaacaccttcctggtgaccagcaaggtgttcaggatgcccaccagccgggacagcaccctgggcaacacagaggagaccagcctgtctgtgtctggcaccatcagcgccatcaccagcaaggtgtccaccatctggtggagcgacaccctgagcacagccctgagccccagcagcctgccccccaagatcagcacagccttccacacccagcagagcgagggcgctgagaccaccggccggccccatgagaggagcagcttcagccctggggtgtcccaggagatcttcaccctgcacgagaccaccacctggcccagcagcttcagcagcaagggccacaccacctggagccagacagagctgcccagcaccagcactggagctgccacccggctggtgacaggcaaccccagcactggaacagctggcaccatcccccgggtgcccagcaaggtgtctgccatcggggagcccggggagcccaccacctacagcagccacagcaccaccctgcccaagaccactggagctggggcccagacccagtggacccaggagaccggcaccaccggggaggccctgctgagcagccccagctacagcgtgacccagatgatcaagacagccaccagccccagcagcagccccatgctggacagacacaccagccagcagatcaccacagcccccagcaccaaccacagcaccatccacagcaccagcaccagcccccaggagagccctgctgtgtcccagaggggccacacccaggccccccagaccacccaggagagccagaccaccaggtctgtgagccccatgacagacaccaagacagtgaccaccccaggcagcagcttcaccgccagcggccacagccccagcgagatcgtgccccaggatgcccccaccatctctgctgccaccacctttgccccagcccccactggagatggccacaccacccaggcccccaccacagccctgcaggccgcccccagcagccatgatgccaccctgggccccagcggcggcaccagcctgagcaagacaggagccctgaccctggccaacagcgtggtgtccacccctgggggccctgagggccagtggaccagcgccagcgccagcaccagcccagacacagctgctgccatgacccacacccaccaggccgagagcacagaggccagcggccagacccagaccagcgagcccgccagcagcggcagcaggaccaccagcgctggaacagccacccccagcagcagcggggccagcggcaccacccccagcggcagcgagggcatcagcaccagcggggagaccacccgcttcagcagcaaccccagccgggacagccacaccacccagagcaccacagagctgctgagcgccagcgccagccacggggccatccctgtgtccacaggcatggccagcagcatcgtgcccggcaccttccaccccaccctgtctgaggccagcacagctggccggcccaccggccagagcagccccaccagccccagcgccagcccccaggagacagctgccatcagcaggatggcccagacccagaggaccaggaccagccggggcagtgacaccatcagcctggccagccaggccacagacaccttcagcacagtgccccccaccccacccagcatcaccagcacaggcctgaccagcccccagacagagacccacaccctgagccccagcggcagcggcaagaccttcaccacagccctgatcagcaatgccacccccctgcctgtgacctacgccagcagcgccagcacaggccacaccacccccctgcacgtgacagatgccagctctgtgtccactggacatgccacccccctgcctgtgaccagccccagctctgtgtccacaggccacaccacccccctgcctgtgacagacaccagcagcgagagcactggacatgtgacccccctgcctgtgaccagcttcagcagcgccagcactggagacagcacccccctgcctgtgacagacaccagcagcgccagcactggacatgtgacccccctgcctgtgaccagcctgagcagcgccagcactggagacaccacccccctgcctgtgacagacaccagcagcgccagcactggacatgccaccagcctgcctgtgacagacaccagctctgtgtccacaggccacaccacccccctgcctgtgacagacaccagcagcgccagcactggacatgccaccagcctgcctgtgacagacaccagctctgtgtccacaggccacaccacccccctgcacgtgacagatgccagcagcgccagcacaggccaggccacccccctgcctgtgaccagcctgagctctgtgtccactggagacaccacccccctgcctgtgaccagccccagcagcgccagcactggacatgccacccccctgctggtgacagacaccagcagcgccagcactggacatgccacccccctgcctgtgacagatgccagctctgtgtccacagaccacgccaccagcctgcctgtgaccatccccagcgctgccagcacaggccacaccacccccctgcctgtgacagacaccagcagcgccagcacaggccaggccaccagcctgctggtgacagacaccagctctgtgtccactggagacaccacccccctgcctgtgaccagcaccagcagcgccagcactggacatgtgacccccctgcacgtgaccagccccagcagcgccagcactggacatgccacccccctgcctgtgaccagcctgagcagcgccagcactggagacaccatgcccctgcctgtgaccagccccagcagcgccagcactggagacaccacccccctgcctgtgacagatgccagctctgtgtccacaggccacaccacccccctgcacgtgacagatgccagcagcgccagcacaggccaggccacccccctgcctgtgaccagcctgagctctgtgtccactggagacaccacccccctgcctgtgaccagccccagcagcgccagcactggacatgccacccccctgctggtgacagacaccagcagcgccagcactggacatgccacccccctgcctgtgacagatgccagctctgtgtccacagaccacgccaccagcctgcctgtgaccatccccagcgctgccagcacaggccacaccacccccctgcctgtgacagacaccagcagcgccagcacaggccaggccaccagcctgctggtgacagacaccagctctgtgtccactggagacaccacccccctgcctgtgaccagcaccagcagcgccagcactggacatgtgacccccctgcacgtgaccagccccagcagcgccagcactggacatgccacccccctgcctgtgaccagcctgagcagcgccagcactggagacaccatgcccctgcctgtgaccagccccagcagcgccagcactggagacaccacccccctgcctgtgacagatgccagctctgtgtccacaggccacaccacccccctgcctgtgaccagccccagcagcgccagcacaggccacaccacccccctgcctgtgacagacaccagcagcgccagcaaaggagacaccacccccctgcctgtgaccagccccagcagcgccagcacaggccacaccacccccctgcctgtgacagacaccagcagcgccagcactggagacaccacccccctgcctgtgaccaatgccagcagcctgagcactggacatgccacccccctgcacgtgaccagccccagcagcgccagcactggacatgccacccccctgcctgtgaccagcaccagcagcgccagcactggacatgccacccccctgcctgtgacaggcctgagcagcgccaccacagatgacaccacccggctgcctgtgacagatgtgagcagcgccagcacaggccaggccacccccctgcctgtgaccagcctgagctctgtgtccactggagacaccacccccctgcctgtgaccagccccagcagcgccagcactggacatgccagccccctgctggtgacagatgccagcagcgccagcacaggccaggccacccccctgcctgtgacagacaccagctctgtgtccacagcccacgccacccccctgcctgtgacaggcctgagcagcgccagcacagatgacaccacccggctgcctgtgacagatgtgagcagcgccagcacaggccaggccatccccctgcctgtgaccagccccagcagcgccagcactggagacaccacccccctgcctgtgacagatgccagcagcgccagcactggagacaccaccagcctgcctgtgaccatccccagcagcgccagcagcggccacaccaccagcctgcctgtgacagatgccagctctgtgtccactggacatgccaccagcctgctggtgacagatgccagctctgtgtccactggagacaccacccccctgcctgtgacagacaccaacagcgccagcactggagacaccacccccctgcacgtgacagatgccagctctgtgtccactggacatgccaccagcctgcctgtgaccagcctgagcagcgccagcactggagacaccacccccctgcctgtgaccagccccagcagcgccagcagcggccacaccacccccctgcctgtgacagatgccagctctgtgcccactggacatgccaccagcctgcctgtgacagatgccagctctgtgtccactggacatgccacccccctgcctgtgacagatgccagctctgtgtccactggacatgccacccccctgcctgtgacagacaccagctctgtgtccacaggccaggccacccccctgcctgtgaccagcctgagcagcgccagcactggagacaccacccccctgcctgtgacagacaccagcagcgccagcacaggccaggacacccccctgcctgtgaccagcctgagctctgtgtccactggagacaccacccccctgcctgtgaccaaccccagcagcgccagcactggacatgccacccccctgctggtgacagatgccagcagcatcagcactggacatgccaccagcctgctggtgacagatgccagctctgtgtccactggacatgccacagccctgcatgacacagatgccagcagcctgagcactggagacaccacccccctgcctgtgaccagccccagcagcaccagcactggagacaccacccccctgcctgtgacagagaccagctctgtgtccactggacatgccaccagcctgcctgtgacagacaccagcagcgccagcactggacatgccaccagcctgcctgtgacagacaccagcagcgccagcactggacatgccacccccctgcctgtgacagacaccagcagcgccagcacaggccaggccacccccctgcctgtgaccagccccagcagcgccagcactggacatgccatccccctgctggtgacagacaccagcagcgccagcacaggccaggccacccccctgcctgtgaccagcctgagcagcgccagcactggagacaccacccccctgcctgtgacagatgccagctctgtgtccactggacatgccaccagcctgcctgtgaccagcctgagctctgtgtccactggagacaccacccccctgcctgtgaccagccccagcagcgccagcactggacatgccacccccctgcacgtgacagatgccagcagcgccagcactggacatgccacccccctgcctgtgaccagcctgagcagcgccagcactggagacaccacccccctgcctgtgaccagccccagcagcgccagcactggacatgccacccccctgcacgtgacagatgccagctctgtgtccactggagacaccacccccctgcctgtgaccagcagcagcagcgccagcagcggccacaccacccccctgcctgtgacagatgccagcagcgccagcactggagacaccacccccctgcctgtgacagacaccagcagcgccagcactggacatgccacccacctgcctgtgacaggcctgagcagcgccagcactggagacaccacccggctgcctgtgaccaacgtgagcagcgccagcactggacatgccacccccctgcctgtgaccagcaccagcagcgccagcactggagacaccacccccctgcccggcacagacaccagctctgtgtccacaggccacaccacccccctgctggtgacagatgccagctctgtgtccactggagacaccacccggctgcctgtgaccagccccagcagcgccagcacaggccacaccacccccctgcctgtgacagacacccccagcgccagcactggagacaccacccccctgcctgtgaccaatgccagcagcctgagcaccaggcatgccaccagcctgcacgtgaccagccccagcagcgccagcactggacatgccaccagcctgcctgtgacagacaccagcgctgccagcactggacatgccacccccctgcctgtgaccagcaccagcagcgccagcactggagacaccacccccctgcctgtgacagacacctacagcgccagcacaggccaggccacccccctgcctgtgaccagcctgagctctgtgtccactggagacaccacccccctgcctgtgaccagccccagcagcgccagcactggacatgccacccccctgctggtgacagatgccagcagcgccagcacaggccaggccacccccctgcctgtgaccagcctgagctctgtgtccactggagacaccacccccctgcctgtgaccagccccagcagcgccagcactggacatgccaccagcctgcctgtgacagacaccagcagcgccagcactggagacaccaccagcctgcctgtgacagacaccagcagcgcctacacaggagacaccaccagcctgcctgtgacagacaccagcagcagcagcactggagacaccacccccctgctggtgacagagaccagctctgtgtccactggagacaccacccccctgcctgtgacagacaccagcagcgccagcactggacatgccacccccctgcctgtgaccaacaccagctctgtgtccactggacatgccacccccctgcacgtgaccagccccagcagcgccagcacaggccacaccacccccctgcctgtgacagatgccagctctgtgtccactggacatgccaccagcctgcctgtgacagatgccagcagcgtcttcaccggccacgccaccagcctgcctgtgaccatccccagcagcgccagcagcggccacaccacccccctgcctgtgacagatgccagctctgtgtccactggacatgccaccagcctgcctgtgacagatgccagctctgtgtccactggacatgccacccccctgcctgtgacagatgccagctctgtgtccactggacatgccacccccctgcccctgaccagcctgagctctgtgtccactggagacaccacccccctgcctgtgacagacaccagcagcgccagcacaggccaggccacccccctgcctgtgaccagcctgagctctgtgtccactggagacaccacccccctgcctgtgacagacaccagcagcgccagcactggacatgccaccagcctgcctgtgacagacaccagcagcgccagcactggacatgccacccccctgcctgacacagacaccagcagcgccagcactggacatgccaccctgctgcctgtgacagacaccagcagcgccagcattggacatgccaccagcctgcctgtgacagacaccagcagcatcagcactggacatgccacccccctgcacgtgaccagccccagcagcgccagcactggacatgccacccccctgcctgtgacagacaccagcagcgccagcactggacatgccaaccccctgcacgtgaccagccccagcagcgccagcactggacatgccacccccctgcctgtgacagacaccagcagcgccagcactggacatgccacccccctgcctgtgaccagcctgagctctgtgtccactggagacaccacccccctgcctgtgaccagccccagcagcgccagcacaggccacaccacccccctgcctgtgacagacaccagcagcgccagcacaggccaggccacagccctgcctgtgaccagcaccagcagcgccagcactggagacaccacccccctgcctgtgacagacaccagcagcgccagcacaggccaggccacccccctgcctgtgaccagcctgagctctgtgtccactggagacaccacccccctgcctgtgaccagccccagcagcgccagcactggacatgccacccccctgctggtgacagatgccagcagcgccagcacaggccaggccacccccctgcctgtgaccagcctgagctctgtgtccactggagacaccacccccctgcctgtgaccagccccagcagcgccagcactggacatgccaccagcctgcctgtgacagacaccagcagcgccagcactggagacaccaccagcctgcctgtgacagacaccagcagcgcctacacaggagacaccaccagcctgcctgtgacagacaccagcagcagcagcactggagacaccacccccctgctggtgacagagaccagctctgtgtccactggacatgccacccccctgctggtgacagatgccagcagcgccagcactggacatgccacccccctgcacgtgaccagccccagcagcgccagcactggagacaccacccctgtgcctgtgacagacaccagctctgtgtccactggacatgccacccccctgcctgtgacaggcctgagcagcgccagcactggagacaccacccggctgcctgtgacagacatcagcagcgccagcacaggccaggccacccccctgcctgtgaccaacaccagctctgtgtccactggagacaccatgcccctgcctgtgaccagccccagcagcgccagcactggacatgccacccccctgcctgtgaccagcaccagcagcgccagcactggacatgccacccctgtgcctgtgaccagcaccagcagcgccagcacaggccacaccacccccctgcctgtgacagacaccagcagcgccagcactggagacaccacccccctgcctgtgaccagccccagcagcgccagcacaggccacaccacccccctgcacgtgaccatccccagcagcgccagcactggagacaccagcaccctgcctgtgactggagccagcagcgccagcactggacatgccacccccctgcctgtgacagacaccagctctgtgtccactggacatgccacccccctgcctgtgaccagcctgagctctgtgtccactggagacaccacccccctgcctgtgacagatgccagcagcgccagcacaggccaggccacccccctgcctgtgaccagcctgagctctgtgtccactggagacaccacccccctgctggtgacagatgccagctctgtgtccactggacatgccacccccctgcctgtgacagacaccagcagcgccagcactggagacaccacccggctgcctgtgacagacaccagcagcgccagcacaggccaggccacccccctgcctgtgaccagcctgagctctgtgtccactggagacaccacccccctgctggtgacagatgccagctctgtgtccactggacatgccacccccctgcctgtgacagacaccagcagcgccagcactggagacaccacccggctgcctgtgacagacaccagcagcgccagcacaggccaggccacccccctgcctgtgaccatccccagcagcagcagcagcggccacaccacccccctgcctgtgaccagcaccagctctgtgtccactggacatgtgacccccctgcacgtgaccagccccagcagcgccagcactggacatgtgacccccctgcctgtgaccagcaccagcagcgccagcactggacatgccacccccctgctggtgacagatgccagctctgtgtccactggacatgccacccccctgcctgtgacagatgccagcagcgccagcactggagacaccacccccctgcctgtgacagacaccagcagcgccagcacaggccaggccacccccctgcctgtgaccagcctgagctctgtgtccactggagacaccacccccctgcctgtgacagatgccagcagcgccagcactggacatgccacccccctgcctgtgaccatccccagctctgtgtccactggagacaccatgcccctgcctgtgaccagccccagcagcgccagcactggacatgccacccccctgcctgtgacaggcctgagcagcgccagcactggagacaccacccccctgcctgtgacagacaccagcagcgccagcaccaggcatgccacccccctgcctgtgacagacaccagcagcgccagcacagatgacaccacccggctgcctgtgacagatgtgagcagcgccagcactggacatgccacccccctgcctgtgaccagcaccagcagcgccagcactggagacaccacccccctgcctgtgacagacaccagctctgtgtccactggacatgccaccagcctgcctgtgaccagccgcagcagcgccagcactggacatgccacccccctgcctgtgacagacaccagctctgtgtccactggacatgccacccccctgcctgtgaccagcaccagctctgtgtccactggacatgccacccccctgcctgtgaccagccccagcagcgccagcactggacatgccacccctgtgcctgtgaccagcaccagcagcgccagcactggagacaccacccccctgcctgtgaccaatgccagcagcctgagcactggacatgccacccccctgcacgtgaccagccccagcagcgccagcagaggagacaccagcaccctgcctgtgacagatgccagcagcgccagcactggacatgccacccccctgcccctgaccagcctgagctctgtgtccactggagacaccacccccctgcctgtgacagacaccagcagcgccagcacaggccaggccacccccctgcctgtgaccagcctgagctctgtgtccactggagacaccacccccctgcctgtgaccatccccagcagcgccagcagcggccacaccaccagcctgcctgtgacagatgccagctctgtgtccactggacatggcacccccctgcctgtgaccagcaccagcagcgccagcactggagacaccacccccctgcctgtgacagacaccagcagcgccagcactggacatgccacccccctgcctgtgacagacaccagcagcgccagcactggacatgccacccccctgcctgtgaccagcctgagctctgtgtccactggacatgccacccccctggccgtgtcctctgccaccagcgccagcacagtgtccagtgacagccccctgaagatggagaccccaggcatgaccacccccagcctgaagacagatggcggccgcaggacagccaccagccccccacccaccaccagccagaccatcatcagcaccatccccagcacagccatgcacaccaggagcacagctgcccccatccccatcctgcctgagcggggcgtgtccctcttcccctatggagctggagctggggacctggagtttgtgcggaggacagtggacttcaccagccccctcttcaagccagccaccggcttccccctgggcagcagcctgcgggacagcctgtacttcacagacaatggccagatcatcttccctgagagtgactaccagatcttctcctaccccaaccccctgcccaccggcttcaccggccgggaccctgtggccctggtggcccccttctgggatgatgctgacttcagcacaggccggggcaccaccttctaccaggagtatgagaccttctacggggagcacagcctgctggtgcagcaggccgagagctggatcaggaagatgaccaacaacggcggctacaaggcccgctgggccctgaaggtgacctgggtgaatgcccacgcctacccagcccagtggaccctgggcagcaacacctaccaggccatcctgagcacagatggcagccgctcctatgccctcttcctgtaccagagcggcggcatgcagtgggatgtggcccagaggagcggcaaccctgtgctgatgggcttcagcagtggagatggctactttgagaacagccccctgatgagccagcctgtgtgggagcgctacagaccagaccgcttcctgaacagcaacagcggcctgcagggcctgcagttctaccgcctgcaccgggaggagcggcccaactaccgcctggagtgcctgcagtggctgaagagccagccccgctggcccagctggggctggaaccaggtgtcctgcccctgctcctggcagcagggcagaagagacctgcgcttccagcctgtgtccatcggccgctggggcctgggcagccggcagctgtgcagcttcacctcctggaggggcggcgtgtgctgcagctatggcccctggggcgagttccgggagggctggcacgtgcagaggccctggcagctggcccaggagctggagccccagagctggtgctgccgctggaatgacaagccctacctgtgtgccctgtaccagcagaggcggccccacgtgggctgtgccacctaccggcccccccagcctgcctggatgtttggagacccccacatcaccaccctggatggagtgtcctacaccttcaacggcctgggggacttcctgctggtgggcgcccaggacggcaacagcagcttcctgctgcagggccgcacagcccagacaggcagcgcccaggccaccaacttcatcgcctttgctgcccagtaccgcagcagcagcctgggccctgtgacagtgcagtggctgctggagccccatgatgccatccgggtgctgctggacaaccagacagtgaccttccagcctgaccatgaagatggcggcggccaggagaccttcaatgccactggagtgctgctgagcagaaatggcagcgaggtgtctgccagctttgatggctgggccaccgtgtctgtgattgccctgagcaacatcctgcacgccagcgccagcctgcccccagagtaccagaacagaacagagggcctgctgggcgtgtggaacaacaacccagaagatgacttcaggatgcccaacggcagcaccatccccccaggcagccctgaggagatgctgttccacttcggcatgacctggcagatcaatggaacaggcctgctgggcaagagaaatgaccagctgcccagcaacttcacccctgtgttctacagccagctgcagaagaacagctcctgggccgagcacctgatcagcaactgtgatggagacagcagctgcatctatgacaccctggccctgagaaatgccagcatcggcctgcacacccgggaggtgtccaagaactatgagcaggccaatgccaccctgaaccagtacccacccagcatcaatggaggccgggtcatcgaggcctacaagggccagaccaccctcatccagtacaccagcaatgcagaagatgccaacttcaccctgcgggacagctgcacagacctggagctgtttgaaaatggcaccctgctgtggacccccaagagcctggagcccttcaccctggagatcctggcccggagcgccaagattggcctggccagcgccctgcagcccaggacagtggtgtgccactgcaatgctgagagccagtgcctgtacaaccagaccagccgggtgggcaacagcagcctggaggtggccggctgcaagtgtgatggcggcaccttcggccgctactgtgagggctctgaagatgcctgtgaggagccctgcttccccagcgtgcactgtgtgcctgggaagggctgtgaggcctgcccccccaacctgactggagatggccgccactgtgccgccctgggcagcagcttcctgtgccagaaccagagctgccctgtgaactactgctacaaccagggccactgctacatcagccagaccctgggctgccagcccatgtgcacctgccccccagccttcacagacagccgctgcttcctggccggcaacaacttcagccccaccgtgaacctggagctgcccctgcgggtcatccagctgctgctgtctgaggaggagaatgcctccatggccgaggtgaatgcctctgtggcctaccgcctgggcaccctggacatgagggccttcctgaggaacagccaggtggagagaattgacagcgctgccccagccagcggcagccccatccagcactggatggtgatcagcgagttccagtaccggccccggggccctgtgattgacttcctgaacaaccagctgctggccgctgtggtggaggccttcctgtaccacgtgccccggcgctctgaggagcccagaaatgatgtggtgttccagcccatctctggagaagatgtgagagatgtgacagccctgaatgtgtccaccctgaaggcctacttccgctgtgatggctacaagggctatgacctggtgtacagcccccagagcggcttcacctgtgtgagcccctgcagccggggctactgtgaccatggaggccagtgccagcacctgcccagcggcccccgctgcagctgtgtgtccttcagcatctacacagcctggggcgagcactgtgagcacctgtccatgaagctggatgccttcttcggcatcttcttcggggccctgggcggcctgctgctgctgggcgtgggcacctttgtggtgctgcgcttctggggctgcagcggggcccgcttctcctacttcctgaacagcgctgaggccctgccctag

SEQ ID NO: 198247 - DNA, 16083 bp, Artificial Sequence
  derived and/or modified sequence
atgaagggggcccgctggaggagagtgccctgggtgtccctgagctgcctgtgcctgtgcctgctgccccacgtggtgcccggcaccacagaggacaccctcatcaccggcagcaagacagctgcccctgtgaccagcacaggcagcaccacagccaccctggagggccagagcacagctgccagcagcaggaccagcaaccaggacatcagcgccagcagccagaaccaccagaccaagagcacagagaccaccagcaaggcccagacagacaccctgacccagatgatgaccagcaccctcttcagcagccccagcgtgcacaacgtgatggagacagcccccccagatgagatgaccaccagcttccccagctctgtgaccaacaccctgatgatgaccagcaagaccatcaccatgaccaccagcacagacagcaccctgggcaacacagaggagaccagcacagctggaacagagagcagcacccctgtgaccagcgctgtgtccatcacagctggccaggagggccagagcaggaccacctcctggaggaccagcatccaggacaccagcgccagcagccagaaccactggaccaggagcacccagaccacccgggagagccagaccagcaccctgacccacaggaccaccagcacccccagcttcagccccagcgtgcacaacgtgacaggcaccgtgtcccagaagaccagccccagcggggagacagccaccagcagcctgtgcagcgtgaccaacacctccatgatgaccagcgagaagatcaccgtgaccaccagcacaggcagcaccctgggcaaccctggagagaccagctctgtgcctgtgacaggcagcctgatgcctgtgaccagcgctgccctggtgacctttgatcctgagggccagagccctgccaccttcagcaggaccagcacccaggacaccacagccttcagcaagaaccaccagacccagagcgtggagaccaccagggtgtcccagatcaacaccctgaacaccctgacccctgtgaccaccagcacagtgctgagcagccccagcggcttcaaccccagcggcaccgtgtcccaggagaccttccccagcggggagaccaccaccagcagccccagctctgtgagcaacaccttcctggtgaccagcaaggtgttcaggatgcccaccagccgggacagcaccctgggcaacacagaggagaccagcctgtctgtgtctggcaccatcagcgccatcaccagcaaggtgtccaccatctggtggagcgacaccctgagcacagccctgagccccagcagcctgccccccaagatcagcacagccttccacacccagcagagcgagggcgctgagaccaccggccggccccatgagaggagcagcttcagccctggggtgtcccaggagatcttcaccctgcacgagaccaccacctggcccagcagcttcagcagcaagggccacaccacctggagccagacagagctgcccagcaccagcactggagctgccacccggctggtgacaggcaaccccagcactggaacagctggcaccatcccccgggtgcccagcaaggtgtctgccatcggggagcccggggagcccaccacctacagcagccacagcaccaccctgcccaagaccactggagctggggcccagacccagtggacccaggagaccggcaccaccggggaggccctgctgagcagccccagctacagcgtgacccagatgatcaagacagccaccagccccagcagcagccccatgctggacagacacaccagccagcagatcaccacagcccccagcaccaaccacagcaccatccacagcaccagcaccagcccccaggagagccctgctgtgtcccagaggggccacacccaggccccccagaccacccaggagagccagaccaccaggtctgtgagccccatgacagacaccaagacagtgaccaccccaggcagcagcttcaccgccagcggccacagccccagcgagatcgtgccccaggatgcccccaccatctctgctgccaccacctttgccccagcccccactggagatggccacaccacccaggcccccaccacagccctgcaggccgcccccagcagccatgatgccaccctgggccccagcggcggcaccagcctgagcaagacaggagccctgaccctggccaacagcgtggtgtccacccctgggggccctgagggccagtggaccagcgccagcgccagcaccagcccagacacagctgctgccatgacccacacccaccaggccgagagcacagaggccagcggccagacccagaccagcgagcccgccagcagcggcagcaggaccaccagcgctggaacagccacccccagcagcagcggggccagcggcaccacccccagcggcagcgagggcatcagcaccagcggggagaccacccgcttcagcagcaaccccagccgggacagccacaccacccagagcaccacagagctgctgagcgccagcgccagccacggggccatccctgtgtccacaggcatggccagcagcatcgtgcccggcaccttccaccccaccctgtctgaggccagcacagctggccggcccaccggccagagcagccccaccagccccagcgccagcccccaggagacagctgccatcagcaggatggcccagacccagaggaccaggaccagccggggcagtgacaccatcagcctggccagccaggccacagacaccttcagcacagtgccccccaccccacccagcatcaccagcacaggcctgaccagcccccagacagagacccacaccctgagccccagcggcagcggcaagaccttcaccacagccctgatcagcaatgccacccccctgcctgtgacctacgccagcagcgccagcacaggccacaccacccccctgcacgtgacagatgccagctctgtgtccactggacatgccacccccctgcctgtgaccagccccagctctgtgtccacaggccacaccacccccctgcctgtgacagacaccagcagcgagagcactggacatgtgacccccctgcctgtgaccagcttcagcagcgccagcactggagacagcacccccctgcctgtgacagacaccagcagcgccagcactggacatgtgacccccctgcctgtgaccagcctgagcagcgccagcactggagacaccacccccctgcctgtgacagacaccagcagcgccagcactggacatgccaccagcctgcctgtgacagacaccagctctgtgtccacaggccacaccacccccctgcctgtgacagacaccagcagcgccagcactggacatgccaccagcctgcctgtgacagacaccagctctgtgtccacaggccacaccacccccctgcacgtgacagatgccagcagcgccagcacaggccaggccacccccctgcctgtgaccagcctgagctctgtgtccactggagacaccacccccctgcctgtgaccagccccagcagcgccagcactggacatgccacccccctgctggtgacagacaccagcagcgccagcactggacatgccacccccctgcctgtgacagatgccagctctgtgtccacagaccacgccaccagcctgcctgtgaccatccccagcgctgccagcacaggccacaccacccccctgcctgtgacagacaccagcagcgccagcacaggccaggccaccagcctgctggtgacagacaccagctctgtgtccactggagacaccacccccctgcctgtgaccagcaccagcagcgccagcactggacatgtgacccccctgcacgtgaccagccccagcagcgccagcactggacatgccacccccctgcctgtgaccagcctgagcagcgccagcactggagacaccatgcccctgcctgtgaccagccccagcagcgccagcactggagacaccacccccctgcctgtgacagatgccagctctgtgtccacaggccacaccacccccctgcacgtgacagatgccagcagcgccagcacaggccaggccacccccctgcctgtgaccagcctgagctctgtgtccactggagacaccacccccctgcctgtgaccagccccagcagcgccagcactggacatgccacccccctgctggtgacagacaccagcagcgccagcactggacatgccacccccctgcctgtgacagatgccagctctgtgtccacagaccacgccaccagcctgcctgtgaccatccccagcgctgccagcacaggccacaccacccccctgcctgtgacagacaccagcagcgccagcacaggccaggccaccagcctgctggtgacagacaccagctctgtgtccactggagacaccacccccctgcctgtgaccagcaccagcagcgccagcactggacatgtgacccccctgcacgtgaccagccccagcagcgccagcactggacatgccacccccctgcctgtgaccagcctgagcagcgccagcactggagacaccatgcccctgcctgtgaccagccccagcagcgccagcactggagacaccacccccctgcctgtgacagatgccagctctgtgtccacaggccacaccacccccctgcctgtgaccagccccagcagcgccagcacaggccacaccacccccctgcctgtgacagacaccagcagcgccagcaaaggagacaccacccccctgcctgtgaccagccccagcagcgccagcacaggccacaccacccccctgcctgtgacagacaccagcagcgccagcactggagacaccacccccctgcctgtgaccaatgccagcagcctgagcactggacatgccacccccctgcacgtgaccagccccagcagcgccagcactggacatgccacccccctgcctgtgaccagcaccagcagcgccagcactggacatgccacccccctgcctgtgacaggcctgagcagcgccaccacagatgacaccacccggctgcctgtgacagatgtgagcagcgccagcacaggccaggccacccccctgcctgtgaccagcctgagctctgtgtccactggagacaccacccccctgcctgtgaccagccccagcagcgccagcactggacatgccagccccctgctggtgacagatgccagcagcgccagcacaggccaggccacccccctgcctgtgacagacaccagctctgtgtccacagcccacgccacccccctgcctgtgacaggcctgagcagcgccagcacagatgacaccacccggctgcctgtgacagatgtgagcagcgccagcacaggccaggccatccccctgcctgtgaccagccccagcagcgccagcactggagacaccacccccctgcctgtgacagatgccagcagcgccagcactggagacaccaccagcctgcctgtgaccatccccagcagcgccagcagcggccacaccaccagcctgcctgtgacagatgccagctctgtgtccactggacatgccaccagcctgctggtgacagatgccagctctgtgtccactggagacaccacccccctgcctgtgacagacaccaacagcgccagcactggagacaccacccccctgcacgtgacagatgccagctctgtgtccactggacatgccaccagcctgcctgtgaccagcctgagcagcgccagcactggagacaccacccccctgcctgtgaccagccccagcagcgccagcagcggccacaccacccccctgcctgtgacagatgccagctctgtgcccactggacatgccaccagcctgcctgtgacagatgccagctctgtgtccactggacatgccacccccctgcctgtgacagatgccagctctgtgtccactggacatgccacccccctgcctgtgacagacaccagctctgtgtccacaggccaggccacccccctgcctgtgaccagcctgagcagcgccagcactggagacaccacccccctgcctgtgacagacaccagcagcgccagcacaggccaggacacccccctgcctgtgaccagcctgagctctgtgtccactggagacaccacccccctgcctgtgaccaaccccagcagcgccagcactggacatgccacccccctgctggtgacagatgccagcagcatcagcactggacatgccaccagcctgctggtgacagatgccagctctgtgtccactggacatgccacagccctgcatgacacagatgccagcagcctgagcactggagacaccacccccctgcctgtgaccagccccagcagcaccagcactggagacaccacccccctgcctgtgacagagaccagctctgtgtccactggacatgccaccagcctgcctgtgacagacaccagcagcgccagcactggacatgccaccagcctgcctgtgacagacaccagcagcgccagcactggacatgccacccccctgcctgtgacagacaccagcagcgccagcacaggccaggccacccccctgcctgtgaccagccccagcagcgccagcactggacatgccatccccctgctggtgacagacaccagcagcgccagcacaggccaggccacccccctgcctgtgaccagcctgagcagcgccagcactggagacaccacccccctgcctgtgacagatgccagctctgtgtccactggacatgccaccagcctgcctgtgaccagcctgagctctgtgtccactggagacaccacccccctgcctgtgaccagccccagcagcgccagcactggacatgccacccccctgcacgtgacagatgccagcagcgccagcactggacatgccacccccctgcctgtgaccagcctgagcagcgccagcactggagacaccacccccctgcctgtgaccagccccagcagcgccagcactggacatgccacccccctgcacgtgacagatgccagctctgtgtccactggagacaccacccccctgcctgtgaccagcagcagcagcgccagcagcggccacaccacccccctgcctgtgacagatgccagcagcgccagcactggagacaccacccccctgcctgtgacagacaccagcagcgccagcactggacatgccacccacctgcctgtgacaggcctgagcagcgccagcactggagacaccacccggctgcctgtgaccaacgtgagcagcgccagcactggacatgccacccccctgcctgtgaccagcaccagcagcgccagcactggagacaccacccccctgcccggcacagacaccagctctgtgtccacaggccacaccacccccctgctggtgacagatgccagctctgtgtccactggagacaccacccggctgcctgtgaccagccccagcagcgccagcacaggccacaccacccccctgcctgtgacagacacccccagcgccagcactggagacaccacccccctgcctgtgaccaatgccagcagcctgagcaccaggcatgccaccagcctgcacgtgaccagccccagcagcgccagcactggacatgccaccagcctgcctgtgacagacaccagcgctgccagcactggacatgccacccccctgcctgtgaccagcaccagcagcgccagcactggagacaccacccccctgcctgtgacagacacctacagcgccagcacaggccaggccacccccctgcctgtgaccagcctgagctctgtgtccactggagacaccacccccctgcctgtgaccagccccagcagcgccagcactggacatgccacccccctgctggtgacagatgccagcagcgccagcacaggccaggccacccccctgcctgtgaccagcctgagctctgtgtccactggagacaccacccccctgcctgtgaccagccccagcagcgccagcactggacatgccaccagcctgcctgtgacagacaccagcagcgccagcactggagacaccaccagcctgcctgtgacagacaccagcagcgcctacacaggagacaccaccagcctgcctgtgacagacaccagcagcagcagcactggagacaccacccccctgctggtgacagagaccagctctgtgtccactggagacaccacccccctgcctgtgacagacaccagcagcgccagcactggacatgccacccccctgcctgtgaccaacaccagctctgtgtccactggacatgccacccccctgcacgtgaccagccccagcagcgccagcacaggccacaccacccccctgcctgtgacagatgccagctctgtgtccactggacatgccaccagcctgcctgtgacagatgccagcagcgtcttcaccggccacgccaccagcctgcctgtgaccatccccagcagcgccagcagcggccacaccacccccctgcctgtgacagatgccagctctgtgtccactggacatgccaccagcctgcctgtgacagatgccagctctgtgtccactggacatgccacccccctgcctgtgacagatgccagctctgtgtccactggacatgccacccccctgcccctgaccagcctgagctctgtgtccactggagacaccacccccctgcctgtgacagacaccagcagcgccagcacaggccaggccacccccctgcctgtgaccagcctgagctctgtgtccactggagacaccacccccctgcctgtgacagacaccagcagcgccagcactggacatgccaccagcctgcctgtgacagacaccagcagcgccagcactggacatgccacccccctgcctgacacagacaccagcagcgccagcactggacatgccaccctgctgcctgtgacagacaccagcagcgccagcattggacatgccaccagcctgcctgtgacagacaccagcagcatcagcactggacatgccacccccctgcacgtgaccagccccagcagcgccagcactggacatgccacccccctgcctgtgacagacaccagcagcgccagcactggacatgccaaccccctgcacgtgaccagccccagcagcgccagcactggacatgccacccccctgcctgtgacagacaccagcagcgccagcactggacatgccacccccctgcctgtgaccagcctgagctctgtgtccactggagacaccacccccctgcctgtgaccagccccagcagcgccagcacaggccacaccacccccctgcctgtgacagacaccagcagcgccagcacaggccaggccacagccctgcctgtgaccagcaccagcagcgccagcactggagacaccacccccctgcctgtgacagacaccagcagcgccagcacaggccaggccacccccctgcctgtgaccagcctgagctctgtgtccactggagacaccacccccctgcctgtgaccagccccagcagcgccagcactggacatgccacccccctgctggtgacagatgccagcagcgccagcacaggccaggccacccccctgcctgtgaccagcctgagctctgtgtccactggagacaccacccccctgcctgtgaccagccccagcagcgccagcactggacatgccaccagcctgcctgtgacagacaccagcagcgccagcactggagacaccaccagcctgcctgtgacagacaccagcagcgcctacacaggagacaccaccagcctgcctgtgacagacaccagcagcagcagcactggagacaccacccccctgctggtgacagagaccagctctgtgtccactggacatgccacccccctgctggtgacagatgccagcagcgccagcactggacatgccacccccctgcacgtgaccagccccagcagcgccagcactggagacaccacccctgtgcctgtgacagacaccagctctgtgtccactggacatgccacccccctgcctgtgacaggcctgagcagcgccagcactggagacaccacccggctgcctgtgacagacatcagcagcgccagcacaggccaggccacccccctgcctgtgaccaacaccagctctgtgtccactggagacaccatgcccctgcctgtgaccagccccagcagcgccagcactggacatgccacccccctgcctgtgaccagcaccagcagcgccagcactggacatgccacccctgtgcctgtgaccagcaccagcagcgccagcacaggccacaccacccccctgcctgtgacagacaccagcagcgccagcactggagacaccacccccctgcctgtgaccagccccagcagcgccagcacaggccacaccacccccctgcacgtgaccatccccagcagcgccagcactggagacaccagcaccctgcctgtgactggagccagcagcgccagcactggacatgccacccccctgcctgtgacagacaccagctctgtgtccactggacatgccacccccctgcctgtgaccagcctgagctctgtgtccactggagacaccacccccctgcctgtgacagatgccagcagcgccagcacaggccaggccacccccctgcctgtgaccagcctgagctctgtgtccactggagacaccacccccctgctggtgacagatgccagctctgtgtccactggacatgccacccccctgcctgtgacagacaccagcagcgccagcactggagacaccacccggctgcctgtgacagacaccagcagcgccagcacaggccaggccacccccctgcctgtgaccagcctgagctctgtgtccactggagacaccacccccctgctggtgacagatgccagctctgtgtccactggacatgccacccccctgcctgtgacagacaccagcagcgccagcactggagacaccacccggctgcctgtgacagacaccagcagcgccagcacaggccaggccacccccctgcctgtgaccatccccagcagcagcagcagcggccacaccacccccctgcctgtgaccagcaccagctctgtgtccactggacatgtgacccccctgcacgtgaccagccccagcagcgccagcactggacatgtgacccccctgcctgtgaccagcaccagcagcgccagcactggacatgccacccccctgctggtgacagatgccagctctgtgtccactggacatgccacccccctgcctgtgacagatgccagcagcgccagcactggagacaccacccccctgcctgtgacagacaccagcagcgccagcacaggccaggccacccccctgcctgtgaccagcctgagctctgtgtccactggagacaccacccccctgcctgtgacagatgccagcagcgccagcactggacatgccacccccctgcctgtgaccatccccagctctgtgtccactggagacaccatgcccctgcctgtgaccagccccagcagcgccagcactggacatgccacccccctgcctgtgacaggcctgagcagcgccagcactggagacaccacccccctgcctgtgacagacaccagcagcgccagcaccaggcatgccacccccctgcctgtgacagacaccagcagcgccagcacagatgacaccacccggctgcctgtgacagatgtgagcagcgccagcactggacatgccacccccctgcctgtgaccagcaccagcagcgccagcactggagacaccacccccctgcctgtgacagacaccagctctgtgtccactggacatgccaccagcctgcctgtgaccagccgcagcagcgccagcactggacatgccacccccctgcctgtgacagacaccagctctgtgtccactggacatgccacccccctgcctgtgaccagcaccagctctgtgtccactggacatgccacccccctgcctgtgaccagccccagcagcgccagcactggacatgccacccctgtgcctgtgaccagcaccagcagcgccagcactggagacaccacccccctgcctgtgaccaatgccagcagcctgagcactggacatgccacccccctgcacgtgaccagccccagcagcgccagcagaggagacaccagcaccctgcctgtgacagatgccagcagcgccagcactggacatgccacccccctgcccctgaccagcctgagctctgtgtccactggagacaccacccccctgcctgtgacagacaccagcagcgccagcacaggccaggccacccccctgcctgtgaccagcctgagctctgtgtccactggagacaccacccccctgcctgtgaccatccccagcagcgccagcagcggccacaccaccagcctgcctgtgacagatgccagctctgtgtccactggacatggcacccccctgcctgtgaccagcaccagcagcgccagcactggagacaccacccccctgcctgtgacagacaccagcagcgccagcactggacatgccacccccctgcctgtgacagacaccagcagcgccagcactggacatgccacccccctgcctgtgaccagcctgagctctgtgtccactggacatgccacccccctggccgtgtcctctgccaccagcgccagcacagtgtccagtgacagccccctgaagatggagaccccaggcatgaccacccccagcctgaagacagatggcggccgcaggacagccaccagccccccacccaccaccagccagaccatcatcagcaccatccccagcacagccatgcacaccaggagcacagctgcccccatccccatcctgcctgagcggggcgtgtccctcttcccctatggagctggagctggggacctggagtttgtgcggaggacagtggacttcaccagccccctcttcaagccagccaccggcttccccctgggcagcagcctgcgggacagcctgtacttcacagacaatggccagatcatcttccctgagagtgactaccagatcttctcctaccccaaccccctgcccaccggcttcaccggccgggaccctgtggccctggtggcccccttctgggatgatgctgacttcagcacaggccggggcaccaccttctaccagagcaacacctaccaggccatcctgagcacagatggcagccgctcctatgccctcttcctgtaccagagcggcggcatgcagtgggatgtggcccagaggagcggcaaccctgtgctgatgggcttcagcagtggagatggctactttgagaacagccccctgatgagccagcctgtgtgggagcgctacagaccagaccgcttcctgaacagcaacagcggcctgcagggcctgcagttctaccgcctgcaccgggaggagcggcccaactaccgcctggagtgcctgcagtggctgaagagccagccccgctggcccagctggggctggaaccaggtgtcctgcccctgctcctggcagcagggcagaagagacctgcgcttccagcctgtgtccatcggccgctggggcctgggcagccggcagctgtgcagcttcacctcctggaggggcggcgtgtgctgcagctatggcccctggggcgagttccgggagggctggcacgtgcagaggccctggcagctggcccaggagctggagccccagagctggtgctgccgctggaatgacaagccctacctgtgtgccctgtaccagcagaggcggccccacgtgggctgtgccacctaccggcccccccagcctgcctggatgtttggagacccccacatcaccaccctggatggagtgtcctacaccttcaacggcctgggggacttcctgctggtgggcgcccaggacggcaacagcagcttcctgctgcagggccgcacagcccagacaggcagcgcccaggccaccaacttcatcgcctttgctgcccagtaccgcagcagcagcctgggccctgtgacagtgcagtggctgctggagccccatgatgccatccgggtgctgctggacaaccagacagtgaccttccagcctgaccatgaagatggcggcggccaggagaccttcaatgccactggagtgctgctgagcagaaatggcagcgaggtgtctgccagctttgatggctgggccaccgtgtctgtgattgccctgagcaacatcctgcacgccagcgccagcctgcccccagagtaccagaacagaacagagggcctgctgggcgtgtggaacaacaacccagaagatgacttcaggatgcccaacggcagcaccatccccccaggcagccctgaggagatgctgttccacttcggcatgacctggcagatcaatggaacaggcctgctgggcaagagaaatgaccagctgcccagcaacttcacccctgtgttctacagccagctgcagaagaacagctcctgggccgagcacctgatcagcaactgtgatggagacagcagctgcatctatgacaccctggccctgagaaatgccagcatcggcctgcacacccgggaggtgtccaagaactatgagcaggccaatgccaccctgaaccagtacccacccagcatcaatggaggccgggtcatcgaggcctacaagggccagaccaccctcatccagtacaccagcaatgcagaagatgccaacttcaccctgcgggacagctgcacagacctggagctgtttgaaaatggcaccctgctgtggacccccaagagcctggagcccttcaccctggagatcctggcccggagcgccaagattggcctggccagcgccctgcagcccaggacagtggtgtgccactgcaatgctgagagccagtgcctgtacaaccagaccagccgggtgggcaacagcagcctggaggtggccggctgcaagtgtgatggcggcaccttcggccgctactgtgagggctctgaagatgcctgtgaggagccctgcttccccagcgtgcactgtgtgcctgggaagggctgtgaggcctgcccccccaacctgactggagatggccgccactgtgccgccctgggcagcagcttcctgtgccagaaccagagctgccctgtgaactactgctacaaccagggccactgctacatcagccagaccctgggctgccagcccatgtgcacctgccccccagccttcacagacagccgctgcttcctggccggcaacaacttcagccccaccgtgaacctggagctgcccctgcgggtcatccagctgctgctgtctgaggaggagaatgcctccatggccgaggtgaatgcctctgtggcctaccgcctgggcaccctggacatgagggccttcctgaggaacagccaggtggagagaattgacagcgctgccccagccagcggcagccccatccagcactggatggtgatcagcgagttccagtaccggccccggggccctgtgattgacttcctgaacaaccagctgctggccgctgtggtggaggccttcctgtaccacgtgccccggcgctctgaggagcccagaaatgatgtggtgttccagcccatctctggagaagatgtgagagatgtgacagccctgaatgtgtccaccctgaaggcctacttccgctgtgatggctacaagggctatgacctggtgtacagcccccagagcggcttcacctgtgtgagcccctgcagccggggctactgtgaccatggaggccagtgccagcacctgcccagcggcccccgctgcagctgtgtgtccttcagcatctacacagcctggggcgagcactgtgagcacctgtccatgaagctggatgccttcttcggcatcttcttcggggccctgggcggcctgctgctgctgggcgtgggcacctttgtggtgctgcgcttctggggctgcagcggggcccgcttctcctacttcctgaacagcgctgaggccctgccctag

SEQ ID NO: 198248 - DNA, 5857 bp, Artificial Sequence
  derived and/or modified sequence
ccaggaaccacagaggacacattaataactggaagtaaaactgctgccccagtcacctcaacaggctcaacaacagcgacactagagggacaatcaactgcagcttcttcaaggacctctaatcaggacatatcagcttcatctcagaaccaccagactaagagcacggagaccaccagcaaagctcaaaccgacaccctcacgcagatgatgacatcaactcttttttcttccccaagtgtacacaatgtgatggagacagctcctccagatgaaatgaccacatcatttccctccagtgtcaccaacacactcatgatgacatcaaagactataacaatgacaacctccacagactccactcttggaaacacagaagagacatcaacagcaggaactgaaagttctaccccagtgacctcagcagtctcaataacagctggacaggaaggacaatcacgaacaacttcctggaggacctctatccaagacacatcagcttcttctcagaaccactggactcggagcacgcagaccaccagggaatctcaaaccagcaccctaacacacagaaccacttcaactccttctttctctccaagtgtacacaatgtgacagggactgtttctcagaagacatctccttcaggtgaaacagctacctcatccctctgtagtgtcacaaacacatccatgatgacatcagagaagataacagtgacaacctccacaggctccactcttggaaacccaggggagacatcatcagtacctgttactggaagtcttatgccagtcacctcagcagccttagtaacatttgatccagaaggacaatcaccagcaactttctcaaggacttctactcaggacacaacagctttttctaagaaccaccagactcagagcgtggagaccaccagagtatctcaaatcaacaccctcaacaccctcacaccggttacaacatcaactgttttatcctcaccaagtggattcaacccaagtggaacagtttctcaggagacattcccttctggtgaaacaaccacctcatccccttccagtgtcagcaatacattcctggtaacatcaaaggtgttcagaatgccaacctccagagactctactcttggaaacacagaggagacatcactatctgtaagtggaaccatttctgcaatcacttccaaagtttcaaccatatggtggtcagacactctgtcaacagcactctcccccagttctctacctccaaaaatatccacagctttccacacccagcagagtgaaggtgcagagaccacaggacggcctcatgagaggagctcattctctccaggtgtgtctcaagaaatatttactctacatgaaacaacaacatggccttcctcattctccagcaaaggccacacaacttggtcacaaacagaactgccctcaacatcaacaggtgctgccactaggcttgtcacaggaaatccatctacagggacagctggcactattccaagggtcccctctaaggtctcagcaataggggaaccaggagagcccaccacatactcctcccacagcacaactctcccaaaaacaacaggggcaggcgcccagacacaatggacacaagaaacggggaccactggagaggctcttctcagcagcccaagctacagtgtgactcagatgataaaaacggccacatccccatcttcttcacctatgctggatagacacacatcccaacaaattacaacggcaccatcaacaaatcattcaacaatacattccacaagcacctctcctcaggaatcaccagctgtttcccaaaggggtcacactcaagccccgcagaccacacaagaatcacaaaccacgaggtccgtctcccccatgactgacaccaagacagtcaccaccccaggttcttccttcacagccagtgggcactcgccctcagaaattgttcctcaggacgcacccaccataagtgcagcaacaacctttgccccagctcccaccggggatggtcacacaacccaggccccgaccacagcactgcaggcagcacccagcagccatgatgccaccctggggccctcaggaggcacgtcactttccaaaacaggtgcccttactctggccaactctgtagtgtcaacaccagggggcccagaaggacaatggacatcagcctctgccagcacctcacctgacacagcagcagccatgacccatacccaccaggctgagagcacagaggcctctggacaaacacagaccagcgaaccggcctcctcagggtcacgaaccacctcagcgggcacagctaccccttcctcatccggggcgagtggcacaacaccttcaggaagcgaaggaatatccacctcaggagagacgacaaggttttcatcaaacccctccagggacagtcacacaacccagtcaacaaccgaattgctgtccgcctcagccagtcatggtgccatcccagtaagcacaggaatggcgtcttcgatcgtccccggcacctttcatcccaccctctctgaggcctccactgcagggagaccgacaggacagtcaagcccaacttctcccagtgcctctcctcaggagacagccgccatttcccggatggcccagactcagaggacaagaaccagcagagggtctgacactatcagcctggcgtcccaggcaaccgacaccttctcaacagtcccacccacacctccatcgatcacatccactgggcttacatctccacaaaccgagacccacactctgtcaccttcagggtctggtaaaaccttcaccacggccctcatcagcaacgccacccctcttcctgtcacctacgcttcctcggcatccacaggtcacgccacccctcttgctgtcagcagtgctacctcagcttccacagtatcctcggactcccctctgaagatggaaacaccaggaatgacaacaccgtcactgaagacagacggtgggagacgcacagccacatcaccaccccccacaacctcccagaccatcatttccaccattcccagcactgccatgcacacccgctccacagctgcccccatccccatcctgcctgagagaggagtttccctcttcccctatggggcaggcgccggggacctggagttcgtcaggaggaccgtggacttcacctccccactcttcaagccggcgactggcttcccccttggctcctctctccgtgattccctctacttcacagacaatggccagatcatcttcccagagtcagactaccagattttctcctaccccaacccactcccaacaggcttcacaggccgggaccctgtggccctggtggctccgttctgggacgatgctgacttctccactggtcgggggaccacattttatcaggaatacgagacgttctatggtgaacacagcctgctagtccagcaggccgagtcttggattagaaagatgacaaacaacgggggctacaaggccaggtgggccctaaaggtcacgtgggtcaatgcccacgcctatcctgcccagtggaccctcgggagcaacacctaccaagccatcctctccacggacgggagcaggtcctatgccctgtttctctaccagagcggtgggatgcagtgggacgtggcccagcgctcaggcaacccggtgctcatgggcttctctagtggagatggctatttcgaaaacagcccactgatgtcccagccagtgtgggagaggtatcgccctgatagattcctgaattccaactcaggcctccaagggctgcagttctacaggctacaccgggaagaaaggcccaactaccgtctcgagtgcctgcagtggctgaagagccagcctcggtggcccagctggggctggaaccaggtctcctgcccttgttcctggcagcagggacgacgggacttacgattccaacccgccagcctcccgcccgagtaccagaaccgcacggaggggctcctgggggtctggaataacaatccagaggacgacttcaggatgcccaatggctccaccattcccccagggagccctgaggagatgcttttccactttggaatgacctggcagatcaacgggacaggcctccttggcaagaggaatgaccagctgccttccaacttcacccctgttttctactcacaactgcaaaaaaacagctcctgggctgaacatttgatctccaactgtgacggagatagctcatgcatctatgacaccctggccctgcgcaacgcaagcatcggacttcacacgagggaagtcagtaaaaactacgagcaggcgaacgccaccctcaatcagtacccgccctccatcaatggtggtcgtgtgattgaagcctacaaggggcagaccacgctgattcagtacaccagcaatgctgaggatgccaacttcacgctcagagacagctgcaccgacttggagctctttgagaatgggacgttgctgtggacacccaagtcgctggagccattcactctggagattctagcaagaagtgccaagattggcttggcatctgcactccagcccaggactgtggtctgccattgcaatgcagagagccagtgtttgtacaatcagaccagcagggtgggcaactcctccctggaggtggctggctgcaagtgtgacgggggcaccttcggccgctactgcgagggctccgaggatgcctgtgaggagccgtgcttcccgagtgtccactgcgttcctgggaagggctgcgaggcctgccctccaaacctgactggggatgggcggcactgtgcggctctggggagctctttcctgtgtcagaaccagtcctgccctgtgaattactgctacaatcaaggccactgctacatctcccagactctgggctgtcagcccatgtgcacctgccccccagccttcactgacagccgctgcttcctggctgggaacaacttcagtccaactgtcaacctagaacttcccttaagagtcatccagctcttgctcagtgaagaggaaaatgcctccatggcagaagtcaacgcctcggtggcatacagactggggaccctggacatgcgggcctttctccgcaacagccaagtggaacgaatcgattctgcagcaccggcctcgggaagccccatccaacactggatggtcatctcggagttccagtaccgccctcggggcccggtcattgacttcctgaacaaccagctgctggccgcggtggtggaggcgttcttataccacgttccacggaggagtgaggagcccaggaacgacgtggtcttccagcccatctccggggaagacgtgcgcgatgtgacagccctgaacgtgagcacgctgaaggcttacttcagatgcgatggctacaagggctacgacctggtctacagcccccagagcggcttcacctgcgtgtccccgtgcagtaggggctactgtgaccatggaggccagtgccagcacctgcccagtgggccccgctgcagctgtgtgtccttctccatctacacggcctggggcgagcactgtgagcacctgagcatgaaactcgacgcgttcttcggcatcttctttggggccctgggcggcctcttgctgctgggggtcgggacgttcgtggtcctgcgcttctggggttgctccggggccaggttctcctatttcctgaactcagctgaggccttgccttgaaggggcagctgtggcctaggctacctcaagactcacctcatccttaccgcacatttaaggcgccattgcttttgggagactggaaaagggaaggtgactgaaggctgtcaggattctt

SEQ ID NO: 198249 - DNA, 17110 bp, Artificial Sequence
  derived and/or modified sequence
tacagccccaaggtcgctccctctggggccctttcttccccattcttcccagcagcccaaagctctggtgggacaggggcagcccctggggagggaggagaggacccaggaacccggctaggagggtggcccacccatttccagtgtgacctgttcccattcccccatgtctcctcccatccctcccgccactcagctcaggctgatgagaagcagagcaacgggtgtatcggtgttttctttcctggtggggtagtggggtggggctgaggagagaaaagggtgattagcgtggggccccgccctcttttgtcctcttcccaggttccctggccccttcggagaaacgcacttggttcgggccagccgcctgaggggacgggctcacgtctgctcctcacactgcagctgctgggccgtggagcttccccagggagccagggggacttttgccgcagccatgaagggggcacgctggaggagggtcccctgggtgtccctgagctgcctgtgtctctgcctccttccgcatgtggtcccaggaaccacagaggacacattaataactggaagtaaaactgctgccccagtcacctcaacaggctcaacaacagcgacactagagggacaatcaactgcagcttcttcaaggacctctaatcaggacatatcagcttcatctcagaaccaccagactaagagcacggagaccaccagcaaagctcaaaccgacaccctcacgcagatgatgacatcaactcttttttcttccccaagtgtacacaatgtgatggagacagctcctccagatgaaatgaccacatcatttccctccagtgtcaccaacacactcatgatgacatcaaagactataacaatgacaacctccacagactccactcttggaaacacagaagagacatcaacagcaggaactgaaagttctaccccagtgacctcagcagtctcaataacagctggacaggaaggacaatcacgaacaacttcctggaggacctctatccaagacacatcagcttcttctcagaaccactggactcggagcacgcagaccaccagggaatctcaaaccagcaccctaacacacagaaccacttcaactccttctttctctccaagtgtacacaatgtgacagggactgtttctcagaagacatctccttcaggtgaaacagctacctcatccctctgtagtgtcacaaacacatccatgatgacatcagagaagataacagtgacaacctccacaggctccactcttggaaacccaggggagacatcatcagtacctgttactggaagtcttatgccagtcacctcagcagccttagtaacatttgatccagaaggacaatcaccagcaactttctcaaggacttctactcaggacacaacagctttttctaagaaccaccagactcagagcgtggagaccaccagagtatctcaaatcaacaccctcaacaccctcacaccggttacaacatcaactgttttatcctcaccaagtggattcaacccaagtggaacagtttctcaggagacattcccttctggtgaaacaaccacctcatccccttccagtgtcagcaatacattcctggtaacatcaaaggtgttcagaatgccaacctccagagactctactcttggaaacacagaggagacatcactatctgtaagtggaaccatttctgcaatcacttccaaagtttcaaccatatggtggtcagacactctgtcaacagcactctcccccagttctctacctccaaaaatatccacagctttccacacccagcagagtgaaggtgcagagaccacaggacggcctcatgagaggagctcattctctccaggtgtgtctcaagaaatatttactctacatgaaacaacaacatggccttcctcattctccagcaaaggccacacaacttggtcacaaacagaactgccctcaacatcaacaggtgctgccactaggcttgtcacaggaaatccatctacagggacagctggcactattccaagggtcccctctaaggtctcagcaataggggaaccaggagagcccaccacatactcctcccacagcacaactctcccaaaaacaacaggggcaggcgcccagacacaatggacacaagaaacggggaccactggagaggctcttctcagcagcccaagctacagtgtgactcagatgataaaaacggccacatccccatcttcttcacctatgctggatagacacacatcccaacaaattacaacggcaccatcaacaaatcattcaacaatacattccacaagcacctctcctcaggaatcaccagctgtttcccaaaggggtcacactcaagccccgcagaccacacaagaatcacaaaccacgaggtccgtctcccccatgactgacaccaagacagtcaccaccccaggttcttccttcacagccagtgggcactcgccctcagaaattgttcctcaggacgcacccaccataagtgcagcaacaacctttgccccagctcccaccggggatggtcacacaacccaggccccgaccacagcactgcaggcagcacccagcagccatgatgccaccctggggccctcaggaggcacgtcactttccaaaacaggtgcccttactctggccaactctgtagtgtcaacaccagggggcccagaaggacaatggacatcagcctctgccagcacctcacctgacacagcagcagccatgacccatacccaccaggctgagagcacagaggcctctggacaaacacagaccagcgaaccggcctcctcagggtcacgaaccacctcagcgggcacagctaccccttcctcatccggggcgagtggcacaacaccttcaggaagcgaaggaatatccacctcaggagagacgacaaggttttcatcaaacccctccagggacagtcacacaacccagtcaacaaccgaattgctgtccgcctcagccagtcatggtgccatcccagtaagcacaggaatggcgtcttcgatcgtccccggcacctttcatcccaccctctctgaggcctccactgcagggagaccgacaggacagtcaagcccaacttctcccagtgcctctcctcaggagacagccgccatttcccggatggcccagactcagaggacaagaaccagcagagggtctgacactatcagcctggcgtcccaggcaaccgacaccttctcaacagtcccacccacacctccatcgatcacatccactgggcttacatctccacaaaccgagacccacactctgtcaccttcagggtctggtaaaaccttcaccacggccctcatcagcaacgccacccctcttcctgtcacctacgcttcctcggcatccacaggtcacaccacccctcttcatgtcaccgatgcttcctcagtatccacaggtcacgccacccctcttcctgtcaccagcccttcctcagtatccacaggtcacaccacccctcttcctgtcaccgacacttcctcagaatccacaggtcacgtcacccctcttcctgtcaccagcttttcctcagcatccacaggtgacagcacccctcttcctgtcactgacacttcctcagcatccacaggtcacgtcacccctcttcctgtcaccagcctttcctcagcatccacaggtgacaccacccctcttcctgtcactgacacttcctcagcatccacaggtcacgccacctctcttcctgtcaccgacacttcctcagtatccacaggtcacaccacccctcttcctgtcaccgacacttcctcagcatccacaggtcacgccacctctcttcctgtcaccgacacttcctcagtatccacaggtcacaccacccctcttcatgtcactgatgcttcctcagcatccacaggtcaggccacccctcttcctgtcaccagcctttcctcagtatccacaggtgacaccacgcctcttcctgtcactagcccttcctcagcatccacaggtcacgccacccctcttcttgtcaccgacacttcctcagcatccacaggacacgccacccctcttcctgtcaccgacgcttcctcagtgtccacagatcacgccacctctcttcctgtaaccatcccttccgcagcatccacaggtcacaccacccctcttcctgtcaccgacacttcctcagcatccacaggtcaggccacctctcttcttgtcaccgacacttcctcagtatccacaggtgacaccacgcctcttcctgtcactagcacttcctcagcatccacaggtcacgtcactcctcttcatgtcaccagcccttcctcagcatccacaggtcacgccacccctcttcctgtcaccagcctttcctcagcatccacaggtgacaccatgcctcttcctgtcactagcccttcctcagcatccacaggtgacaccacccctcttcctgtcaccgacgcttcctcagtatccacaggtcacaccacccctcttcatgtcactgatgcttcctcagcatccacaggtcaggccacccctcttcctgtcaccagcctttcctcagtatccacaggtgacaccacgcctcttcctgtcactagcccttcctcagcatccacaggtcacgccacccctcttcttgtcaccgacacttcctcagcatccacaggacacgccacccctcttcctgtcaccgacgcttcctcagtgtccacagatcacgccacctctcttcctgtaaccatcccttccgcagcatccacaggtcacaccacccctcttcctgtcaccgacacttcctcagcatccacaggtcaggccacctctcttcttgtcaccgacacttcctcagtatccacaggtgacaccacgcctcttcctgtcactagcacttcctcagcatccacaggtcacgtcactcctcttcatgtcaccagcccttcctcagcatccacaggtcacgccacccctcttcctgtcaccagcctttcctcagcatccacaggtgacaccatgcctcttcctgtcactagcccttcctcagcatccacaggtgacaccacccctcttcctgtcaccgacgcttcctcagtatccacaggtcacaccacccctcttcctgtcaccagcccttcctcagcatctacaggtcacaccacccctcttcctgtcaccgacacttcctcagcatccaaaggtgacaccacccctcttcctgtcaccagcccttcctcagcatctacaggtcacaccacccctcttcctgtcaccgacacttcctcagcatccacaggtgacaccacccctcttcctgtcaccaatgcttcctcattatccacaggtcacgccacccctcttcatgtcaccagcccttcctcagcatccacaggtcacgccacccctcttcctgtcaccagcacttcctcagcatccaccggtcacgccacccctcttcctgtcaccggcctttcctcagctaccacagatgacaccacccgtcttcctgtcaccgacgtttcctcggcatccacaggtcaggccacccctcttcctgtcaccagcctttcctcagtatccacaggtgacaccacgcctcttcctgtcactagcccttcctcagcatccacaggtcacgccagccctcttcttgtcactgacgcttcctcagcatccacaggtcaggccacccctcttcctgtcaccgacacttcctcagtatccacagctcacgccaccccacttcctgtcaccggcctttcttcagcttccacagatgacaccacccgtcttcctgtcaccgacgtttcctcggcatccacaggtcaggccatccctcttcctgtcaccagcccttcctcagcatccacaggtgacaccacccctcttcctgtcaccgacgcttcctcagcatccacaggtgacaccacctctcttcctgtcaccatcccttcctcagcatcttcaggtcacaccacctctcttcctgtcaccgacgcttcctcagtgtccacaggtcacgccacctctcttcttgtcaccgacgcttcctcagtatccacaggtgacaccacccctcttcctgtcaccgacactaactcagcatccacaggtgacaccacccctcttcatgtcaccgacgcttcctcagtatccacaggtcacgccacctctcttcctgtcaccagcctttcctcagcatccacaggtgacaccacgcctcttcctgtcactagcccttcctcagcatcctcaggtcacaccacccctcttcctgtcaccgacgcttcctcagtacccacaggtcacgccacctctcttcctgtcaccgacgcttcctcagtgtccacaggtcacgccacccctcttcctgtcaccgacgcttcctcagtgtccacaggtcatgccacccctcttccggtcaccgacacttcctcagtatctacaggacaggccacccctcttcctgtcaccagcctttcctcagcatccactggtgacaccacgccgcttcctgtcaccgatacttcctcagcatccacaggtcaggacacccctcttcctgtcaccagcctttcctcagtatccacaggtgacaccacgcctcttcctgtcactaacccttcctcagcatccacaggtcacgccacccctcttcttgtcaccgacgcttcctcaatatccacaggtcacgccacctctcttcttgtcaccgacgcttcctcagtatccacaggtcacgccaccgctcttcatgacaccgatgcttcctcattatccacaggggacaccacccctcttcctgtcaccagcccttcctcaacatccacaggtgacaccacccctcttcctgtcaccgaaacttcctcagtatccacaggtcacgccacctctcttcctgtcaccgacacttcctcagcatccacaggtcacgccacctctcttcctgtcaccgacacttcctcagcatccacaggtcacgccacccctcttcctgtcaccgacacttcctcagcatccacaggtcaggccacccctcttcctgtcaccagcccttcctcagcatccacaggtcacgccatccctcttcttgtcaccgacacttcctcagcatccacaggacaggccacccctcttcctgtcaccagcctttcctcagcatccacaggtgacaccacccctcttcctgtcaccgacgcttcctcagtgtccacaggtcacgccacctctcttcctgtcaccagcctttcctcagtatccacaggtgacaccactcctcttcctgtcactagcccttcctcagcatccacaggtcacgccacccctcttcatgtcaccgacgcttcctcagcatccacaggtcacgccacccctcttcctgtcaccagcctttcctcagcatccacaggtgacaccacgcctcttcctgtcactagcccttcctcagcatccacaggtcacgccacccctcttcatgtcaccgacgcttcctcagtatccacaggtgacaccacccctcttcctgtcaccagctcttcctcagcatcctcaggtcacaccacccctcttcctgtcaccgacgcttcctcagcatccacaggtgacaccacccctcttcctgtcaccgacacttcctcagcatccacaggtcacgccacccatcttcctgtcaccggcctttcctcagcttccacaggtgacaccacccgtcttcctgtcaccaacgtttcctcggcatccacaggtcatgccacccctcttcctgtcaccagcacttcctcagcatccacaggtgacaccacccctcttcctggcaccgacacttcctcagtatccacaggtcacaccacccctcttcttgtcaccgacgcttcgtcagtatccacaggtgacaccacccgtcttcctgtcaccagcccttcctcagcatctacaggtcacaccacccctctacctgtcaccgacactccctcagcatccacaggtgacaccacccctcttcctgtcaccaatgcttcctcattatccacacgtcacgccacctctcttcatgtcaccagcccttcctcagcatccacaggtcacgccacctctcttcctgtcaccgacacttccgcagcatccacaggtcacgccacccctcttcctgtcaccagcacttcctcagcatccacaggtgacaccacccctcttcctgtcaccgacacttactcagcatccacaggtcaggccacccctcttcctgtcaccagcctttcctcagtatccacaggtgacaccacgcctcttcctgtcactagcccttcctcagcatccacaggtcacgccactcctcttcttgtcaccgacgcttcctcagcatccacaggtcaggccacccctcttcctgtcaccagcctttcctcagtatccacaggtgacaccacgcctcttcctgtcactagcccttcctcagcatccaccggtcatgccacctctcttcctgtcaccgacacttcctcagcatccacaggtgacaccacctctcttcctgtcaccgacacttcctcagcatacacaggtgacaccacctctcttcctgtcaccgacacttcctcatcatccacaggtgacaccacccctcttcttgtcaccgagacttcctcagtatccacaggtgacaccacccctcttcctgtcaccgacacttcctcagcatccacaggtcacgccacccctcttcctgtcaccaacacttcctcagtatccacaggtcacgccacccctcttcatgtcaccagcccttcctcagcatccacaggtcacaccacccctcttcctgtcaccgacgcttcgtcagtgtccacaggtcacgccacctctcttcctgtcaccgacgcttcctcagtgttcacaggtcatgccacctctcttcctgtcaccatcccttcctcagcatcctcaggtcacaccacccctcttcctgtcaccgacgcttcctcagtgtccacaggtcacgccacctctcttcctgtcaccgacgcttcctcagtgtccacaggtcatgccacccctcttcctgtcaccgacgcttcctcagtgtccacaggtcacgctacccctcttcctctcaccagcctttcctcagtatccacaggtgacaccacgcctcttcctgtcaccgacacttcctcagcatccacaggtcaggccacccctcttcctgtcaccagcctttcctcagtatccacaggtgacaccacccctcttcctgtcaccgacacttcctcagcatccacaggtcacgccacctctcttcctgtcaccgacacttcctcagcatccacaggtcacgccacccctcttcctgacaccgacacttcctcagcatccacaggtcacgccacccttcttcctgtcaccgacacttcctcagcatccataggtcacgccacctctcttcctgtcaccgacacttcctcaatatccacaggtcacgccacccctcttcatgtcaccagcccttcctcagcatccaccggtcacgccaccccgcttcctgtcaccgacacttcctcagcatccacaggtcacgccaaccctcttcatgtcaccagcccttcctcagcatccaccggtcacgccaccccgcttcctgtcaccgacacttcctcagcatccacaggtcacgccacccctcttcctgtcaccagcctttcctcagtatccacaggtgacaccacgcctcttcctgtcactagcccttcctcagcatccacaggtcacaccacccctcttcctgtcaccgacacttcctcagcatccacaggtcaggccaccgctcttcctgtcaccagcacttcctcagcatccacaggtgacaccacccctcttcctgtcaccgacacttcctcagcatccacaggtcaggccacccctcttcctgtcaccagcctttcctcagtatccacaggtgacaccacgcctcttcctgtcactagcccttcctcagcatccacaggtcacgccactcctcttcttgtcaccgacgcttcctcagcatccacaggtcaggccacccctcttcctgtcaccagcctttcctcagtatccacaggtgacaccacgcctcttcctgtcactagcccttcctcagcatccaccggtcatgccacctctcttcctgtcaccgacacttcctcagcatccacaggtgacaccacctctcttcctgtcaccgacacttcctcagcatacacaggtgacaccacctctcttcctgtcaccgacacttcctcatcatccacaggtgacaccacccctcttcttgtcaccgagacttcctcagtatccacaggtcacgccactcctcttcttgtcaccgacgcttcctcagcatccacaggtcacgccacccctcttcatgtcaccagcccttcctcagcatccacaggtgacaccacccctgtgcctgtcaccgacacttcctcagtatccacaggtcacgccacccctcttcctgtcaccggcctttcctcagcttccacaggtgacaccacccgtcttcctgtcaccgacatttcctcggcatccacaggtcaggccacccctcttcctgtcaccaacacttcctcagtatccacaggtgacaccatgcctcttcctgtcactagcccttcctcagcatccacaggtcacgccacccctcttcctgtcaccagcacttcctcagcatccaccggtcacgccacccctgttcctgtcaccagcacttcctcagcatctacaggtcacaccacccctcttcctgtcaccgacacttcctcagcatccacaggtgacaccacccctcttcctgtcaccagcccttcctcagcatctacaggtcacaccacccctcttcatgtcaccatcccttcctcagcatccacaggtgacaccagcactcttcctgtcaccggcgcttcctcagcatccaccggtcacgccacccctcttcctgtcaccgacacttcctcagtatccaccggtcacgccacgcctcttcctgtcaccagcctttcctcagtatccacaggtgacaccacccctcttcctgtcaccgacgcttcctcggcatccacaggtcaggccacccctcttcctgtcaccagcctttcctcagtatccacaggtgacaccacccctcttcttgtcaccgacgcttcctcagtatccacaggtcacgccacccctcttcctgtcaccgacacttcctcagcatccacaggtgacaccacccgtcttcctgtcacggacacttcctcagcatccacaggtcaggccacccctcttcctgtcaccagcctttcctcagtatccacaggtgacaccacccctcttcttgtcaccgacgcttcctcagtatccacaggtcacgccacccctcttcctgtcaccgacacttcctcagcatccacaggtgacaccacccgtcttcctgtcacggacacttcctcagcatccacaggtcaggccacccctcttcctgtcaccatcccttcctcatcatcctcaggtcacaccacccctcttcctgtcaccagcacttcctcagtatctacaggtcacgtcacccctcttcatgtcaccagcccttcctcagcatccacaggtcacgtcacccctcttcctgtcaccagcacttcctcagcatccacaggtcacgccacccctcttcttgtcaccgacgcttcctcagtgtccacaggtcacgccacgcctcttcctgtcaccgacgcttcctcagcatccacaggtgacaccacccctcttcctgtcaccgacacttcctcagcatccacaggtcaggccacccctcttcctgtcaccagcctttcctcagtatccacaggtgacaccacccctcttcctgtcaccgacgcttcctcagcatccacaggtcacgccacccctcttcctgtcaccatcccttcctcagtatccacaggtgacaccatgcctcttcctgtcactagcccttcctcagcatccacaggtcacgccacccctcttcctgttaccggcctttcctcagcttccacaggtgacaccacccctcttcctgtcaccgacacttcctcagcatccacacgtcacgccacccctcttcctgtcaccgacacttcctcagcttccacagatgacaccacccgtcttcctgtcaccgacgtttcctcggcatccacaggacatgccacccctcttcctgtcaccagcacttcctcagcatccacaggtgacaccacccctcttcctgtcaccgacacttcctcagtatccacaggtcacgccacctctcttcctgtcaccagccgttcctcagcatccacaggtcacgccaccccccttcctgtcaccgacacttcctcagtatccacaggtcacgccacccctcttcctgtcaccagcacttcctcagtatctacaggtcacgccacccctcttcctgtcaccagcccttcctcagcatccacaggtcacgccacccctgttcctgtcaccagcacttcctcagcatccacaggtgacaccacccctcttcctgtcaccaatgcttcctcattatccacaggtcacgccacccctcttcatgtcaccagcccttcctcagcatccagaggtgacaccagcactcttcctgtcaccgatgcttcctcagcatccaccggtcacgccacccctcttcctctcaccagcctttcctcagtatccacaggtgacaccacgcctcttcctgtcaccgacacttcctctgcatccacaggtcaggccacccctcttcctgtcaccagcctttcctcagtatccacaggtgacaccacgcctcttcctgtcaccatcccttcctcagcatcctcaggtcacaccacctctcttcctgtcaccgacgcttcctcagtgtccacaggtcacggcacccctcttcctgtcaccagcacttcctcagcatccacaggtgacaccacccctcttcctgtcaccgacacttcctcagcatccacaggtcacgccacccctcttcctgtcaccgacacttcctcagcatccacaggtcacgccacccctcttcctgtcaccagcctttcctcagtatccacaggtcacgccacccctcttgctgtcagcagtgctacctcagcttccacagtatcctcggactcccctctgaagatggaaacaccaggaatgacaacaccgtcactgaagacagacggtgggagacgcacagccacatcaccaccccccacaacctcccagaccatcatttccaccattcccagcactgccatgcacacccgctccacagctgcccccatccccatcctgcctgagagaggagtttccctcttcccctatggggcaggcgccggggacctggagttcgtcaggaggaccgtggacttcacctccccactcttcaagccggcgactggcttcccccttggctcctctctccgtgattccctctacttcacagacaatggccagatcatcttcccagagtcagactaccagattttctcctaccccaacccactcccaacaggcttcacaggccgggaccctgtggccctggtggctccgttctgggacgatgctgacttctccactggtcgggggaccacattttatcaggaatacgagacgttctatggtgaacacagcctgctagtccagcaggccgagtcttggattagaaagatgacaaacaacgggggctacaaggccaggtgggccctaaaggtcacgtgggtcaatgcccacgcctatcctgcccagtggaccctcgggagcaacacctaccaagccatcctctccacggacgggagcaggtcctatgccctgtttctctaccagagcggtgggatgcagtgggacgtggcccagcgctcaggcaacccggtgctcatgggcttctctagtggagatggctatttcgaaaacagcccactgatgtcccagccagtgtgggagaggtatcgccctgatagattcctgaattccaactcaggcctccaagggctgcagttctacaggctacaccgggaagaaaggcccaactaccgtctcgagtgcctgcagtggctgaagagccagcctcggtggcccagctggggctggaaccaggtctcctgcccttgttcctggcagcagggacgacgggacttacgattccaacccgtcagcataggtcgctggggcctcggcagtaggcagctgtgcagcttcacctcttggcgaggaggcgtgtgctgcagctacgggccctggggagagtttcgtgaaggctggcacgtgcagcgtccttggcagttggcccaggaactggagccacagagctggtgctgccgctggaatgacaagccctacctctgtgccctgtaccagcagaggcggccccacgtgggctgtgctacatacaggcccccacagcccgcctggatgttcggggacccccacatcaccaccttggatggtgtcagttacaccttcaatgggctgggggacttcctgctggtcggggcccaagacgggaactcctccttcctgcttcagggccgcaccgcccagactggctcagcccaggccaccaacttcatcgcctttgcggctcagtaccgctccagcagcctgggccccgtcacggtccaatggctccttgagcctcacgacgcaatccgtgtcctgctggataaccagactgtgacatttcagcctgaccatgaagacggcggaggccaggagacgttcaacgccaccggagtcctcctgagccgcaacggctctgaggtctcggccagcttcgacggctgggccaccgtctcggtgatcgcgctctccaacatcctccacgcctccgccagcctcccgcccgagtaccagaaccgcacggaggggctcctgggggtctggaataacaatccagaggacgacttcaggatgcccaatggctccaccattcccccagggagccctgaggagatgcttttccactttggaatgacctggcagatcaacgggacaggcctccttggcaagaggaatgaccagctgccttccaacttcacccctgttttctactcacaactgcaaaaaaacagctcctgggctgaacatttgatctccaactgtgacggagatagctcatgcatctatgacaccctggccctgcgcaacgcaagcatcggacttcacacgagggaagtcagtaaaaactacgagcaggcgaacgccaccctcaatcagtacccgccctccatcaatggtggtcgtgtgattgaagcctacaaggggcagaccacgctgattcagtacaccagcaatgctgaggatgccaacttcacgctcagagacagctgcaccgacttggagctctttgagaatgggacgttgctgtggacacccaagtcgctggagccattcactctggagattctagcaagaagtgccaagattggcttggcatctgcactccagcccaggactgtggtctgccattgcaatgcagagagccagtgtttgtacaatcagaccagcagggtgggcaactcctccctggaggtggctggctgcaagtgtgacgggggcaccttcggccgctactgcgagggctccgaggatgcctgtgaggagccgtgcttcccgagtgtccactgcgttcctgggaagggctgcgaggcctgccctccaaacctgactggggatgggcggcactgtgcggctctggggagctctttcctgtgtcagaaccagtcctgccctgtgaattactgctacaatcaaggccactgctacatctcccagactctgggctgtcagcccatgtgcacctgccccccagccttcactgacagccgctgcttcctggctgggaacaacttcagtccaactgtcaacctagaacttcccttaagagtcatccagctcttgctcagtgaagaggaaaatgcctccatggcagaagtcaacgcctcggtggcatacagactggggaccctggacatgcgggcctttctccgcaacagccaagtggaacgaatcgattctgcagcaccggcctcgggaagccccatccaacactggatggtcatctcggagttccagtaccgccctcggggcccggtcattgacttcctgaacaaccagctgctggccgcggtggtggaggcgttcttataccacgttccacggaggagtgaggagcccaggaacgacgtggtcttccagcccatctccggggaagacgtgcgcgatgtgacagccctgaacgtgagcacgctgaaggcttacttcagatgcgatggctacaagggctacgacctggtctacagcccccagagcggcttcacctgcgtgtccccgtgcagtaggggctactgtgaccatggaggccagtgccagcacctgcccagtgggccccgctgcagctgtgtgtccttctccatctacacggcctggggcgagcactgtgagcacctgagcatgaaactcgacgcgttcttcggcatcttctttggggccctgggcggcctcttgctgctgggggtcgggacgttcgtggtcctgcgcttctggggttgctccggggccaggttctcctatttcctgaactcagctgaggccttgccttgaaggggcagctgtggcctaggctacctcaagactcacctcatccttaccgcacatttaaggcgccattgcttttgggagactggaaaagggaaggtgactgaaggctgtcaggattcttcaaggagaatgaatactgggaatcaagacaagactataccttatccataggcgcaggtgcacagggggaggccataaagatcaaacatgcatggatgggtcctcacgcagacacacccacagaaggacactagcctgtgcacgcgcgcgtgcacacacacacacacacacacgagttcataatgtggtgatggccctaagttaagcaaaatgcttctgcacacaaaactctctggtttacttcaaattaactctatttaaataaagtctctctgactttttgtgtctccaaaa

SEQ ID NO: 198250 - DNA, 16273 bp, Artificial Sequence
  derived and/or modified sequence
gtctgctcctcacactgcagctgctgggccgtggagcttccccagggagccagggggacttttgccgcagccatgaagggggcacgctggaggagggtcccctgggtgtccctgagctgcctgtgtctctgcctccttccgcatgtggtcccaggaaccacagaggacacattaataactggaagtaaaactgctgccccagtcacctcaacaggctcaacaacagcgacactagagggacaatcaactgcagcttcttcaaggacctctaatcaggacatatcagcttcatctcagaaccaccagactaagagcacggagaccaccagcaaagctcaaaccgacaccctcacgcagatgatgacatcaactcttttttcttccccaagtgtacacaatgtgatggagacagctcctccagatgaaatgaccacatcatttccctccagtgtcaccaacacactcatgatgacatcaaagactataacaatgacaacctccacagactccactcttggaaacacagaagagacatcaacagcaggaactgaaagttctaccccagtgacctcagcagtctcaataacagctggacaggaaggacaatcacgaacaacttcctggaggacctctatccaagacacatcagcttcttctcagaaccactggactcggagcacgcagaccaccagggaatctcaaaccagcaccctaacacacagaaccacttcaactccttctttctctccaagtgtacacaatgtgacagggactgtttctcagaagacatctccttcaggtgaaacagctacctcatccctctgtagtgtcacaaacacatccatgatgacatcagagaagataacagtgacaacctccacaggctccactcttggaaacccaggggagacatcatcagtacctgttactggaagtcttatgccagtcacctcagcagccttagtaacatttgatccagaaggacaatcaccagcaactttctcaaggacttctactcaggacacaacagctttttctaagaaccaccagactcagagcgtggagaccaccagagtatctcaaatcaacaccctcaacaccctcacaccggttacaacatcaactgttttatcctcaccaagtggattcaacccaagtggaacagtttctcaggagacattcccttctggtgaaacaaccacctcatccccttccagtgtcagcaatacattcctggtaacatcaaaggtgttcagaatgccaacctccagagactctactcttggaaacacagaggagacatcactatctgtaagtggaaccatttctgcaatcacttccaaagtttcaaccatatggtggtcagacactctgtcaacagcactctcccccagttctctacctccaaaaatatccacagctttccacacccagcagagtgaaggtgcagagaccacaggacggcctcatgagaggagctcattctctccaggtgtgtctcaagaaatatttactctacatgaaacaacaacatggccttcctcattctccagcaaaggccacacaacttggtcacaaacagaactgccctcaacatcaacaggtgctgccactaggcttgtcacaggaaatccatctacagggacagctggcactattccaagggtcccctctaaggtctcagcaataggggaaccaggagagcccaccacatactcctcccacagcacaactctcccaaaaacaacaggggcaggcgcccagacacaatggacacaagaaacggggaccactggagaggctcttctcagcagcccaagctacagtgtgactcagatgataaaaacggccacatccccatcttcttcacctatgctggatagacacacatcccaacaaattacaacggcaccatcaacaaatcattcaacaatacattccacaagcacctctcctcaggaatcaccagctgtttcccaaaggggtcacactcaagccccgcagaccacacaagaatcacaaaccacgaggtccgtctcccccatgactgacaccaagacagtcaccaccccaggttcttccttcacagccagtgggcactcgccctcagaaattgttcctcaggacgcacccaccataagtgcagcaacaacctttgccccagctcccaccggggatggtcacacaacccaggccccgaccacagcactgcaggcagcacccagcagccatgatgccaccctggggccctcaggaggcacgtcactttccaaaacaggtgcccttactctggccaactctgtagtgtcaacaccagggggcccagaaggacaatggacatcagcctctgccagcacctcacctgacacagcagcagccatgacccatacccaccaggctgagagcacagaggcctctggacaaacacagaccagcgaaccggcctcctcagggtcacgaaccacctcagcgggcacagctaccccttcctcatccggggcgagtggcacaacaccttcaggaagcgaaggaatatccacctcaggagagacgacaaggttttcatcaaacccctccagggacagtcacacaacccagtcaacaaccgaattgctgtccgcctcagccagtcatggtgccatcccagtaagcacaggaatggcgtcttcgatcgtccccggcacctttcatcccaccctctctgaggcctccactgcagggagaccgacaggacagtcaagcccaacttctcccagtgcctctcctcaggagacagccgccatttcccggatggcccagactcagaggacaagaaccagcagagggtctgacactatcagcctggcgtcccaggcaaccgacaccttctcaacagtcccacccacacctccatcgatcacatccactgggcttacatctccacaaaccgagacccacactctgtcaccttcagggtctggtaaaaccttcaccacggccctcatcagcaacgccacccctcttcctgtcacctacgcttcctcggcatccacaggtcacaccacccctcttcatgtcaccgatgcttcctcagtatccacaggtcacgccacccctcttcctgtcaccagcccttcctcagtatccacaggtcacaccacccctcttcctgtcaccgacacttcctcagaatccacaggtcacgtcacccctcttcctgtcaccagcttttcctcagcatccacaggtgacagcacccctcttcctgtcactgacacttcctcagcatccacaggtcacgtcacccctcttcctgtcaccagcctttcctcagcatccacaggtgacaccacccctcttcctgtcactgacacttcctcagcatccacaggtcacgccacctctcttcctgtcaccgacacttcctcagtatccacaggtcacaccacccctcttcctgtcaccgacacttcctcagcatccacaggtcacgccacctctcttcctgtcaccgacacttcctcagtatccacaggtcacaccacccctcttcatgtcactgatgcttcctcagcatccacaggtcaggccacccctcttcctgtcaccagcctttcctcagtatccacaggtgacaccacgcctcttcctgtcactagcccttcctcagcatccacaggtcacgccacccctcttcttgtcaccgacacttcctcagcatccacaggacacgccacccctcttcctgtcaccgacgcttcctcagtgtccacagatcacgccacctctcttcctgtaaccatcccttccgcagcatccacaggtcacaccacccctcttcctgtcaccgacacttcctcagcatccacaggtcaggccacctctcttcttgtcaccgacacttcctcagtatccacaggtgacaccacgcctcttcctgtcactagcacttcctcagcatccacaggtcacgtcactcctcttcatgtcaccagcccttcctcagcatccacaggtcacgccacccctcttcctgtcaccagcctttcctcagcatccacaggtgacaccatgcctcttcctgtcactagcccttcctcagcatccacaggtgacaccacccctcttcctgtcaccgacgcttcctcagtatccacaggtcacaccacccctcttcatgtcactgatgcttcctcagcatccacaggtcaggccacccctcttcctgtcaccagcctttcctcagtatccacaggtgacaccacgcctcttcctgtcactagcccttcctcagcatccacaggtcacgccacccctcttcttgtcaccgacacttcctcagcatccacaggacacgccacccctcttcctgtcaccgacgcttcctcagtgtccacagatcacgccacctctcttcctgtaaccatcccttccgcagcatccacaggtcacaccacccctcttcctgtcaccgacacttcctcagcatccacaggtcaggccacctctcttcttgtcaccgacacttcctcagtatccacaggtgacaccacgcctcttcctgtcactagcacttcctcagcatccacaggtcacgtcactcctcttcatgtcaccagcccttcctcagcatccacaggtcacgccacccctcttcctgtcaccagcctttcctcagcatccacaggtgacaccatgcctcttcctgtcactagcccttcctcagcatccacaggtgacaccacccctcttcctgtcaccgacgcttcctcagtatccacaggtcacaccacccctcttcctgtcaccagcccttcctcagcatctacaggtcacaccacccctcttcctgtcaccgacacttcctcagcatccaaaggtgacaccacccctcttcctgtcaccagcccttcctcagcatctacaggtcacaccacccctcttcctgtcaccgacacttcctcagcatccacaggtgacaccacccctcttcctgtcaccaatgcttcctcattatccacaggtcacgccacccctcttcatgtcaccagcccttcctcagcatccacaggtcacgccacccctcttcctgtcaccagcacttcctcagcatccaccggtcacgccacccctcttcctgtcaccggcctttcctcagctaccacagatgacaccacccgtcttcctgtcaccgacgtttcctcggcatccacaggtcaggccacccctcttcctgtcaccagcctttcctcagtatccacaggtgacaccacgcctcttcctgtcactagcccttcctcagcatccacaggtcacgccagccctcttcttgtcactgacgcttcctcagcatccacaggtcaggccacccctcttcctgtcaccgacacttcctcagtatccacagctcacgccaccccacttcctgtcaccggcctttcttcagcttccacagatgacaccacccgtcttcctgtcaccgacgtttcctcggcatccacaggtcaggccatccctcttcctgtcaccagcccttcctcagcatccacaggtgacaccacccctcttcctgtcaccgacgcttcctcagcatccacaggtgacaccacctctcttcctgtcaccatcccttcctcagcatcttcaggtcacaccacctctcttcctgtcaccgacgcttcctcagtgtccacaggtcacgccacctctcttcttgtcaccgacgcttcctcagtatccacaggtgacaccacccctcttcctgtcaccgacactaactcagcatccacaggtgacaccacccctcttcatgtcaccgacgcttcctcagtatccacaggtcacgccacctctcttcctgtcaccagcctttcctcagcatccacaggtgacaccacgcctcttcctgtcactagcccttcctcagcatcctcaggtcacaccacccctcttcctgtcaccgacgcttcctcagtacccacaggtcacgccacctctcttcctgtcaccgacgcttcctcagtgtccacaggtcacgccacccctcttcctgtcaccgacgcttcctcagtgtccacaggtcatgccacccctcttccggtcaccgacacttcctcagtatctacaggacaggccacccctcttcctgtcaccagcctttcctcagcatccactggtgacaccacgccgcttcctgtcaccgatacttcctcagcatccacaggtcaggacacccctcttcctgtcaccagcctttcctcagtatccacaggtgacaccacgcctcttcctgtcactaacccttcctcagcatccacaggtcacgccacccctcttcttgtcaccgacgcttcctcaatatccacaggtcacgccacctctcttcttgtcaccgacgcttcctcagtatccacaggtcacgccaccgctcttcatgacaccgatgcttcctcattatccacaggggacaccacccctcttcctgtcaccagcccttcctcaacatccacaggtgacaccacccctcttcctgtcaccgaaacttcctcagtatccacaggtcacgccacctctcttcctgtcaccgacacttcctcagcatccacaggtcacgccacctctcttcctgtcaccgacacttcctcagcatccacaggtcacgccacccctcttcctgtcaccgacacttcctcagcatccacaggtcaggccacccctcttcctgtcaccagcccttcctcagcatccacaggtcacgccatccctcttcttgtcaccgacacttcctcagcatccacaggacaggccacccctcttcctgtcaccagcctttcctcagcatccacaggtgacaccacccctcttcctgtcaccgacgcttcctcagtgtccacaggtcacgccacctctcttcctgtcaccagcctttcctcagtatccacaggtgacaccactcctcttcctgtcactagcccttcctcagcatccacaggtcacgccacccctcttcatgtcaccgacgcttcctcagcatccacaggtcacgccacccctcttcctgtcaccagcctttcctcagcatccacaggtgacaccacgcctcttcctgtcactagcccttcctcagcatccacaggtcacgccacccctcttcatgtcaccgacgcttcctcagtatccacaggtgacaccacccctcttcctgtcaccagctcttcctcagcatcctcaggtcacaccacccctcttcctgtcaccgacgcttcctcagcatccacaggtgacaccacccctcttcctgtcaccgacacttcctcagcatccacaggtcacgccacccatcttcctgtcaccggcctttcctcagcttccacaggtgacaccacccgtcttcctgtcaccaacgtttcctcggcatccacaggtcatgccacccctcttcctgtcaccagcacttcctcagcatccacaggtgacaccacccctcttcctggcaccgacacttcctcagtatccacaggtcacaccacccctcttcttgtcaccgacgcttcgtcagtatccacaggtgacaccacccgtcttcctgtcaccagcccttcctcagcatctacaggtcacaccacccctctacctgtcaccgacactccctcagcatccacaggtgacaccacccctcttcctgtcaccaatgcttcctcattatccacacgtcacgccacctctcttcatgtcaccagcccttcctcagcatccacaggtcacgccacctctcttcctgtcaccgacacttccgcagcatccacaggtcacgccacccctcttcctgtcaccagcacttcctcagcatccacaggtgacaccacccctcttcctgtcaccgacacttactcagcatccacaggtcaggccacccctcttcctgtcaccagcctttcctcagtatccacaggtgacaccacgcctcttcctgtcactagcccttcctcagcatccacaggtcacgccactcctcttcttgtcaccgacgcttcctcagcatccacaggtcaggccacccctcttcctgtcaccagcctttcctcagtatccacaggtgacaccacgcctcttcctgtcactagcccttcctcagcatccaccggtcatgccacctctcttcctgtcaccgacacttcctcagcatccacaggtgacaccacctctcttcctgtcaccgacacttcctcagcatacacaggtgacaccacctctcttcctgtcaccgacacttcctcatcatccacaggtgacaccacccctcttcttgtcaccgagacttcctcagtatccacaggtgacaccacccctcttcctgtcaccgacacttcctcagcatccacaggtcacgccacccctcttcctgtcaccaacacttcctcagtatccacaggtcacgccacccctcttcatgtcaccagcccttcctcagcatccacaggtcacaccacccctcttcctgtcaccgacgcttcgtcagtgtccacaggtcacgccacctctcttcctgtcaccgacgcttcctcagtgttcacaggtcatgccacctctcttcctgtcaccatcccttcctcagcatcctcaggtcacaccacccctcttcctgtcaccgacgcttcctcagtgtccacaggtcacgccacctctcttcctgtcaccgacgcttcctcagtgtccacaggtcatgccacccctcttcctgtcaccgacgcttcctcagtgtccacaggtcacgctacccctcttcctctcaccagcctttcctcagtatccacaggtgacaccacgcctcttcctgtcaccgacacttcctcagcatccacaggtcaggccacccctcttcctgtcaccagcctttcctcagtatccacaggtgacaccacccctcttcctgtcaccgacacttcctcagcatccacaggtcacgccacctctcttcctgtcaccgacacttcctcagcatccacaggtcacgccacccctcttcctgacaccgacacttcctcagcatccacaggtcacgccacccttcttcctgtcaccgacacttcctcagcatccataggtcacgccacctctcttcctgtcaccgacacttcctcaatatccacaggtcacgccacccctcttcatgtcaccagcccttcctcagcatccaccggtcacgccaccccgcttcctgtcaccgacacttcctcagcatccacaggtcacgccaaccctcttcatgtcaccagcccttcctcagcatccaccggtcacgccaccccgcttcctgtcaccgacacttcctcagcatccacaggtcacgccacccctcttcctgtcaccagcctttcctcagtatccacaggtgacaccacgcctcttcctgtcactagcccttcctcagcatccacaggtcacaccacccctcttcctgtcaccgacacttcctcagcatccacaggtcaggccaccgctcttcctgtcaccagcacttcctcagcatccacaggtgacaccacccctcttcctgtcaccgacacttcctcagcatccacaggtcaggccacccctcttcctgtcaccagcctttcctcagtatccacaggtgacaccacgcctcttcctgtcactagcccttcctcagcatccacaggtcacgccactcctcttcttgtcaccgacgcttcctcagcatccacaggtcaggccacccctcttcctgtcaccagcctttcctcagtatccacaggtgacaccacgcctcttcctgtcactagcccttcctcagcatccaccggtcatgccacctctcttcctgtcaccgacacttcctcagcatccacaggtgacaccacctctcttcctgtcaccgacacttcctcagcatacacaggtgacaccacctctcttcctgtcaccgacacttcctcatcatccacaggtgacaccacccctcttcttgtcaccgagacttcctcagtatccacaggtcacgccactcctcttcttgtcaccgacgcttcctcagcatccacaggtcacgccacccctcttcatgtcaccagcccttcctcagcatccacaggtgacaccacccctgtgcctgtcaccgacacttcctcagtatccacaggtcacgccacccctcttcctgtcaccggcctttcctcagcttccacaggtgacaccacccgtcttcctgtcaccgacatttcctcggcatccacaggtcaggccacccctcttcctgtcaccaacacttcctcagtatccacaggtgacaccatgcctcttcctgtcactagcccttcctcagcatccacaggtcacgccacccctcttcctgtcaccagcacttcctcagcatccaccggtcacgccacccctgttcctgtcaccagcacttcctcagcatctacaggtcacaccacccctcttcctgtcaccgacacttcctcagcatccacaggtgacaccacccctcttcctgtcaccagcccttcctcagcatctacaggtcacaccacccctcttcatgtcaccatcccttcctcagcatccacaggtgacaccagcactcttcctgtcaccggcgcttcctcagcatccaccggtcacgccacccctcttcctgtcaccgacacttcctcagtatccaccggtcacgccacgcctcttcctgtcaccagcctttcctcagtatccacaggtgacaccacccctcttcctgtcaccgacgcttcctcggcatccacaggtcaggccacccctcttcctgtcaccagcctttcctcagtatccacaggtgacaccacccctcttcttgtcaccgacgcttcctcagtatccacaggtcacgccacccctcttcctgtcaccgacacttcctcagcatccacaggtgacaccacccgtcttcctgtcacggacacttcctcagcatccacaggtcaggccacccctcttcctgtcaccagcctttcctcagtatccacaggtgacaccacccctcttcttgtcaccgacgcttcctcagtatccacaggtcacgccacccctcttcctgtcaccgacacttcctcagcatccacaggtgacaccacccgtcttcctgtcacggacacttcctcagcatccacaggtcaggccacccctcttcctgtcaccatcccttcctcatcatcctcaggtcacaccacccctcttcctgtcaccagcacttcctcagtatctacaggtcacgtcacccctcttcatgtcaccagcccttcctcagcatccacaggtcacgtcacccctcttcctgtcaccagcacttcctcagcatccacaggtcacgccacccctcttcttgtcaccgacgcttcctcagtgtccacaggtcacgccacgcctcttcctgtcaccgacgcttcctcagcatccacaggtgacaccacccctcttcctgtcaccgacacttcctcagcatccacaggtcaggccacccctcttcctgtcaccagcctttcctcagtatccacaggtgacaccacccctcttcctgtcaccgacgcttcctcagcatccacaggtcacgccacccctcttcctgtcaccatcccttcctcagtatccacaggtgacaccatgcctcttcctgtcactagcccttcctcagcatccacaggtcacgccacccctcttcctgttaccggcctttcctcagcttccacaggtgacaccacccctcttcctgtcaccgacacttcctcagcatccacacgtcacgccacccctcttcctgtcaccgacacttcctcagcttccacagatgacaccacccgtcttcctgtcaccgacgtttcctcggcatccacaggacatgccacccctcttcctgtcaccagcacttcctcagcatccacaggtgacaccacccctcttcctgtcaccgacacttcctcagtatccacaggtcacgccacctctcttcctgtcaccagccgttcctcagcatccacaggtcacgccaccccccttcctgtcaccgacacttcctcagtatccacaggtcacgccacccctcttcctgtcaccagcacttcctcagtatctacaggtcacgccacccctcttcctgtcaccagcccttcctcagcatccacaggtcacgccacccctgttcctgtcaccagcacttcctcagcatccacaggtgacaccacccctcttcctgtcaccaatgcttcctcattatccacaggtcacgccacccctcttcatgtcaccagcccttcctcagcatccagaggtgacaccagcactcttcctgtcaccgatgcttcctcagcatccaccggtcacgccacccctcttcctctcaccagcctttcctcagtatccacaggtgacaccacgcctcttcctgtcaccgacacttcctctgcatccacaggtcaggccacccctcttcctgtcaccagcctttcctcagtatccacaggtgacaccacgcctcttcctgtcaccatcccttcctcagcatcctcaggtcacaccacctctcttcctgtcaccgacgcttcctcagtgtccacaggtcacggcacccctcttcctgtcaccagcacttcctcagcatccacaggtgacaccacccctcttcctgtcaccgacacttcctcagcatccacaggtcacgccacccctcttcctgtcaccgacacttcctcagcatccacaggtcacgccacccctcttcctgtcaccagcctttcctcagtatccacaggtcacgccacccctcttgctgtcagcagtgctacctcagcttccacagtatcctcggactcccctctgaagatggaaacaccaggaatgacaacaccgtcactgaagacagacggtgggagacgcacagccacatcaccaccccccacaacctcccagaccatcatttccaccattcccagcactgccatgcacacccgctccacagctgcccccatccccatcctgcctgagagaggagtttccctcttcccctatggggcaggcgccggggacctggagttcgtcaggaggaccgtggacttcacctccccactcttcaagccggcgactggcttcccccttggctcctctctccgtgattccctctacttcacagacaatggccagatcatcttcccagagtcagactaccagattttctcctaccccaacccactcccaacaggcttcacaggccgggaccctgtggccctggtggctccgttctgggacgatgctgacttctccactggtcgggggaccacattttatcagagcaacacctaccaagccatcctctccacggacgggagcaggtcctatgccctgtttctctaccagagcggtgggatgcagtgggacgtggcccagcgctcaggcaacccggtgctcatgggcttctctagtggagatggctatttcgaaaacagcccactgatgtcccagccagtgtgggagaggtatcgccctgatagattcctgaattccaactcaggcctccaagggctgcagttctacaggctacaccgggaagaaaggcccaactaccgtctcgagtgcctgcagtggctgaagagccagcctcggtggcccagctggggctggaaccaggtctcctgcccttgttcctggcagcagggacgacgggacttacgattccaacccgtcagcataggtcgctggggcctcggcagtaggcagctgtgcagcttcacctcttggcgaggaggcgtgtgctgcagctacgggccctggggagagtttcgtgaaggctggcacgtgcagcgtccttggcagttggcccaggaactggagccacagagctggtgctgccgctggaatgacaagccctacctctgtgccctgtaccagcagaggcggccccacgtgggctgtgctacatacaggcccccacagcccgcctggatgttcggggacccccacatcaccaccttggatggtgtcagttacaccttcaatgggctgggggacttcctgctggtcggggcccaagacgggaactcctccttcctgcttcagggccgcaccgcccagactggctcagcccaggccaccaacttcatcgcctttgcggctcagtaccgctccagcagcctgggccccgtcacggtccaatggctccttgagcctcacgacgcaatccgtgtcctgctggataaccagactgtgacatttcagcctgaccatgaagacggcggaggccaggagacgttcaacgccaccggagtcctcctgagccgcaacggctctgaggtctcggccagcttcgacggctgggccaccgtctcggtgatcgcgctctccaacatcctccacgcctccgccagcctcccgcccgagtaccagaaccgcacggaggggctcctgggggtctggaataacaatccagaggacgacttcaggatgcccaatggctccaccattcccccagggagccctgaggagatgcttttccactttggaatgacctggcagatcaacgggacaggcctccttggcaagaggaatgaccagctgccttccaacttcacccctgttttctactcacaactgcaaaaaaacagctcctgggctgaacatttgatctccaactgtgacggagatagctcatgcatctatgacaccctggccctgcgcaacgcaagcatcggacttcacacgagggaagtcagtaaaaactacgagcaggcgaacgccaccctcaatcagtacccgccctccatcaatggtggtcgtgtgattgaagcctacaaggggcagaccacgctgattcagtacaccagcaatgctgaggatgccaacttcacgctcagagacagctgcaccgacttggagctctttgagaatgggacgttgctgtggacacccaagtcgctggagccattcactctggagattctagcaagaagtgccaagattggcttggcatctgcactccagcccaggactgtggtctgccattgcaatgcagagagccagtgtttgtacaatcagaccagcagggtgggcaactcctccctggaggtggctggctgcaagtgtgacgggggcaccttcggccgctactgcgagggctccgaggatgcctgtgaggagccgtgcttcccgagtgtccactgcgttcctgggaagggctgcgaggcctgccctccaaacctgactggggatgggcggcactgtgcggctctggggagctctttcctgtgtcagaaccagtcctgccctgtgaattactgctacaatcaaggccactgctacatctcccagactctgggctgtcagcccatgtgcacctgccccccagccttcactgacagccgctgcttcctggctgggaacaacttcagtccaactgtcaacctagaacttcccttaagagtcatccagctcttgctcagtgaagaggaaaatgcctccatggcagaagtcaacgcctcggtggcatacagactggggaccctggacatgcgggcctttctccgcaacagccaagtggaacgaatcgattctgcagcaccggcctcgggaagccccatccaacactggatggtcatctcggagttccagtaccgccctcggggcccggtcattgacttcctgaacaaccagctgctggccgcggtggtggaggcgttcttataccacgttccacggaggagtgaggagcccaggaacgacgtggtcttccagcccatctccggggaagacgtgcgcgatgtgacagccctgaacgtgagcacgctgaaggcttacttcagatgcgatggctacaagggctacgacctggtctacagcccccagagcggcttcacctgcgtgtccccgtgcagtaggggctactgtgaccatggaggccagtgccagcacctgcccagtgggccccgctgcagctgtgtgtccttctccatctacacggcctggggcgagcactgtgagcacctgagcatgaaactcgacgcgttcttcggcatcttctttggggccctgggcggcctcttgctgctgggggtcgggacgttcgtggtcctgcgcttctggggttgctccggggccaggttctcctatttcctgaactcagctgaggccttgccttgaaggggcagctgtggcctaggctacctcaagactcacctcatccttaccgcacatttaaggcgccattgcttttgggagactggaaaagggaaggtgactgaaggctgtcaggattctt

SEQ ID NO: 198251 - DNA, 5739 bp, Artificial Sequence
  derived and/or modified sequence
cccggcaccaccgaggacaccctgatcaccggcagcaagaccgccgccccggtgacctcgacaggaagcactactgctacactagaaggacaaagcacggctgcctcgagcagaaccagcaatcaggatatctctgcgtcaagtcaaaatcaccaaaccaagtccacggaaactacgtccaaggcccaaaccgacactttgactcagatgatgaccagtaccctgttcagcagtccttcagtccataatgtgatggagacagctccaccagacgagatgacaacctcatttccttccagcgtcactaatacactgatgatgaccagtaagacgatcacaatgactacctcgactgacagtacgctcggtaatactgaggaaaccagcacagcaggcactgagtctagcacccccgtgacatcggctgtttccatcactgccggccaggagggccagagtagaaccacatcctggagaacatcaattcaagacacttccgcctcgtcccagaaccattggacaagaagcacacagacgactcgggagagccagacaagcacactgacccatcgaacgactagtaccccttccttcagcccctcggttcataatgtgaccggtaccgtgagccaaaagacctcaccatctggggaaacagcaactagctctctttgtagcgtaactaatacaagcatgatgacgagcgagaaaataaccgtgacaacctccacaggaagcactctgggcaacccaggggagacctcatcagtgccggtgacgggtagccttatgcctgttaccagcgcagcattggtcactttcgatcccgaaggccagagtccagccaccttttccaggacctctactcaggatacaacagccttcagcaagaaccaccagacccagtccgtggagaccactcgcgtgtcgcagattaacaccttgaacacactaacacccgttactacttctacagtactctcctctcccagcggattcaatccatcaggcacagttagccaggaaactttcccctctggcgaaacaacaacaagctctcccagtagcgtttccaataccttcttagtgaccagcaaggttttccggatgcctacctccagagattccactctgggaaacaccgaagaaacttctttgtctgtatcgggaaccatttctgccatcaccagtaaggtgtccacgatctggtggagtgatacattaagtaccgcattgagtccttcctcactgcccccgaagattagcaccgcttttcacacacagcaatctgagggggccgagacaacaggaagaccccacgaaaggtcgtccttttcacctggggtgagccaggaaatctttacactccacgaaacaactacatggccatcttcatttagctcgaagggacacactacatggtcacagacagaattaccctctacgtccactggggctgccacacgactggtaaccggcaaccctagtaccggtactgcggggactattcctcgtgtgccctccaaggtgtccgcaattggcgagccgggtgagcccacaacttactcaagccatagcactaccctgcccaagacaacgggagcgggcgcccagacgcagtggacacaggagaccggcacaaccggggaggcacttctctctagcccttcatacagtgtaacccaaatgatcaagactgcaacatcgcctagtagcagccctatgctggatcggcacacctctcaacagatcacaactgccccgtctaccaatcactctaccattcactctaccagcacgagtcctcaggaaagcccggctgtgagccagaggggacacacgcaggcaccacagaccacacaggagagccaaacgaccaggtcagtttcaccaatgacagatacaaagacagtcacaacaccgggcagcagttttactgcttccggccattctccatcagagatcgtgccacaagacgccccaacaatttccgccgctacgacattcgctcctgcgcccacaggggacggccacaccacccaggccccgaccactgccctccaggcggcaccttcgtcacatgacgccacattgggcccttctggaggtacttcactctccaagaccggggcgttgacgttggccaactccgtcgtctccaccccgggcggtcccgaaggccaatggaccagcgcttccgcctccacctcccccgacaccgctgctgctatgacacatacccaccaggccgaaagtacagaggcctctggccagacacagacctccgaacccgcgtcgagcggcagccggacaacctccgctgggacagcaaccccctcctcttccggcgcaagtggtaccaccccctctggatctgaggggatctccaccagtggagagactacccgtttctctagcaacccatcgcgtgacagccacacgacccagtccactaccgagctgctcagcgcgtctgccagtcatggtgcaataccagtgagcaccggaatggcatcttcaattgttcctggcacatttcacccaacgttgagcgaagctagtaccgcaggtagacctacagggcagtcatcacccaccagtccctctgcctcaccacaggagaccgcagccatctctaggatggcgcagacccagagaacccggacctccaggggttcggacacaatttccttggcgtcacaggctaccgacacattctcgacagtgcccccaaccccaccgtctatcacgagcacgggcctgactagcccccagactgaaactcatacactcagtccaagtggcagcggcaagacctttacaaccgcattgatcagtaacgctacccctcttcccgtgacatacgcatcttccgcatctacaggccacgctactcctctcgctgtctcatcagccacatctgcttctacagtcagcagcgacagccctctgaagatggagaccccagggatgactaccccctcgcttaaaaccgatggtggccggaggaccgccaccagcccccctcctacgacttcacagaccatcatttctaccatcccctctaccgcaatgcataccagatcaacggccgcacccatcccaattttaccggagagaggcgtgtcgcttttcccatatggagccggcgctggtgatctcgagtttgtgcgaaggaccgtagacttcaccagcccccttttcaaaccggccacgggctttccactgggcagttcactgagagactctctttattttactgataacgggcagatcatctttcctgagtcggactatcaaattttctcataccccaacccacttcccaccggatttacaggacgggatccggtggctttggtggcccccttctgggacgatgcggacttttccacaggtaggggcacaactttctaccaggagtacgaaacattctacggcgagcactccctgcttgttcagcaggcagagtcctggatccgaaaaatgactaataacggcggctataaggctagatgggcactcaaggttacctgggtcaatgcccatgcttaccctgctcagtggaccttaggctcaaacacctaccaggcaatactgagtaccgacggctccagaagttacgccctgtttttgtatcagtcagggggcatgcagtgggacgtggcacaacggtccggtaatcccgtgcttatgggatttagcagtggtgacggttacttcgagaatagcccactgatgtctcagccggtttgggagagatacagacctgatcgctttctgaactccaacagtggtttacagggtctacagttctatagactccaccgggaagagagacccaactacagactggaatgtcttcagtggctcaagtcacagcctcgatggccctcctggggttggaatcaggtgtcgtgcccttgttcgtggcagcagggaagaagggacctccggttccagcctgcaagccttccgcccgaatatcagaacagaaccgaaggtttgctgggggtgtggaacaataaccctgaggatgattttagaatgcctaatggcagcacgatcccgccggggtctcccgaagagatgctgttccattttgggatgacttggcagattaatggaactggactgcttggcaaaagaaacgaccaactgccaagcaattttaccccagtgttctatagccagctgcagaaaaacagctcttgggccgaacatttaatcagtaactgcgacggagacagctcctgtatctatgacaccttagctctgaggaatgcctcaatcggtctgcacaccagagaagtctccaaaaattacgagcaagcgaatgctacgttaaatcagtacccaccctccattaacggcggcagagtaatagaggcatacaaaggacagactactctgatccagtacaccagtaacgcagaagacgccaattttactctgcgcgatagctgcaccgatctcgagctgtttgagaacggaaccctgttatggaccccaaagtcactggagccattcacactggagatcctagccagatccgcgaagatcgggctggcaagtgccttgcagccacgtaccgtcgtttgccattgcaatgctgaatctcaatgcctgtataaccaaacttctcgcgtggggaactccagcctggaagtcgcagggtgtaagtgtgacggaggcacctttggtcgatactgcgagggaagtgaggatgcctgtgaggaaccctgcttcccctcagtgcactgcgtaccaggcaaagggtgtgaggcctgtccaccaaacctaaccggcgacggccgtcactgtgctgctttgggctcatctttcctgtgccagaatcagtcctgcccagttaactattgctataatcagggccattgctatatctcgcagaccttgggctgccagccgatgtgtacgtgccctccggccttcacagattctcgctgctttctggccggcaataattttagtccaacggttaacttggaattgcccctccgtgtcatccaacttctattgtccgaggaggagaatgcaagcatggccgaggtgaacgcttccgtggcctaccggttagggaccctcgatatgcgggctttcctgagaaatagccaagtggaacgcatcgattcagctgctcccgcctccgggagccccattcaacactggatggtgataagcgaatttcaatacagaccccgtggacccgtgatagactttctcaataatcagctcctggccgccgtcgtcgaggcgttcttgtatcacgtgccaaggcgcagtgaagagccgagaaacgacgtcgtctttcagcctatctcaggagaggatgtgcgggatgtcactgcccttaacgttagtaccctaaaggcttatttcagatgcgatggatacaagggctacgacctcgtctactcccctcagagcgggttcacatgcgtatcaccatgttctcggggatactgcgatcacggaggtcagtgtcagcacctgccatctggacccagatgcagctgcgtgtccttctcaatctatacagcttggggggaacactgtgagcatctgtctatgaagctggatgcatttttcggaatctttttcggggctcttggcggcctgcttctacttggagtcggaaccttcgtagttctgcgcttttgggggtgctccggcgcaagattttcatactttctgaattcggccgaggccctgccatag

SEQ ID NO: 198252 - DNA, 16239 bp, Artificial Sequence
  derived and/or modified sequence
atgaagggcgcccggtggcggcgggtgccctgggtgagcctgagctgtctctgtctctgtttactgcctcatgtcgtgcccgggacaaccgaagacactttaattacgggatccaagaccgctgctcccgtgacctcaactggcagtactaccgccaccctcgaggggcagtcaactgctgcaagttcccggacatcgaatcaggacataagcgctagtagccagaatcaccagactaagtccactgaaactaccagcaaggcacagaccgataccttgactcagatgatgaccagtaccctattctcgtcgccttcagtacataacgtgatggagaccgcacctccggacgaaatgacgaccagttttcccagctcagtcactaatactctcatgatgaccagcaagacgatcactatgaccacttctacagactctactttaggcaatactgaggagaccagcacagccggcacggagagcagcacccctgtcactagcgctgtatcgattacagccgggcaagagggacagtcccgcaccacatcatggagaacgtccatacaggatacttccgcgagcagtcagaatcattggacccgtagtacgcaaaccacaagagaatcgcagacctcgactttaacgcacagaaccacatctactccctctttctctccatccgtgcacaatgtaaccggcacagtctcgcaaaagacttcaccaagcggtgaaaccgctacttcatccttgtgcagcgtgaccaatacttccatgatgacatcagaaaagatcacagtcaccacctctactggatcaacattgggtaatccgggtgaaacctcatctgtgcccgtgaccggctctctcatgcccgttacttcagccgcgctagtgacgtttgatcccgagggtcaatctcccgccacattttcacgcacatcaactcaggatacgacagcttttagcaaaaaccatcagactcagtccgtggagaccacaagggtttcccagatcaacacacttaacacactgactcctgtcacgacaagcactgtcctgtccagcccttcggggtttaacccctcagggactgttagtcaggagaccttcccttctggggagaccaccacaagctctccaagtagtgtctcaaataccttcttggtaacctctaaagtttttaggatgccaacttctcgggactctacactggggaatactgaggaaacttcgttgtccgtgtctggtaccattagcgcgattacctctaaagtcagcactatttggtggtctgacaccctcagcacggcactgtcaccaagcagtcttcccccaaagatctccactgcctttcacacccaacagtccgaaggcgctgaaacaacaggacggcctcatgagaggagctccttcagccctggagtgtcccaggagatctttacactccatgaaaccacaacatggccatcctctttctcatccaagggtcacacaacctggtctcagacagaattaccctcaacaagtaccggggccgcaactcgcctcgtcacggggaatccctccacaggcacagctgggacgattccgagggtcccatcaaaggtgtcagctatcggagagcctggcgagccaaccacttacagtagtcactccactacccttccgaaaacgacaggcgccggcgctcagacccagtggacacaggaaactggcactacaggcgaggctcttctgtctagtccttcctacagcgtaactcagatgattaaaactgcgacttccccatctagcagccccatgttagataggcacacaagccagcagataacaacagcaccatcaaccaatcacagtactatccactccacctccacctctccacaggagtcaccagccgtgtctcagcgcggacatacgcaggcaccccagaccacgcaagaatcgcagaccactcgttcagtcagcccgatgacagacaccaaaacagtaactactcccggcagctcttttacggcatcaggccactctccttctgagatagttcctcaggacgctccaaccatttctgctgcaaccaccttcgctcccgccccaactggcgacgggcacaccacacaggcccccacgactgccctccaggcagctccatcttcacacgatgccacactcggaccgtccggaggcacctcccttagtaaaacaggcgctctcactctagcaaactctgtcgtcagcactcccggcgggccagaagggcaatggactagcgcctccgcaagcacatcgccggatactgctgctgcaatgacgcacacccaccaagctgagtccaccgaagcatctggacagacgcagaccagtgaaccagcgtcttccggaagcaggacaaccagcgctggaaccgcaacaccatcgtctagtggcgcaagcggaacgaccccaagcggttctgaaggtattagcactagtggagaaactacccggttctcctccaacccaagccgggacagccacacaactcagagcacaaccgagctcctgtctgccagcgctagccacggcgccatccctgtcagcaccggcatggcctccagtattgttcccggtacttttcatccaacactaagcgaagcctccaccgctggtagaccaactgggcagtccagtcccacatcccctagcgcgtctccacaggagaccgcagcaatttccagaatggctcagactcagcgcacaagaacttccagaggtagcgatacaatctccctggcatctcaggccaccgacacatttagcaccgtccctccaacaccgccgtctataacttccaccggcctcacatctccccagaccgaaacccacacactgtctccttctgggagcggaaagaccttcactactgcgctgatttctaatgccacgcctctccccgtgacatacgcgagctctgcgagtaccggacacaccaccccgctccacgtgaccgacgcctcctctgtgagcacagggcatgccaccccccttcctgtgacttctccgagtagcgtgtccaccgggcacacgactccattgccggttactgatacctccagtgaatccaccgggcatgtgaccccccttcccgttacctcctttagttctgcttcaactggagacagcacgccactacccgtgactgataccagctccgcatctactggccacgttacccctctgcctgtaacaagcctgagcagtgcctcaaccggggataccacgccactgccagtcacggatacatccagcgcctccaccggacatgctacatcactgcccgtgaccgatacttccagcgtgtccactggacatactacacctttacccgtaacagacaccagcagtgctagcacaggtcacgcgacctctctgcctgttaccgacaccagctcggtcagcacgggccacaccacacccctgcacgtaacagacgcatcttccgcaagcacggggcaggccacacctctcccagttacttcgctcagctcggtatctactggcgacactacaccattgcctgtcacttccccctcctcggccagtacgggccacgccactcctctgctggttaccgacacaagcagcgccagcaccggtcacgctacaccattgccagtgacggatgcctcaagtgtgagcaccgatcatgccacctctttgcctgtcacaattccctccgcagcatccaccggccataccacacccctgcctgtgaccgacacaagcagtgcttcaacaggacaggccacatcccttctcgttactgatacaagcagtgtgtccaccggcgataccacgccccttcctgtgactagtacatcctcagcttccacgggacacgtgacacccctacacgtgacatcccccagctccgcaagcactggtcatgcaactccactgcccgtaacttcattaagtagcgcttccaccggcgatactatgcccttgcccgttacatcaccatcctcagccagtaccggcgataccacccccttgcctgtgacggatgccagctcagtgagcactggccacacgacacccctccacgttaccgacgccagtagcgcttctacagggcaggccactcccctccctgtgacctctttaagctcagtgagcacgggggataccactccgctgccagtgacttccccctctagcgcatctacaggacatgcaaccccacttttggttactgacacgtcctccgcgagcacaggacacgccaccccgcttccagtgacagatgcctcctctgtgagcaccgaccacgctacatccctccctgtcacgatcccaagcgccgcatcgacaggccacacaactccgctgcctgtcaccgacactagttcggcctccacgggacaggcaacatcactcctggtgacggacacaagcagtgtcagtacaggcgacaccacaccgttgcccgttacaagcaccagttccgcatccactggccacgtgacaccgctgcatgtcacatccccaagcagcgccagcaccggacatgcaaccccactacctgtgacgagcttgtcatcagcatcaactggggatacaatgccccttccagtcacatccccctcctctgcatcgaccggcgatacgaccccactcccggtgaccgacgcctctagcgtctcaacaggccacactactcctctccccgttacatccccaagcagtgcttcaaccggacacactacccctttacctgtcactgacaccagttccgcctctaaaggcgatacaaccccactgcctgtgaccagcccgagcagcgcgtcaactgggcacactacccccctgcctgtcacggatacgtccagcgctagcaccggggacaccacgccactacccgttacaaatgccagctcactcagcaccggtcatgcaacacccctgcatgtgacaagccccagtagtgcctcaactggacatgccaccccgctgccagtcacatcaacctcatctgcgtccaccggacatgccactccactacccgtgacggggctgtcatccgccaccactgacgatactactcgactgcccgtaacagatgtgtcatctgcatcaactggacaggctaccccgctaccagttacaagcctcagctccgtcagcacgggcgatacaactccgctgccagtgacttccccctcatctgcatccacaggccatgcatcacctctgctcgtgaccgatgctagttctgcttctaccggccaggcaacacctctgcccgtgacggacaccagctccgtgtcaacggcgcacgctacaccactccccgtgacaggcctcagcagcgcgagtactgacgatactacacgactgccagtgacagatgtgtcctctgcgagtacaggacaggctatccctttgcctgtcacttctccatcatctgcgtcaacaggagatacaaccccactacccgtgaccgatgcttccagcgccagcaccggagacaccacttcgctgccagttaccatcccctcttccgcttcttccggacacactactagccttcccgtgacagacgcctcatcagtcagcactggccatgccacgtcactgcttgtgacagatgccagctctgtctcaaccggagacaccacccctctgcctgtcacagacaccaactcggcctcaaccggagacactacccccttgcatgttactgacgcatcctccgtgtccaccggtcacgccacaagcctgcccgtcaccagcctgtccagcgcctccacaggcgataccacaccactgcccgtcacgagccccagctccgccagttccggccacacaacaccgttacccgtgacagacgccagttcagttcctacaggtcatgctacctccctgcccgtgaccgacgcctcctcagtatcgacaggccacgcgactccactacccgtgaccgacgcctcgtctgtatccaccggtcacgccactccattgccagtgacagatacgtcatcagtgagcaccggccaagctaccccccttcccgtgacttccctgtcaagcgccagcacaggggataccacaccacttccagtcaccgacacatcaagcgccagtaccggccaggacacaccacttcctgtgacctccttgtccagtgttagcacaggcgatacaacccccctgcccgtgaccaatccttccagcgcctctaccggccatgccacacccctgctggttactgacgcctcttctattagtaccggccatgcgacctctcttctagtgactgacgctagcagcgtcagcacggggcacgctaccgcactccatgacacagatgcttcctcactgagtaccggtgataccacgccactacctgtgacctctcctagttcaacgagcacaggagacactacaccgctgcccgtcacagagacttctagcgtaagcaccggccatgcgaccagcctgcccgtgacagatacaagcagcgcctccaccggccatgcgacctcactgcccgtcaccgatacaagtagcgccagcactgggcacgcaacgccgctccccgttacagatacttcctcagctagcactggacaggctaccccactgccagtgacctctcctagctccgccagcaccggccatgccatacctctgctggtgacagacaccagctctgcaagtactggacaagctaccccactgccagtgacatccctgtcaagcgctagtaccggcgataccacgccgttacccgttactgacgcaagtagcgtcagcaccggacatgctacctctttgccggtcacttcactgagcagtgtatctaccggggacaccactccactgcccgtcacatctccatcaagcgctagtactggccacgctactcctctgcatgtcactgacgcctcttcagcgtcaaccgggcacgcaaccccccttcccgtgaccagcctgtcgtcagcctctaccggagacaccacacccctacctgtcacttctccctctagcgcctctactgggcatgccacacctttgcatgttacagatgccagttctgtaagcactggagacactactccattaccagtcacatcttcgtccagtgccagttcaggccacacaacaccgttgcccgttaccgacgcctcgtccgcatcgactggtgacaccacaccacttcccgtgacagacacttctagcgcgagcaccgggcacgccacacacctgccggtcaccggcctgtcctctgcatctaccggggataccacccggttgccagtaaccaacgtaagcagtgcttctaccggacatgctactcccttgccagtcaccagtacatctagtgctagcaccggggataccacacccctgccaggaacagacacctcctctgtgagtaccggccataccacaccactgctggtgaccgacgctagctctgtgtccacgggggataccacacgcctgcctgtaactagccctagcagcgcgagtaccgggcacaccactcccctcccagtgaccgatacaccctcagccagcacaggcgatactacccctctgcctgtcacgaatgccagcagtctgtcaacacggcacgcaacttctctgcacgtgacctcccctagctccgccagtaccggccatgccacgtccctgcctgtcacggacacctctgctgccagcaccggccatgccacacctctgccagttacaagcacctccagcgcgagtacaggagacacaaccccactgcccgtgaccgatacctattcggccagtactggtcaagctactccgctgccggtgacttccctctcgagtgtgtctaccggggacacaacacctttaccagtgacctcgccctcaagtgcttcaacagggcacgccacaccactgctggtcactgatgcaagctcagcatcaaccggtcaggctacccctctgcccgtgactagtttgtcatccgtgagcaccggtgacactacccccctgccagtcacgtccccttctagtgcttctaccgggcacgccacttcactgccagtgaccgacacatcaagcgcatcaaccggcgacactacaagtctccccgtaacagacaccagctccgcttataccggtgatacaacctcacttcctgtaaccgacactagcagctcctccaccggagataccacacctttacttgttaccgagacctcgtcagtgagtaccggtgatacaactcccttgccagtcacggatacctccagtgctagcactggccatgccacccctcttcctgtgacaaataccagcagcgtgagtactgggcatgccacccctctacacgtcacctcaccttcctccgcctccaccggccatacaactccacttcctgtgaccgacgcctcaagtgtgtctaccggccacgcaacctctctgcctgtaaccgatgcctcatcagtcttcaccggccatgcgaccagcctgccagtcaccatcccaagttccgcctcctccgggcacaccactccccttcctgttacggatgcttctagcgtcagcacagggcatgcgaccagtctgccggtcaccgacgccagtagtgtgagtacaggccacgcaacccctctccccgtaaccgatgcatcctccgtctcaactgggcatgctacccctcttcctttaacctctctatcttccgtctctaccggagatacaacgcccctgccagtgaccgacactagcagcgcgtctacagggcaagccacccctttaccagtcactagtctctcttccgttagtaccggcgatacaaccccgttgccggtcacggatacctcaagcgcctccacaggacacgccacctccctcccagttacagacacttcttctgcctccacaggacacgcaacaccactgccagacactgatacaagttcggcgtctactggccacgctaccctgttgccggtcaccgatacatccagcgccagtatcggacacgcaacaagtctgcctgttaccgatacttcttcaatcagcactggacacgctactcccctacacgttacttctcctagcagcgctagcaccggtcacgccacaccactcccggtcactgacacaagctcagcttcgaccggacacgcgaaccccctccacgttacttcgccttcaagcgcaagcacggggcacgccacccccctgcctgtaaccgatacaagttcggcttccacaggtcacgcaactccactacctgtaactagtttgtctagtgtcagcactggcgacactacgcctctgcccgtgacaagccctagcagcgcatccacaggccatacaacaccacttccagtcactgatactagttcagctagtaccggccaggccacagctctgccagtcacctctacgtcttccgcctccacaggggatactacccctctgcctgtgacagatacctcctccgcgagcacgggtcaggccaccccgcttccagtgacctccctgtccagcgtgtcaactggagatacaacgccgctgcccgtgactagtccaagttccgctagcactgggcatgcgacgccactgctagtgacagacgcttctagtgcttccacaggacaagctaccccattgcctgtgaccagtttatcctctgtgtctacaggcgatactaccccactcccagtcacaagtcctagtagtgcttcaacaggccacgctacctcactccccgtaacagacacttcctctgcctcaactggggacactacttcccttccagttacagataccagttccgcctataccggtgacactacttccttacctgtgacggatacctcctcgagtagtaccggagacacaacccccttgcttgtcaccgaaacttcctcggtcagcaccgggcacgctacaccactattagtcactgatgctagctctgcctctacaggccacgccacaccactgcacgtcacctctcctagctccgccagtactggagataccacaccagttcctgtgactgacacttcatcagtgtcaacaggccatgctacacctcttcccgtgactgggctgtccagcgctagcacaggcgacaccactaggttacccgtgactgacatctcctctgcaagtactgggcaggccacccccttacccgtcacgaatacttctagcgtcagcacaggcgacacaatgcccctccctgtgacatccccctcctcagcaagcaccggtcatgccacccctttaccggtaacatccacctctagcgctagtacaggccatgcaacacccgtgccagtgacaagcacatctagcgcgtctacaggccacaccacgcctctgcctgtaaccgacactagcagcgctagcacgggagacaccactcccctcccagttactagtcccagtagtgcttccactgggcataccacgcctctgcatgttacaatcccctcctcagcaagtaccggagatacttcaaccttgccagttaccggggcttcttcagcttccaccgggcacgctactcctttgccagtgactgacacttcttctgtcagcaccggacatgctacgccgctccctgtgacctcactgagctcagtgagcaccggtgatacgacaccgctccccgtaacagacgcttcttcagccagcacagggcaggcaacgccgctcccagtgacatccttatcttctgtgtcaaccggcgatacaactcccttgctcgttactgacgcctcttctgtctccaccgggcatgctactcccctccctgtgaccgacacatcttccgccagcactggagatactacacggctgccagttactgacacttctagtgcatccaccggccaagcgaccccactgccagtgacttccctgagcagtgtatccacaggcgacacgacgcccctcctggtgactgatgcaagttctgtctctaccggacacgcgactccactgcccgtgactgacactagtagtgcaagcacaggagacactacccgcctgcccgtgacagacacatcctccgctagtacaggccaggcgacccccctgcctgtgactataccttccagttcctcctccggccacaccactcctctgcctgtaaccagtacatctagtgtgagcaccggtcatgtgactcccctgcacgtcactagtccctcaagtgcatcaacgggccacgtcaccccactgccagtcacatctacgtcctcagccagcaccggacatgccacacccttactggtgacagacgcatcatcagtcagcaccgggcatgccacgccgctgccggttactgacgcctcttcagcctcaacgggtgatacgacccccctgcccgttactgacaccagttcagcctccacaggacaggcaacgccattgccagtgacttctctgagcagcgtctctactggggacaccacccccctgcctgttacagatgcatcttcggcttcgactggccacgccacccccttacctgttaccatccccagcagtgtgtctacaggagacactatgcctttacctgtaacttctccctcctcagcaagtacaggccacgcgacccccttacccgtgacaggactgtctagcgcttctaccggtgatacaacaccacttcctgttaccgacacaagttcagcctccacgcgtcatgccactccattaccagtaaccgatacaagctccgcgtccactgacgatactacacgcttgcccgtgacagatgtcagcagtgcctccaccggtcacgccactccactgcccgtgacatctacttcaagcgcaagtacaggcgatacaacccctttacccgttacagacaccagttcagtctccacagggcacgcaacctccctcccggtcacctcccgttcctctgcaagcacagggcacgctacgcctcttccagttacagacacaagctctgttagcaccgggcacgctactcctctgcccgtgacgtctacatcttccgtgtcaaccggtcatgctacccctctacctgtgacgtcacctagctccgcgtcaacgggccacgcaactcccgtgcctgtgactagtacttctagcgcgagtacaggagacaccacgccgttacccgtgacaaatgcctcgtccttatccaccggccacgcaacaccactgcatgtcacctcccctagcagtgcatcgaggggcgatacatctacattacctgtcaccgacgcgtcgtcagcctcaaccggccacgcaaccccgctacctctcacctcactgagcagcgtcagcacgggcgacactaccccactgcctgtgacagatacctccagcgcgagcaccggccaggcgacaccgttacctgtgacttctctctcctcagtttccactggcgacacaacccccctgccggttaccatcccgtcatctgcgtccagtggtcacactacaagtctacccgtgactgatgcatccagcgtgagtacaggccacggcacacccctgcccgtgacgagtacaagtagtgcgtccacaggagacactaccccccttcctgtcacagacacatctagcgcttctactgggcatgccactccactccctgtgaccgataccagcagcgccagcaccggccatgccactcccttacctgtcactagcttgtccagcgtgagtacaggccatgccacacctctagcagtgtctagcgccacttccgcgtctacggtgtcctccgattcgcctttgaagatggagaccccaggcatgaccacgccgagcctgaaaactgatgggggtcggaggacagccacctcccccccacccacaacaagccagaccattatcagcacaataccctcaaccgctatgcatactcggagtaccgcagcgccaatcccaatcttgcccgagcgcggagtgtctctgtttccatacggcgctggcgcgggcgatcttgagtttgtacgccgaacggtcgacttcacgtctcctctgtttaaacctgccacggggtttcctttgggatcatccttgagggatagcctgtacttcactgacaatggccagataattttccctgagagcgactaccagatttttagttatccaaaccctttgcccacagggtttactggacgggacccagttgctctagtggcccctttctgggatgacgctgatttcagtactggaaggggcaccacattctaccaggaatacgagactttttatggagagcatagcctactggtacagcaggctgaatcctggatcaggaaaatgacaaataatggggggtacaaagctcgatgggctttgaaagtgacatgggtcaatgcccacgcgtacccagctcaatggacgctgggatccaacacataccaagcaatcctatcaactgatggcagcaggagttacgctctctttctctatcagagtggtggcatgcagtgggacgtggctcagcgttcagggaaccccgtcctcatgggtttcagtagcggagacgggtactttgagaacagtccactgatgagccagcccgtctgggaacgataccgccctgaccggtttcttaacagcaacagtgggcttcaagggttgcaattctataggctgcatagggaagaacgaccgaattatcgactggagtgtctccaatggttaaagtcacagccccggtggccctcttggggctggaaccaggtgtcttgtccctgctcatggcagcagggccgtcgggatctgagatttcagcccgtgtccatcggtcgctggggattaggtagcaggcagctgtgcagcttcacatcatggcggggaggtgtgtgttgctcatatggtccgtggggggagttccgagaaggatggcatgtacagaggccctggcagctcgcccaagagctcgagccccagtcttggtgttgcagatggaacgataaaccctacttgtgcgctctctaccaacagagaaggccgcacgtgggctgtgcaacctacagacctccgcagccggcctggatgttcggggaccctcatattacaacgttagacggggtgagttacaccttcaatggacttggcgattttctgctagtcggagctcaggacgggaatagcagcttcttactccagggaagaactgcccaaactgggagtgcccaggccacgaatttcatcgcctttgcagcacagtatcgctccagtagcctaggacccgtcaccgttcagtggctactggaaccacatgatgccatcagggtgctgctcgacaaccaaactgtgacctttcaaccagatcacgaagacggtggtggccaagagacttttaacgccacaggtgtgctgctgtctcgcaatgggtctgaggtgagtgctagttttgatggttgggcaaccgtttccgttatagcgctctcaaacatactgcatgcgtcagcctccttgccacccgaataccagaacaggactgaaggcctgcttggggtctggaacaacaaccctgaggacgattttagaatgccgaacggttccactatacccccaggtagcccagaagagatgctgttccacttcgggatgacgtggcagataaatggtaccgggttactcggcaagcgcaatgatcagttaccaagtaacttcacgcctgtgttttacagtcaattgcagaagaactctagttgggcggagcatctgatctccaactgtgatggtgattcaagttgcatttatgatacactcgccctaagaaacgcctcaattggactgcacaccagggaggtgtccaagaattatgaacaggccaatgccacgctcaatcagtacccaccttctattaacggcggtcgcgtcattgaggcatacaaagggcagacaacacttatccaatacaccagtaacgccgaagacgccaatttcactttgcgtgactcgtgcaccgacctggagctcttcgagaacgggaccctgttgtggacacccaagagtctggagcccttcaccctggaaatcctcgcccgctcggctaaaattggcctggcttcagccctgcaacctagaactgtcgtgtgccactgtaatgccgagtcacagtgcctgtacaaccagacttcaagagtgggaaactccagtctggaagttgccggatgcaaatgtgatggtggaactttcggcaggtattgcgaaggcagcgaagacgcgtgtgaagagccatgttttccttctgtgcactgtgtgccgggcaaaggttgtgaggcttgtcctccgaacctaactggagatggccgacactgcgccgctcttggtagttcgttcctatgccagaaccagtcctgtccagtgaactactgctacaaccagggtcattgctacatttcccagaccctcggatgccaacccatgtgcacctgtccaccagctttcacagattctaggtgctttctagccggaaacaacttctcaccaaccgtgaacctggagctcccgctcagagtgattcagctcctcctcagcgaggaagagaatgcaagcatggcggaggtgaacgcctcagttgcgtatcggctgggaaccttggacatgagggccttcttgcgcaacagtcaagtggagcggatcgattctgcagctccggcttctggctctccaattcagcactggatggtgatatccgaattccagtataggccacgcggcccagtcatcgacttcctgaacaatcaactgcttgccgccgtggtcgaagcattcctgtaccacgtccctcggcgctcggaggagcctagaaatgacgtggtgtttcaaccaatttcaggtgaggacgttagggacgtcaccgcgttaaacgtgtcaaccctgaaggcttactttcgctgcgacggatacaaggggtatgacctggtgtactctccacagagtggtttcacttgcgttagcccatgctcacggggatattgcgaccacgggggccaatgccagcacctgccatctggtccgagatgctcttgcgtttcatttagcatctatacagcctggggggaacactgtgaacacctcagcatgaaactggatgctttcttcggtatcttttttggtgccttggggggactgttgttgcttggagtgggcacattcgtagtcttaaggttttggggctgcagcggcgccaggttctcttattttttaaactctgcggaagcactcccgtag

SEQ ID NO: 198253 - DNA, 16083 bp, Artificial Sequence
  derived and/or modified sequence
atgaagggcgcccggtggcggcgggtgccctgggtgagcctgagctgtctgtgtctgtgccttttgccacatgtcgtgccaggcacaaccgaagataccttaataaccggtagtaagacggcggcccctgtgacatccactggaagtaccactgctactttggaaggccagtcaaccgcggcctccagcaggacttccaaccaagacatatctgcatcttctcagaaccaccagaccaaatccacggagactacatctaaagcacagactgacacactcacccagatgatgacctcgaccctgttcagtagcccaagcgtgcataacgtcatggaaaccgcaccacctgacgaaatgaccacaagctttccaagcagcgtgaccaacacactgatgatgaccagcaagacaatcactatgaccaccagcaccgactccacacttggcaacaccgaagagaccagtaccgcaggcactgaatcaagtactcccgtaacatcagcggtctctataaccgccggtcaggaaggtcagtcacgcacaacaagctggcgcacctctatccaggatacctccgcgtcttctcagaaccattggacccggtcgacccaaacgacacgcgagtcacagacttccaccctcacccatcgaacgacgtccaccccgagcttctcacccagcgtccataatgttactggcacagtctctcagaaaacctcacctagcggcgagacagctacatcaagcctatgctctgtcactaacaccagcatgatgacctcggagaagattactgtaactacaagcactggctccacactcgggaatccgggggaaacatccagcgtgcccgtgacaggttcgctgatgccagtgacctccgcagcgctggtgacatttgaccctgagggccagagtcctgcaaccttctcaagaaccagcacccaggacacgaccgccttcagcaagaatcaccagactcaatcagtcgagaccactagagtgtcgcagattaacacactgaatacgttgactccagttaccaccagcacggttctaagtagccctagcggtttcaatccaagcggcactgtctcccaagaaactttcccctctggcgaaacaaccacaagttcaccttcatcagtgagcaacaccttcctcgtcaccagtaaagtgttcaggatgcctacatcacgggacagcactcttgggaatactgaggaaacctccctgtccgtcagtgggaccatctcagccatcacgagcaaggtttccacgatatggtggtctgatactttgtccaccgccttatctccatcgagcctccccccaaagatttctacagcttttcatacacagcagtccgagggggccgaaactactggtagaccacacgagaggtccagcttcagcccaggagtgtcacaggaaattttcacacttcacgagacaaccacttggcccagctcattttcgagcaagggccatacaacttggtcccagaccgagctgccttccacttcaaccggcgccgccactcggctggtgacagggaacccctctaccggcaccgccggaacaatacctagagtgcccagcaaagtgagcgccatcggtgaaccgggtgagccgaccacttatagttcgcacagtacaaccttgcccaagacaacaggcgcaggtgcccagacgcaatggacccaggagacaggtaccacaggggaggccctgctgagcagcccctcctattctgtgacccagatgatcaaaacagctacctccccatcttcgtctcctatgctggataggcacacgtctcaacagatcaccacagctccctctacgaatcactctaccatccacagcaccagcacctctccacaagagtctcccgcggtttcccagagaggacacactcaggccccccagacaacccaggaatctcagacaacgagatctgtttcgcccatgactgataccaaaactgttaccacacctgggtcaagttttacagcgtccggtcattcgccgagcgaaatcgtgccccaggatgcgcctacgataagtgcggccaccacatttgcccccgctcccacgggagatgggcacacgacccaggctccaaccactgcactacaggccgcacccagtagtcacgacgcgaccctgggtccaagcggcgggacatccttatcaaagactggtgcactgaccctggctaattctgttgtcagcacaccagggggccctgagggccagtggacctctgcctctgccagcacaagccctgatacagctgctgcaatgacacatacgcatcaggccgagtctacagaggcttcagggcaaactcagacctccgagcccgccagctccggcagtaggactaccagtgccggaacagccacaccatcgagcagcggggccagcggtaccaccccttccgggagtgaggggattagcacaagcggtgaaaccaccagatttagctcgaatccttcgcgagactctcataccacccagtccactactgagctgctatcagcctcggcatcccacggcgctattccagtctccacaggaatggctagctccatcgtgcctgggacctttcaccccaccctgagcgaagcttcaactgcgggccggcctacggggcagagctcaccaacatccccaagcgccagtccccaggaaactgccgctattagccgtatggctcaaactcaacgaactcgcactagccgaggaagcgatactatttccctggccagtcaagccaccgatactttctcaaccgtcccaccaacaccaccttccattacctccactgggttgacctctccacagacagagactcacacgttatccccttctgggtccgggaaaacattcactacagcccttatctctaatgcaactcccctgccagtcacatatgcaagttctgcttctacgggccatacaactcccttacacgtgacagatgcttcttctgtcagcacaggtcacgcaacacccttgcccgtcacgtccccttcctctgtttctactggtcacaccaccccgctgccagtaaccgacacatcaagtgagagtacaggtcatgtgaccccactgcctgtgacgtcattcagttctgcctcgactggggactccaccccactgcctgtgaccgacaccagcagtgcatcgactggccatgtcacccctctgcctgtgacctccctgtcctcagccagcaccggcgatactacccctctcccggtaaccgacacaagctccgctagcaccggccacgccactagcctgcccgtcactgatacctcctccgtctctactggccataccacccctcttcctgtgactgacacttcctccgcttcaaccggccatgccacttctctgcctgtgacggatacctcctccgtctctaccggccacacaaccccactgcacgttacggacgcctcttctgctagtactgggcaggcgacacctcttcccgtgacatctctaagcagcgtgagtaccggggacacaacacccctgcccgtgacctcacccagcagcgcttcaacgggtcacgcaacaccattgctggtcactgatacaagctcagcaagtactgggcacgcaactccgctgccggtcacggatgcatctagcgttagtaccgaccacgcaaccagcctgcccgtcaccattccaagcgctgcatccacggggcatacaacaccattacccgtaacagatacatcaagtgcttctacaggccaggccacatccctcctggtgacagatacctccagtgtctcaactggagacacgaccccattaccagtcaccagtacttcgtccgcatcaactggccatgtcactccactgcacgtcacaagtccaagtagcgcaagcaccgggcatgccacaccgctgcctgtcacttcgctgtccagcgcctcaacgggagacaccatgcctctccctgtgacttcaccgagtagtgccagtacgggagacacaacaccattgcccgtcacagacgcctcttctgtctctacagggcacactacgcccctacatgttaccgatgccagttctgcctcaaccggtcaggcaacccctctgcctgtcacctctctgtcttcagtctccacaggggacactactcccctcccagtgacttctccatcctcggcctcaacagggcacgctacaccactcctggtcaccgacacttcctccgcgagcacagggcatgcaactcccctaccagttactgacgcaagttccgtgagcaccgatcacgccacgtctctgcccgtgacgatcccttcagcggcatccaccgggcataccactcctctccctgtaacggatacatcctctgccagtaccggccaggccaccagcctgcttgttaccgatacgagctctgtgagcacaggagataccactccccttcctgtcacgtcaacaagctctgcatctacggggcatgtgacccctctgcacgtcacctcacctagctccgctagcactggccatgcaaccccccttcccgtgacctccttgagtagcgcttcgaccggcgacacgatgcccttgcccgtcaccagcccaagcagcgccagtacgggtgacacaacaccccttcctgtgactgatgcgtccagcgtaagcactggccatacaactccattacccgtgacttcaccctcctccgcatccacaggtcacacaacccccctgccggtgaccgatacatctagcgcttccaaaggcgacactacgcctctccctgttacttccccctcaagcgcttccaccggccacaccacacctctgcccgtaacagacacctcctccgcctccaccggtgatactactccactccccgtcactaatgccagttccctgtcaacaggccatgccacacccctccacgttacaagcccatcaagcgccagtaccggtcacgcaactccccttcccgtgacctccaccagcagcgcatccacagggcatgctaccccccttcctgtgacaggattgtcttctgcaacgacagacgacactacacgtctccccgtcaccgatgtgagcagcgcctccacgggccaggcaacacctctgcccgtaacaagtctgagttccgtgagcaccggtgatactacaccactcccagtaacctcaccttccagtgcctcgaccgggcatgcatcgccgttgttggttacggacgctagttctgcctctaccggccaggctaccccactgccggtgacagatacctcttccgtgagcactgcccatgcaacgcccctgccagtgactggcttgagctccgcatcaaccgacgacaccacacgcctgcctgtgaccgacgtgagttccgcgtctacaggacaggcaattccattgccggtgacaagtccaagttccgcatcaactggcgacacgacacctctgccagttaccgacgcctcctctgcctctactggcgataccacttctctccccgtcactataccaagctccgcctcatctgggcatacaactagcctgccagtgacggatgcgtcctccgtttcaaccggacatgcaacatcattgctagttaccgatgcatcctctgtgagcacaggcgatactaccccactcccagtgaccgacacaaatagtgcatccactggtgacactacgcctctgcacgtcaccgacgcctcatccgtttccaccgggcatgcgacaagcctcccggtcactagtctgtcaagcgccagcaccggcgacactactccgctacccgttactagtccatcttccgcctcttctggacacacaacacctttacctgtcacagacgccagctccgtgcccaccggtcacgccacgagtttacctgtgacagacgcatcctctgtaagcaccggccacgccacacctttgccggtgaccgacgcaagttccgtttcaaccggacacgcaacccctctgcctgttacagatacatcctccgtaagcaccgggcaggcaacaccactgcctgtgacctctctctcatctgcttccacaggggacaccacccccttacctgtgacagatacttcctccgccagcaccggacaggacaccccgctgcccgtgacctctttgtctagtgtttccacaggtgacactactccattgcccgtgactaatcccagctctgccagcaccggccacgcaacccctctcctcgtaaccgacgcctcgtcgatttcaaccggacatgctactagtctactcgttactgatgcctcctctgtgtctacagggcatgcgaccgctctccatgatacagatgccagctctctttccactggggatacaactcccctgccagttaccagccctagttccacttccactggagatacgacgcccctgcctgttacagaaacgagttctgtttcaaccggtcacgccacatcattgcccgtcacagatacatcctccgcttctacaggacacgcaactagcttgccagtgactgacacgagtagcgctagcactgggcatgctactcctcttccagtgaccgacacgtcaagcgcatccacagggcaagcaacgcctcttcccgtgaccagccctagctccgcaagcacggggcacgcaatacctctgcttgtgaccgatacgtcatccgcatcaacaggccaggcgaccccgctgcctgttaccagtctgagcagcgcatctaccggggataccaccccactacccgtcaccgacgcctcctcagtgagtaccggtcacgcaacctctctaccagtgacatcactgtcttcagtatcaacaggggacactacgcccctccccgtcaccagtccatcttctgcctctactggacatgccacacctctgcatgtgacagatgccagcagcgctagcaccggccatgcgacgcccttaccagtgaccagcttgtcatcagcttccactggtgataccacacctctcccagtaacctcccccagctctgcttctaccgggcacgctacgccacttcatgtgacagatgcaagttctgtctcaactggtgatacaactcctctgcccgtgaccagctcctcctcagcttcgtcggggcacactacgccccttcctgttactgatgcatccagcgctagcacaggcgacacaacacctctcccagttactgacacctcttccgcctccactggacatgcaactcacttgcctgtgacgggactgagttccgcatcaacgggcgataccacccgacttcctgtgacaaacgtcagcagcgctagcaccggccacgccacaccccttcctgtgacttcgacgtcctcagcctctacaggagatactaccccgcttccgggcaccgacacttccagtgtcagtacaggccacaccactcctctactggtgaccgacgcttcttccgtttcaacaggtgataccactcgactccctgtcactagcccctcgagtgcttctacagggcataccactcctctgcctgtaaccgatactcctagtgcctcaactggagatacaacaccactacctgtgactaatgcaagctcgctttctaccaggcacgccacgagcctgcatgtgactagtcccagcagcgcgtccacaggccacgcaaccagcctgcctgtgaccgacacatccgccgcttccaccggtcatgcgaccccccttcctgttaccagcacctcatctgcctcgacgggtgacactaccccattacccgtaacggacacatattcagccagcaccggacaagctactcctctgcctgtcactagcctatctagcgtgagtaccggcgacactactccccttcccgtgacctctccaagctccgccagtactggtcatgccacccctctgctggtgacagatgcttcttccgcatcaactgggcaggccacaccgctccctgtgacatcactttcatccgtgtctacaggggacaccaccccattacctgtgaccagcccgtcttctgccagtaccgggcacgcaacttcactccccgtcacggatacaagcagcgcctctaccggagacacaacttcattacccgttaccgacacgagtagtgcatacaccggcgacactactagtttgcctgtgactgacaccagctcatcttctactggcgatacaactcctctgttggtcactgaaacatccagtgtgtcaaccggggacactaccccattgcccgtcacagatacaagcagtgccagtactgggcatgcgactccactcccggtcaccaacacatcatccgtctcgaccggccatgctacacccctgcacgtaacctcaccttcctcggctagtaccggccataccactccgctcccggttactgatgccagctctgtctccacagggcatgctacaagtctgcccgtcaccgacgcttcctccgtgttcactgggcacgctacctctttgccagtgacgattccctcctctgcttcatctggccacactaccccactgcccgtgacggacgcctcgagtgtgtctaccggacacgcaacaagtctgccagtgacagatgccagtagcgtgtccaccggtcacgcaacccccctgcctgtgaccgatgcctcgtctgtcagtacgggccacgccacaccgctgcccctcactagcctctcctctgtgagcacaggggacaccaccccattgcctgtcacagatacctctagcgcgtccaccggacaagccactcccctgcccgtgaccagtttgtcaagtgtgagtaccggggatactacccctctgcccgtaactgatacgtcaagcgcctcaaccggccacgctacgagcctgcccgtcactgacacatccagtgcaagcactgggcacgctacacctctccccgacacagacacatcctcagcttccaccggccacgccaccctcctgcccgtgacagataccagctcagcttcgatcggacacgccaccagccttcctgtgacggatacctcgtccataagcactggtcatgctacacccctccacgtcacctcaccctccagcgccagcactgggcatgctacacctctccctgtcactgacacatcgtccgccagtaccggccacgctaaccccttgcatgtgacatcacctagttctgcctccacaggccacgcaactcccctgcctgtaacagacacctcctccgctagtaccgggcacgccaccccactcccggtgacttcattgtcaagtgtgtctactggagacacaactccactccccgtcacatctccatctagtgcctccaccggtcacacaaccccattgcctgttacggatacatcatccgcttctactggccaggccaccgccttacccgtgaccagcacctcttccgcttcgacaggtgatacaaccccgctccctgtcaccgacacatcttctgcgagtacaggccaagccacaccgctgcccgtcactagcttgagtagcgtgagtacaggtgatacaacacctcttcccgtgacttccccatcttccgcctcaacaggacacgctacccccctgctagtgaccgacgcatcctcagcctccacaggccaggcgaccccacttcccgttaccagcctgagctccgtctctacaggggacaccaccccgctcccggtcaccagcccaagttctgcgagcacagggcacgccacttcattgcccgtcaccgacacctcttcagctagcaccggagacacgacatccttgccagtgacggatacttcttcagcctacactggggacactacaagtctgcctgtaaccgacacctctagcagttctacaggcgatactactccactcctggtgactgagacgagctcggtctcaacaggacatgctactcctctgctggttactgacgcgtcaagtgcctctaccggacacgctacgccactgcatgtaacatcccccagttctgccagtacaggcgatactacaccagtgcccgttaccgacacatccagcgttagcacaggtcacgcaacacccttaccagtgactggtttgtccagcgcaagcacgggggataccacgcgactaccagtaacagatatctcgtccgccagtaccggacaggcaaccccattacctgtcacaaatacatctagtgtgtcaactggagatacaatgcccctgcctgtgacctctccctcttcggcttccacaggtcacgcgactccgctcccggtgacaagcacctctagcgcaagcactggacatgcaacaccagtgccagtcaccagtacctccagtgctagcacagggcataccactcccctacccgtcacggatactagtagcgccagcactggagatactacaccccttcctgtgacttctccctcttccgcctcaacagggcacaccacaccactgcacgtgaccataccctcatctgcgagcacaggagacacttccacactccctgtgaccggggcatctagcgccagcaccgggcacgccactcccctgccagttacagatacctcctccgttagcactgggcatgctactccgctgcccgtgacgtcccttagtagtgtctctaccggtgacacgacaccattacccgtcaccgacgcttctagtgcaagcactggtcaggccacccccctccctgtcacgtcgctctcgtccgtttccactggagatactacccctctcttggtaacggacgcctcatccgtgtccaccggacacgccacacctttaccagtcacagatacatcttcagcttctaccggggataccacgagattacccgtaacagacacctcctcagcctcaaccgggcaggccacacctctgcctgtaacgtcattatccagcgtctctaccggcgacacgactcctctactagtgacagatgcatcatctgtctcaaccggccacgccacaccgttacctgtgaccgatacttctagcgcttctacaggcgacactacccgactgcctgttacagatacctctagtgctagtaccggtcaggctactcccctccctgttactatcccatcctcatcctcgagtgggcacaccactcccctaccagtcacgtccacatcgagcgtgtctacaggccatgtgacacccctgcacgtgacatcaccttcatccgcctcaactggccatgtgacccccctgcctgtgaccagcactagttctgctagtactggccacgctactccattgctagttaccgacgcttcatctgtaagcacagggcacgcaacaccactgccagtgacagacgcatccagcgcaagtaccggcgacacaacaccgctgcctgtcactgacacgagctccgcaagcacgggccaggccacgccgctccccgtcacgtcgctttctagcgttagtaccggagacaccaccccactccccgtgaccgatgctagttcggcctccacgggccatgccacgcctctcccggtcacaataccatcctctgtgagtaccggagacacgatgcctctgccagtaacatcaccatcttcagcctcgaccggacatgctacacccctgccagtcactggtctcagttctgcaagcaccggggataccaccccacttcctgtgacagacacttcttctgcatcaacacgccacgccacccctttaccagtcacagatacttcaagtgcatcaacagatgacacaacacggttacctgtcacggatgtgagctcggcatcaacaggacatgctacccctctgccagtgacttccaccagctccgcaagcaccggagacactacccccctcccagtcacggacacaagttctgtttctactggccatgctacctcgttaccggtgacctctcgctcttccgcaagcaccggtcatgcgacgcccctgccagtgaccgacacaagctcagttagtactggacacgccactcctctccctgtcacgagtacatcctccgtcagcactggacacgccaccccacttccagtcaccagtccttcgtcagcctccaccggccatgccacaccggtcccagttacatccacttcgtcagccagcactggggacaccactcctttacccgttaccaacgcctccagcctatccacgggccacgcaacacctctccacgtaaccagtccttcgagtgccagtcgcggagacacctccacgctgcccgtaacagatgcgtcaagcgccagcacaggacatgcaactccacttcccctgacaagtctgagtagtgtctcaacaggagacaccacccctctccccgtgaccgacacctcctctgcgagcactgggcaggcaactcctctgcccgtgaccagcctgtctagcgtgagcacgggggacacaacaccattaccagtgaccattccttcttctgcaagcagcggccacactacttccctacctgtgaccgatgcatcttccgtctcaacaggccatggcacccctcttcccgtaacatccacatccagcgcctcaaccggcgacaccactcctctccccgtcacagacactagctctgccagcaccggtcacgcgactcccttgcctgttaccgacacctcctccgcatccaccggccacgcaactccacttcccgtgacaagcttgagctcagtgtccacaggacacgccacccctttagccgtgagcagcgccacctcagcatcaactgtgtcctcagactcaccactgaaaatggaaacacccggcatgactaccccttcactcaagactgacggggggagaagaactgccactagcccaccccccactactagccaaacaatcatctccaccattcccagcacagccatgcacacaagatctacagcggcccccattccaatcctgccagagagaggagtaagtctcttcccttacggcgctggcgccggcgatctagagtttgtgcgccgaactgtagattttactagcccactgtttaaaccagcaaccgggttcccgcttggaagttccctgcgagattccctgtattttacagacaacgggcagatcattttcccagagagcgactaccagatttttagttaccccaatccactccccaccgggttcaccggacgagacccagtggccttagttgccccattttgggatgacgcggatttttccaccggccggggaacaaccttctatcaatctaacacataccaagcgatcctatcaaccgacgggagccgcagttatgcactgtttctgtatcagagcggaggaatgcagtgggacgttgctcagcggtccggtaaccctgtgctcatgggattttcttccggagacggctactttgaaaattcaccactcatgagccagcccgtgtgggaacgatacagacctgaccgctttctcaactccaattcaggattacagggactccagttctatagactccacagggaggagaggccaaactacaggcttgaatgcctccagtggctgaaaagtcagccgcgctggccaagctgggggtggaatcaggtgtcttgtccttgctcctggcagcaagggaggcgcgatttgagatttcagccggtctctatcggcaggtggggtctgggctcacgacagctgtgtagctttactagctggcggggaggggtgtgctgcagctatggcccctggggagaattccgagagggatggcatgtgcagaggccttggcagttggcacaagaactggagccccagagctggtgttgtagatggaacgacaagccctacctgtgcgcactctaccagcagagacgaccccatgtgggatgtgctacatacaggcctcctcagcccgcatggatgttcggagaccctcacatcaccactttagatggggttagctataccttcaacggcctcggggacttcttgcttgttggagctcaagatggaaatagttccttcttgctgcaggggcgaaccgcccagaccgggtccgcccaggctactaattttattgcctttgctgcacagtacagatcgagcagcctgggtccagtgaccgtgcaatggctcctggagcctcacgatgccatccgggtgctgcttgataaccagactgttacattccagcctgaccacgaagacgggggtggacaagagacatttaacgctaccggagtgttactgtctcgaaatggaagcgaagtttctgcatcatttgacgggtgggcgacggtttcagtcatagccctgtcaaacatcctacatgcgagtgcaagcttgcctccagaataccagaaccggactgaagggctgctgggagtgtggaataataaccctgaagacgacttccgcatgcctaatggttccacaatccccccgggaagtcctgaggaaatgctgtttcattttggaatgacatggcaaataaatgggaccggcttgttgggaaagcgcaacgaccaactgccttcgaactttacccccgtcttctattcccaactgcagaagaattctagctgggccgagcatctcatttcaaattgtgacggcgacagctcttgtatctacgatacacttgccctgagaaacgcatccataggcctgcacaccagagaagtcagcaaaaattatgagcaagccaacgctaccctcaaccagtatccacccagtattaatggtgggcgcgtcattgaggcatataagggacaaactacactgatacagtacacaagtaatgccgaagatgccaacttcacgttgcgggatagctgcactgatctagagcttttcgagaacggcaccctgctgtggacgcccaagtctctcgagccatttaccctcgaaatcttggctaggtcagccaagattggcctcgctagtgccctccagccgcggaccgtagtatgccactgcaatgcagagtcacagtgtctgtacaaccagacaagtcgagtaggaaattcaagcttagaggtggccggctgtaaatgcgatggaggcaccttcggacgatactgcgaggggagtgaggatgcctgcgaagagccctgctttcctagcgtccattgcgtccccggcaaggggtgcgaagcttgcccccctaacctcactggggatgggcggcactgcgccgcattgggctcatccttcttgtgccaaaatcagtcttgcccggttaattattgctacaatcaaggacactgttatatcagccagaccctgggctgccaacccatgtgcacctgccccccagcatttaccgacagcaggtgcttcttggcaggcaataacttcagtccaacagtaaatttagaactccccctgagagttatccagctgttgctatcagaggaagaaaatgcctctatggctgaagtaaacgccagcgtagcatatagactcgggacactggatatgcgtgcctttcttcgaaacagccaggtcgaacgcatcgattccgctgctcccgcgtctgggagtcctattcagcattggatggtaattagtgagtttcaataccggccacgcggacccgtcattgacttcttaaataaccaactgctcgctgctgtggtcgaggctttcttgtaccacgtgcccaggagaagcgaagagccaagaaacgatgtggtgtttcaaccaatatctggggaggatgtcagggatgtgactgccttaaacgtttctaccctaaaggcttatttccgatgcgatggatacaagggatatgatttagtgtacagccctcagagcggttttacatgtgtttctccttgtagcaggggctattgtgaccacggaggacagtgtcagcatctcccctccggaccaagatgttcttgtgtgagcttcagcatctacaccgcctggggcgaacactgcgaacacctaagcatgaagttagatgctttttttggaattttttttggggcactgggggggttgctcctgctgggagttggcacttttgtagtgttgaggttttggggttgttccggggcaagattttcctacttcctgaatagtgctgaagccctgccgtag

SEQ ID NO: 198254 - DNA, 5739 bp, Artificial Sequence
  derived and/or modified sequence
cctgggaccactgaggacaccttgatcacaggatctaagactgcggctcccgtgacatctactggttctacaacagctaccctggagggtcagtctacagcagcttcctcgcgaacctcaaaccaggacatcagcgcctcttcacagaatcaccagacaaagagtactgaaactactagtaaggcccaaactgatacactgactcaaatgatgacatccactctttttagtagcccaagcgtgcacaacgtgatggagaccgcacctcccgatgaaatgaccacgtcattcccctcatcagtcactaacacattaatgatgacatctaaaacgattacaatgactaccagcacggacagcacccttggaaatacggaagaaacatcaaccgctgggaccgaaagcagcacaccagtcactagtgcggtgtccatcactgctggccaggaaggacagtcgaggaccacatcctggaggacttctatccaggacacaagcgcctcatctcagaatcactggaccaggtcgacccaaactactcgggagtcccagacctctacccttactcataggacaactagtaccccatcgttttcccccagcgtgcataacgtgaccggaacagtcagccagaagaccagtccgtccggggagaccgccacctcatcattatgctcagtaaccaataccagcatgatgacctccgagaagatcaccgtcaccacatccactggcagtacactaggtaatcccggagagacctccagtgtgcccgtaacgggctccttgatgccagtaactagcgccgcactggtgaccttcgatcctgagggccagtcgccagcgactttttctcgcactagcacacaagacactactgccttttctaagaaccaccagacacagtcagtggaaacgacaagagtgagccagattaataccctgaacacgcttacaccagttactacatccaccgtgttgtcgtccccatctggcttcaacccttctggtacggtgtcacaggagacctttccatcgggcgaaaccaccacgagcagcccaagctctgtttccaatacattcctcgttaccagcaaggttttccgtatgcctacatctagagattccactctgggaaacacggaagagaccagcctgtcggtgtcaggaaccatcagcgccatcacttcgaaggtttctaccatatggtggagcgacactctttccactgctctctccccctcttccctgccacctaagatcagcaccgcttttcacacacaacagagtgagggagctgaaaccacgggaagaccacacgagaggagttcattctcccccggagtgagtcaggagatcttcactctccatgagacaacaacctggcccagttcattttcttcgaagggtcatacaacctggtcccagactgagctcccaagcacatcaacgggggcagccacgcgcctggtaacaggcaatccctccacaggcacggcgggtaccatacctcgagtacccagcaaggtgtcagccattggagaacctggggaacccaccacttactctagccattctacaaccctgcccaagactactggcgctggcgctcaaacacagtggacacaggaaaccggaacaaccggggaggccctgttgtcctccccttcctattccgtgacccagatgattaagactgcaacatctccatctagctcacccatgcttgacaggcataccagtcagcaaattaccactgccccaagtacaaatcacagtaccatccatagtacaagcacgtcaccacaggaaagtccggctgtatcccagagaggtcatacccaagctccgcagactacgcaggaatcccagacaactcgctcggtctcaccaatgaccgataccaaaacggtgacaaccccaggtagtagctttaccgcttcgggccacagtccttcggagattgttccgcaggacgctcctaccatttctgccgcaaccactttcgcgcctgcaccgaccggtgatggacatacaacccaagctcccaccacagctctccaggctgcgcctagctctcacgacgctactctggggccatctggtggtactagcttatctaaaactggggctcttactttggccaattcggtggtgtccacccccggaggaccagaaggccagtggacctccgcctccgcaagtacatctcccgacaccgctgccgctatgacacacacacaccaagctgaaagcactgaggcatccgggcagacgcagacaagtgagccagcttctagtgggtccaggacaactagtgctggcacagccactcctagctcttcaggagcctccggtaccacaccctccggcagcgaggggatcagtacatcaggggagactactcgattcagctccaacccgtctagggactcacacaccacacaaagcacaaccgagctgcttagtgcaagcgccagccacggagccatccccgtaagtacaggaatggcctcttccatcgtgccaggcacctttcaccctacactgtccgaagcttctacggcgggtagacccacaggacaaagttcaccaacctcacccagtgctagccctcaggagacagctgccatcagccgcatggcccagacccagaggacccggacgtctcgaggctccgataccatctctctggctagccaggccacggacacattcagtaccgttcctcccacaccccctagcattacgtctaccggcctgacgagtccccagaccgaaacccacactctgagcccatcgggaagcggaaaaacgttcacaaccgctttgatcagcaatgctaccccattaccagtgacctatgccagctccgcgagcacgggacacgcgactccacttgccgtttctagtgctacctccgcttcaaccgtgagttcagacagccctttaaagatggagactcctgggatgaccactccatctctcaagaccgatggcggtcgcagaaccgccacctctccacccccaactacctcacagactataatctcaacgatcccaagcacggccatgcacacgagaagtaccgccgctcccattcccatactgcccgaaaggggggtaagcctctttccatatggagccggagcaggggacctcgagttcgtcaggaggaccgtggactttacgtcccctctcttcaagcccgctacagggttcccactgggatcaagcctgcgggactccctttatttcacagacaacggccagatcattttcccggagtccgattaccagatcttttcctaccccaaccctctgcctacagggtttaccggtcgggacccagtcgccttagttgcccctttctgggatgacgcagatttctctactgggagagggacaacattttaccaggagtacgaaactttttacggagaacacagcctcttagtgcagcaggctgaatcatggatcaggaagatgacaaataacgggggatacaaagccaggtgggcgctgaaggtgacctgggtaaacgctcacgcatatcctgcccagtggacattgggtagcaacacgtatcaagcgatactgagcactgacgggtctcgttcctatgcgctgtttttatatcagtcaggaggcatgcaatgggacgtcgcccaaaggtccggcaatccagtgctgatgggcttcagttccggcgatggatatttcgagaattctcctcttatgagccagcccgtgtgggagcgatacaggccagatcggttcctgaacagcaacagtggtctgcaagggctacagttctacaggctccaccgcgaggagcgtcctaattatagattggagtgcttgcaatggttaaagtcccaacctagatggccatcgtgggggtggaatcaggtttcatgcccctgttcatggcagcagggaaggagagatctcagattccagcccgcatcccttccaccagagtatcagaaccgaaccgaggggctgcttggcgtgtggaacaataatccagaggatgatttcaggatgcccaacggctccaccatccctccgggaagcccggaagagatgctgttccattttggcatgacctggcagattaacggcaccggactgcttgggaaacgcaatgatcaactaccgagcaattttacccccgtgttttacagtcagttgcaaaaaaattccagctgggcggagcacctgattagcaattgtgacggggactcatcctgtatatacgatacactcgcgctcaggaatgccagcataggcctccacaccagggaggtgtccaagaactacgaacaagcgaacgctactctcaaccaatacccaccatccatcaatggcggaagagtaatcgaagcctacaagggtcagaccactctgatacagtacacatctaacgccgaggatgctaattttacactcagggactcttgtacagatctcgagttgttcgagaacgggactctcctgtggactcctaagagcctggagccctttacactcgagattttggcccgttccgctaagatcggattagcttcggccctccaaccacgaaccgttgtctgtcattgtaacgctgagagccagtgcctgtataaccagacatccagagtggggaatagctccctggaagtggcaggctgcaagtgtgacggcggaacttttgggaggtattgcgaaggttccgaagacgcctgtgaagaaccctgttttccaagtgtgcattgcgtgcctggtaagggatgcgaagcatgcccaccgaacctcacaggagacggcagacattgtgccgctctgggtagtagctttctgtgccagaatcagtcttgccccgttaattactgctataaccagggccactgctacatctcccagactctgggctgccagcctatgtgtacctgcccacccgcatttaccgactcgaggtgtttcttagcgggaaataatttttcacctacagtgaacctggagctgcctttgcgcgtgatccagttgctgttgtcggaggaggagaacgcatcaatggccgaggtgaacgcctccgtagcgtaccggctcggcactttggatatgagagccttcctgaggaattcccaggtggagcgtatcgactcggcggctcccgcttctggatcccctattcagcattggatggtcattagcgaatttcaatatcgccctaggggcccagtgatcgattttctgaacaatcagttactcgctgcagtggtggaagccttcttataccacgtgccgcgtcgatcagaagagcctagaaacgatgtcgtatttcaacctatttccggagaggatgtgagagacgtaactgccctgaatgtaagtaccctgaaggcctattttcgctgcgatggatataaggggtatgacctggtttacagcccccagagtggcttcacttgtgtgtccccttgctctcggggttactgcgaccacggtggacagtgccagcacctgccttcaggcccacggtgctcatgtgtcagcttctctatttatactgcctggggggagcattgcgagcacttgagcatgaaattagacgccttcttcggaatcttcttcggcgcactggggggactcttactgctcggcgttggaacattcgtcgtcttaaggttctggggctgctcaggcgctagattttcatattttttgaacagtgctgaggcgctgccgtac

SEQ ID NO: 198255 - DNA, 16239 bp, Artificial Sequence
  derived and/or modified sequence
atgaaaggtgcccgatggcggagggtcccttgggttagcctctcctgtctgtgtttatgtttacttccacatgtcgtgcctggcaccacagaggatacactgatcactgggtctaaaactgcagccccagtcacttcgacggggtccacgaccgctactcttgagggccagtctaccgccgctagcagccgaacctctaatcaggacatctcagcctcatcccagaatcatcagactaagagtaccgaaactaccagcaaggcacagaccgataccctgacacaaatgatgacgagcaccctattctctagtccctccgttcacaacgttatggaaacagctcccccagacgaaatgaccacaagttttcctagctctgttacgaacactttgatgatgaccagcaaaacaatcacaatgacaacatcaacagattctaccttgggtaatacagaggagacttcgaccgcagggaccgagagctcaacaccagtcaccagtgccgtaagtattacagccggacaggaaggccaatctaggactacatcctggagaacttcaatccaagatacctccgcatcaagccagaaccactggacccgcagcactcaaacaacccgcgaatcccaaacatctaccctcactcatcggaccacatcaaccccaagcttcagcccttccgtccacaacgtaacgggcacagtcagccagaagacctcgccctccggcgaaaccgctacctcctccctttgttcagtgaccaatacaagcatgatgacaagcgaaaagattaccgtgaccacctctaccgggtctacattaggtaatcccggagaaacatccagcgtgcccgttaccggttctctgatgccagtgacatcagcagcccttgtgacttttgacccggagggacagtcccccgcaacattcagccgcacttctactcaagacactactgcattctcgaaaaaccatcaaacccagagcgtggaaacaactcgcgtgagccagattaacaccctcaataccctcaccccagtgactacaagcactgtgctgagttctccgagcggattcaacccaagtggtacagtctcccaagaaacctttccttcgggcgaaaccaccacctcctctccaagctcggtgagcaacacctttctggtgaccagcaaagtgttccggatgccgacatcccgggacagcaccttaggaaacacagaagaaacgagcctctccgtgtcaggaacaatatctgcaattacatccaaggtgagcaccatctggtggagcgatactctgagcaccgctttatctccaagctccctgcccccaaaaatctccaccgcctttcacacccagcaaagcgagggggcagaaactactgggcgaccacacgaacgctcctccttctctccaggcgtgagtcaggaaatcttcactcttcacgagaccaccacttggccgtcttcgttctcctccaagggacacaccacctggtcacagacagagctcccctccacgagtacgggagccgcaaccagactggtaaccggcaacccttccacaggaaccgcgggaactatacctcgggtgccctcaaaagtttcggcaatcggggaacctggggaacctacgacttactcctcacactccacaactctccccaaaacaacaggggcaggagcgcaaacacaatggacacaggagacaggtaccactggagaagccttgctgtcgtccccaagttacagcgttactcagatgataaagaccgcaacctcaccatcttctagccctatgctggaccggcacaccagtcaacaaatcaccaccgccccttccaccaaccactcaacgattcatagcacatccacaagcccacaggagtcgcctgccgtgtcacagagagggcacacacaagcacctcagacaacacaggagagccagacaacccggagcgtatccccaatgactgacaccaagaccgtgacaacccccggatccagctttactgccagcggccatagtcctagcgagattgtacctcaggatgcccctaccatcagcgcggcaaccacgttcgccccagcgcctactggcgacgggcataccacgcaggctccaaccactgcgctacaggctgcaccctccagccacgatgctaccctaggtccttccggtggaacaagtctttctaagaccggcgcactcaccttagcaaattccgtggtgagcacgcccggagggcctgaagggcagtggaccagcgcctctgcctcaactagccctgacacagccgcagctatgactcatacccaccaggcagagagcaccgaagctagcgggcagacgcagactagcgaacccgcatcctctggcagcaggacaactagcgccggaactgccacaccgagtagctcaggcgcatcgggaactaccccgtcaggttcagaagggatttctacatcgggcgaaacaacacggttcagctcaaacccttcacgtgatagccacactacccagtccaccaccgaactgctcagcgccagcgcaagccacggcgctatacccgttagtaccggcatggcctcgtccatcgttccaggtacctttcacccaactctgtcagaggcatccaccgccggtcggcctacaggccaatcgagcccaacttctccaagcgcatccccacaggagacggctgctatttcgagaatggcacagacgcagcgaacccgaaccagccggggttcggacacgatctccctagcaagtcaggcaaccgataccttttctacagtacctcccacacctccatcaatcacctccacgggcttgacatcgcctcagacagaaacgcatacactctcacctagtgggtccggaaaaacctttactactgcgctcatctccaatgctacccctctccctgttacttatgcctcttctgcgagtacaggtcacacaacacccctccacgtcacagacgcctctagcgtctcaacaggacacgccactcctcttcctgtaacgtctcctagctctgtgagtactggccacacaaccccacttccagttacagacaccagttctgagagcaccggtcacgtgactcccctaccggtcaccagcttcagctcggcctcgacaggcgattcgacaccacttccagtgaccgatacaagttcagcgtctaccggacacgtcaccccccttcctgtcacttcactaagtagtgcatctaccggtgacaccactcctctgcccgtcacagacacgtcctcagcttccaccggacatgccacctccctgccggtgactgatacttcaagcgtctctacaggacacaccacaccactgcccgtgacggatacgtccagcgcgtccactgggcatgccacatccctgccagtcacggacacaagctctgtgtccaccggtcatacaaccccgctgcatgtgaccgacgccagcagcgcctctacagggcaggcaacccctcttccagtcacctctctatcttccgtgtctaccggtgacactacacccctgccggtgacttccccgtcgtcagcttccacagggcacgctactcctctgctcgtgaccgacacatctagtgcctcaaccgggcatgctacacctctcccagtgaccgatgcttcgagcgtaagcacagatcacgccacttcactccctgtgacaattccctccgcggcttccactgggcataccaccccccttcctgttaccgacaccagttctgcctcaaccggtcaagccacctccctgctggtaactgacacaagttccgtgagcactggggacacaacgccgttgcccgtcacatctacatcttcagcctccacggggcacgtaacacctctgcacgtgacctctcccagctctgcctccacagggcatgccacacctttgcccgtcaccagtctgtcaagcgcctctaccggggatacgatgcctctcccagtgacgtctcctagttcagccagcactggggacaccacacccctccccgtgacggacgcctcatctgtttcaacagggcacaccacacccctccacgtgacagacgcctcctccgcttcaacaggccaagctacaccattgccagtgacttcactcagctccgtgtccaccggcgacaccactccattaccagtgacctccccatcctcagctagcacaggacacgccactcctctcctggtgacagacaccagctctgcctcaacggggcatgcgacccccctccccgtgacagacgcctcatccgtatcgacagaccatgccacatctttaccagtgactattccttccgcagcctccacagggcatactacgcctctccccgtgactgacacctcctccgcgagcaccggccaggccacctcacttttagtgaccgatactagttccgtgtccaccggggacaccacccctctccctgttacaagcacatctagtgcgtccaccgggcacgttacccccctccacgtcacctctccatcatcagcaagtaccgggcacgcgacccccctccctgtaacttccctatcaagcgcaagtacaggcgacacaatgcctctgcccgttacaagtccaagcagcgcttctaccggagacaccacgccactgcccgtaaccgatgcatcttccgtgtctacaggccacacaacccccctgcctgtgacttctccatccagcgcgtcaactggccacacaacacccctgcctgtgacagatacttcaagcgcctctaaaggcgatacaacccctcttcccgtcacctcaccgtcttccgctagcaccggccacaccacccctctacccgtaacagatacaagcagtgcttcgacaggagacacaacacctctaccagtgaccaatgcttcaagcctttcaactgggcacgctacccccctgcatgtgactagtccgtcttcagcgagcaccgggcatgcgacccctctgcccgttacaagtacatcttccgcttctactggacacgccacaccactgcctgtgaccggcctgagctcagccaccacagatgatacaaccaggctacccgtgactgatgtcagctcagccagtaccggtcaggcaacccctctacctgtgacatcacttagcagtgtctcaaccggtgacacaacccccctgcccgtcacttcccccagctctgcttcaacaggccatgcaagtcctctgctggtgacggatgcaagcagtgcaagcacaggccaggcgactccgctgcccgttaccgacactagcagtgtgagtaccgcccacgctactccccttcccgttacaggtttgagttccgctagtactgatgacacgacaaggctgccggtgaccgacgtgagttctgcctccacgggccaggccattccattgcctgtaacttcgccctcctctgcctctaccggcgacacgacccctctacctgttacagatgcatcctctgcgtccacaggcgacaccacttctctacccgttacaatcccttcgtccgcaagttcaggtcatacaacatccttacctgtaactgacgcgagtagtgtgtccactggtcacgcaacgagtctccttgtaacagatgcctcttccgtgtcaaccggggataccacccctcttcccgtcacagacacgaacagcgcctccacgggggatacgaccccactgcacgtcacggatgcgagctctgtctccacgggccatgccaccagcctcccagttacatcgctttcatccgcaagcaccggtgacaccactccactgccagtaacctcacccagctcagcctcatccgggcacactacacccctcccagtcacagacgcgagctctgtcccaacgggacacgccaccagtcttccagtcaccgacgcctcttcagtgtctacggggcacgcaacacctctgccagtcacagatgcatccagcgtcagcactgggcatgctaccccactgcccgtaactgatacaagttcagtgagcaccggacaagccaccccactgcccgttacctcattgagttcagccagcactggagataccacccccctgccggtgacggacactagttcagcttctacaggacaagatacccccctgcccgttacctctctgtcctccgtgagcactggagatactactcccctccccgtgactaatccctcgtcagccagtacggggcacgccactccactcctggtgacagatgcttccagtataagcacggggcacgccacatctttattggtaactgatgctagctctgtgtctaccgggcacgccaccgccctgcacgatactgacgccagctccctctccaccggtgatacgacgcctttgcctgtgacaagtccaagctcaacgtcgacaggcgatacaacacccctcccagtgactgagacctccagtgtgtctaccgggcatgcaacatctttaccggttaccgacacaagttctgcatctactggccacgccacaagcctgcctgtcacagacacatccagtgcatcaactgggcacgccacccccctgcctgttactgatacaagctcagcaagcacaggacaggctacgcccctgccggtgacgagccccagcagtgcatctactggacacgcgatccccctgcttgtcaccgatacgtcatctgcctcaactggccaggccactccattgccagtgacgtctctttcatcggcctccactggggacactacccctttaccggtgacagatgcctctagcgtgagtacaggtcatgccacatcgcttcccgttaccagcctatctagcgtatccactggcgatactactcctctgcctgtgacgagtccctctagtgcgtcaactggccacgccacccctcttcatgtcaccgatgcaagcagcgcttccacagggcacgctacgcccttgccagtcacgtccctttcttcggcatcaaccggagatactactcccttaccagttacctctcccagttctgcctcaacaggtcacgcgacacctttgcatgtgactgacgcttcaagcgtgtccacaggggataccactcctttgcctgtgaccagctccagtagtgcctccagcggacacactacgccactgcccgtcacagatgcttcatctgcaagcaccggcgacacgacgcccctgcctgtgacagataccagctcagcctccacaggacatgccacccatctccctgttactggcttgtcttctgcctcgaccggggacactactaggctgcctgttactaatgtttcatctgccagcacagggcatgcaaccccccttcctgtgaccagtactagcagcgcttctaccggcgacaccacaccgctacccggaaccgatacttcctcagtgtctacgggtcacactactccacttctcgtgacagacgcctcctcagtctccacaggtgacaccacccggctgcctgtgacatccccatcatctgctagcaccgggcataccactccacttccggtgacagataccccaagcgcttccaccggcgacaccacacctctcccagtcactaatgccagtagcctttctacaagacatgccacaagcctgcacgtgactagtccttcttcggcatccaccggacatgctacgagtctcccagtcaccgacacctccgctgctagcaccggccatgctacacctctccccgtcacatcaacttcttcagcctcgaccggcgacaccactcctctgcccgtgaccgacacatactccgcgtccaccggccaagccaccccactgccggttacatcgctgtcctctgtgtctacaggggacacaaccccattgccggttacttctccaagctccgcttctactggacacgccacacccctcctcgttaccgacgcaagttctgcctctaccggtcaggctacaccactgcctgtcacctcactgtcctcagttagtaccggggataccacgcccctgcccgtgacaagcccttcttcggcttcaacggggcatgccacctccttaccggttacagataccagttccgcatccacaggggacaccactagcctacctgtgactgataccagttcagcgtataccggtgataccactagcctgcccgttaccgacacctcgtcttcctccacaggggatacaaccccactcctggttaccgaaacgagctccgtgtccacaggggataccactcccctgcccgtgaccgacacatcttccgccagcaccggacatgccacccctttgccagtgaccaatactagttcagtctcaaccgggcacgcaacccccctgcacgttacaagcccatccagcgcttctactggccacacgactccccttcctgtcaccgacgcctcttcagtgagtacaggacatgccacctcacttcccgtgactgacgcctcgagcgtgttcaccggacacgcgaccagtttacccgtcacgatcccatcatctgctagttccggccatacaacccccctgcccgtgaccgatgcctcttccgtcagcacagggcacgccacatcactgccggtgaccgacgcttcctccgtatcaaccggacatgcaacaccactgccagtgacagacgcttccagtgtgtcaacaggccatgcaacaccgcttccattgacctctctctctagcgtgtcaaccggagatacgactcctctgcccgtaacagacacaagctcagccagcacagggcaggcaacacctctgcctgtgactagtctgagctcagtatcgactggcgatacgacaccactaccggtgaccgacaccagctctgcctccactgggcatgcaacatctttgccagtgacagatacctcatccgcctctaccgggcatgccacgccgcttccagacaccgacacctccagtgcaagtacaggacacgccacactcttgccagtgactgacacttccagcgcctccataggccacgcgacatctctgccagtgaccgacacatccagcatttccacaggccacgccacccccctgcacgtaacatctccttccagtgcatctaccggacatgccacacccctgcctgtcaccgatacatctagtgctagcaccggccacgccaatcccctccatgtaacatcgcctagcagtgctagtactggccatgccacacccctccctgtgacagatactagttcggcctccaccggtcacgctactcccctgccggtcactagtctatcaagtgtgagcaccggagatacaacaccccttcctgtcacctctccttcatcggcaagcactgggcacacaacacccttgcccgtgaccgacacttcttctgcctcaacaggacaagccaccgcactgcctgtcaccagcacatctagcgcaagtacaggcgacacaacaccgctgcccgttactgatacctcctctgccagcaccggacaggcaacgcccttgccggtaacctcgctgtcctccgttagcactggcgacaccacccctctccctgtgaccagtccatcaagcgcttctaccggacatgccactcccctgctggtgaccgacgcatcttctgcttcgaccggccaggccactcccttgccagtgactagcttatcatctgtttcgaccggggacacaacgcctcttcccgtgaccagtccctccagcgcaagcacagggcacgctaccagtctgccagtgactgacacaagcagcgcaagcacgggggatacaacctcactgccagtcaccgacacgtcttccgcatacaccggggacacaacctccctgccggtgacagatacctcatcatcatccaccggagacaccacgcctctgctggtgacagagacatcctccgtctcaacggggcacgcaacccctctgctagttacagatgccagcagtgctagcaccggtcacgccacacctcttcacgtgacatctcctagctccgccagcacgggagacactacccccgttcccgttacagacacttccagtgtgagcactggccatgcaacccctttgcccgttaccgggctgtccagcgccagtacgggagacaccactagactgcccgtgacagatataagctccgccagcacaggtcaagccaccccgctccccgtgaccaatacatcctccgtgtctaccggggatacaatgccgctgcccgtcacctcacccagttccgccagcacagggcacgcgacccccctgccagtgacctctacctctagcgcgagtacggggcacgccaccccagtgcccgtgacttccacctcctcagcttcgacaggacacacaactccattacccgtgacagatactagctccgcgtctacaggggacacaaccccactgcctgtcactagcccgagttccgcctccactggacacaccactcctcttcacgttacaatcccctccagcgccagtactggggacacctccacccttccagttacaggtgcatccagtgccagtacgggacatgccacccccctccctgttacagatacatccagcgtcagtactgggcacgctacaccgcttccagttacctcattgagcagcgtctccactggtgacactactcctctgcctgtgactgatgcttcaagcgcatcaactggccaggctaccccacttccggtgacaagtctatccagcgtcagcaccggagatacaactcccctgctggtcacagatgcttcatccgttagcactggacacgccacccctctgcctgtgacagatactagctcagcctccaccggagataccactcggctccccgtgacagacacaagttccgcctctacaggccaggccactcccctaccagtcacctcactgagctcggtatctactggggataccacacctttattggtgacagacgcgagtagtgtctccaccggacacgccacacccttacctgtgaccgatactagctccgctagcacaggagacacaactcgactccccgtgaccgacacttccagtgcaagcaccgggcaggctacgcccctgcctgtgacaattccatcttcttctagcagcgggcatactactcccctcccagttacttccacctctagcgtgagtacagggcatgtgacaccgctgcatgttacatccccgtctagcgcctcgactgggcacgtcactcctttgcccgtgacatccacgtcctccgcatccaccggccacgccactccattactcgttaccgatgcgtcctctgtttctacagggcatgccacccccttacctgtgacagacgcttcatccgccagcactggcgacacaacgcctctgccagttaccgacacttcctccgcaagcactggccaggctaccccactccccgtgacttctctcagtagtgtctctacaggcgacactactccccttcctgtgactgatgcttcttcagcttccactgggcatgctactcccctgccagttaccattcctagcagtgtaagtacgggcgacacgatgcctttacccgtgacatcccccagtagcgccagcacagggcacgcaacgccattgccagttacaggcctctccagtgctagcactggcgatactacgcccctccctgttactgacactagttctgcctcaaccaggcacgctacacctttgcccgtgacagacactagctcggcctctacggatgacacgaccagactgccagtaactgacgtatcttccgcttccacgggtcacgctacccctctcccagtgactagtacatcctcagcctccacaggggacactactcccctgcctgttactgacacttcatctgtctccaccggacacgccacatcacttccagtgacctctcgatcttccgcaagtacagggcatgcgacaccactacctgtgactgatacaagctcggtttctactggccacgccacacctctgcctgtgaccagcacctcaagcgtatccaccggtcacgccacccccttgcctgtgacctctcctagcagcgctagtaccggacatgctacgccggtcccagtgactagtaccagctcagcctccacaggtgacactacccctctaccagtgacaaatgctagctcacttagcaccgggcacgccacacctttgcacgtgacatctccctccagcgcctcgcggggagatacctccaccttgcccgttacagatgcctcctcggcatctacaggacacgcaacacctctaccactgaccagcctgtcctccgtgtcaactggcgataccacacctttacccgtgactgacacttcctcagcgtccacggggcaagctacacctctcccagtaactagtttatcttccgtgtcaaccggagatacgactcccttaccagtgactattccatcatctgcctcaagcggacatacaaccagcttacctgtgaccgacgcttcatccgtctccaccgggcatggaacccccctccctgtgacttccacctcaagcgcttccactggcgataccacaccactacccgtcactgacacttctagcgcctctactggccacgccacacctttaccagtgaccgacacatcctcagctagcaccggacatgccacacccctgcccgtcactagcctgtctagcgtttcaacggggcacgccacacctttagctgtgagctctgccacaagcgcctcaactgtgagttctgatagtcctttgaaaatggaaaccccgggtatgaccacacccagccttaagactgatgggggaaggaggaccgctacgagtccaccgcctacaacctcccaaaccataatctcaactatcccaagcaccgctatgcacacacgtagcacagcggctcctatccctattcttcctgagcgaggggtttctctcttcccttatggcgcaggagctggagatcttgaatttgtgcgtaggaccgttgacttcacctcacctctattcaagcctgccacaggcttccccttggggtccagtttgcgcgattccctgtacttcaccgataacggccagataatcttccccgagagcgactaccaaattttcagctatccaaacccactaccaacgggatttactggtagagacccagtggcactggttgctcccttctgggatgatgccgacttctcgaccggcagggggaccacattttaccaggaatatgagacattttacggtgaacactcactgttggtacagcaggccgaatcgtggattaggaaaatgaccaacaatggcggatacaaagctaggtgggccctcaaggtcacctgggtaaatgcacacgcgtaccctgcccaatggaccttggggtctaacacctaccaggccatcctctcaaccgatggctctcgctcctacgcactgtttctgtaccaatccggcggaatgcagtgggatgtggcacaacgatctggcaatcccgtgttgatgggcttctcatccggggatgggtattttgaaaatagcccactgatgagccagccggtgtgggaacggtacagaccagacaggtttctcaattcaaactccggattgcagggtctccaattctatcggctgcatcgtgaggaacggcctaactaccgccttgaatgtctccagtggctgaaaagtcaaccaaggtggccgtcatggggctggaaccaagttagctgcccatgtagttggcagcaaggaagaagggacttacggtttcagcccgtgagcattgggcgatggggactcggttcccgtcaattgtgttcctttacctcttggaggggcggtgtttgctgctcttatggcccttggggtgaattccgagagggctggcacgttcagcgaccttggcagctcgcacaagagctggaaccccagagctggtgctgccgttggaatgataagccctacctctgcgctctgtaccaacagagaagaccccacgtgggctgtgccacttaccggccaccacagcctgcttggatgttcggagacccacacatcacaacactggatggcgtgagttatacttttaacggcctcggcgattttcttcttgttggagcccaggacggcaattcctcttttttattacaaggcagaactgcccaaactggctctgcccaggcgacgaatttcattgcttttgctgcacagtaccggtcgtcctctctggggcctgtaactgtccagtggcttctggaacctcatgacgccatccgggttttattggacaaccaaacagtcacttttcagcctgatcatgaggacggaggcggacaagagaccttcaatgctaccggtgtcctgctgagcaggaatggatcagaagttagcgccagctttgacggatgggccactgtgagcgtgatcgctttgtcaaacattctgcacgcttccgccagcttacccccagaatatcagaaccggacggagggccttctgggtgtctggaataacaatcccgaagacgatttcaggatgccaaatgggtcgaccatacctcctggctccccggaggaaatgctgtttcactttggcatgacctggcagatcaacggcacaggcttgctcggaaagcgtaatgaccagctcccctctaacttcacaccagttttctacagccaactgcaaaagaattccagctgggcagagcacttaattagcaattgcgatggggatagctcatgtatttacgacacacttgccttaaggaacgcctccataggtcttcatactcgagaggtcagtaagaactatgagcaggccaacgccaccctgaaccaataccctccctccatcaatgggggtcgagtgattgaagcttacaaggggcagactaccctcattcagtacacgtccaatgctgaagatgctaactttaccttgcgagacagttgtaccgatctcgaactttttgagaatggcaccctactctggacacccaagtcccttgagccatttacactggaaatcctcgcgaggtccgccaagataggtctggctagtgcattgcaaccacggactgtagtgtgtcattgcaatgccgagagtcaatgcttgtacaatcagacatcacgggtcggaaattctagcctggaggtcgccggttgtaagtgcgacggaggcactttcgggcgttattgtgagggcagcgaggatgcctgcgaagagccgtgcttcccgtctgtgcactgcgttcctggcaaagggtgtgaagcgtgtccgccaaatctcaccggagacggtagacactgtgcagcgttaggttcatcatttttgtgtcagaaccagtcttgtccggtgaactactgttataatcagggccactgttatatttcccagacactgggttgtcagccaatgtgtacctgccccccagcctttacagactcccgttgcttcctggctggaaataatttcagcccaaccgtgaatcttgagcttccattaagggtgatccagctgctcctttccgaagaagagaacgcctctatggccgaagtgaatgcctctgtagcttaccgtctggggaccctcgatatgcgggcattcttacgcaattctcaggtggaacgaatagacagcgccgctccagctagcggatcgcccatccaacactggatggttatctctgaattccaataccgcccaagaggccctgttatcgatttcttgaataatcaactgctcgcggcagttgtggaggcgttcctttatcacgtgcctagaaggagtgaggaacctagaaacgacgtggtcttccagcccattagcggagaggatgtgcgggacgtgactgcactgaatgtgtcgacattgaaggcctacttcagatgtgacgggtacaagggctacgacctcgtttactccccacagtccgggttcacctgcgtgtccccctgttcgagaggctactgtgaccacggcggacaatgtcagcacttgcctagcggcccacgctgcagctgtgttagcttcagcatttacactgcctggggcgagcactgcgagcatctttcaatgaaactggatgccttctttggaatcttcttcggcgctctgggaggtctcttgttactgggcgtaggaaccttcgtggttctgcgcttttggggctgttcgggagctcgattcagctacttcctgaactcggcggaggctttaccctag

SEQ ID NO: 198256 - DNA, 16083 bp, Artificial Sequence
  derived and/or modified sequence
atgaagggcgctcggtggcggagggtgccttgggtgtccctctcttgtctctgcctgtgtttgctcccacacgttgtgccgggtacaactgaggataccttgatcactgggtctaaaacagccgctcctgtgacgtccactgggagtactaccgccactctcgaagggcaatccaccgctgcgagctcccggacctccaaccaggacattagtgcctcttcgcagaatcaccagaccaaaagtactgagacgacctcaaaggcccagactgatacgctcactcaaatgatgacaagtactctgtttagcagcccgagcgtgcacaacgtgatggaaacagcccctcctgacgagatgacaacgagcttccccagctctgtaaccaataccctcatgatgaccagcaagaccattacaatgacgaccagcaccgatagtactctggggaatactgaggaaactagcacagcagggactgagtcctccacccccgttacaagcgcagtatccattacagcaggccaggaaggccagagcagaaccacatcttggcgaacttcaatccaggacacgtcagcctcctcccagaaccactggacccgctcgacccaaaccacacgcgagagtcaaacctccactcttacccatcggacaacctcaactccctccttcagcccatccgtacacaatgtgaccggaacggtcagtcagaagacgagtccatccggcgagacagcaacctcaagcctctgttcagtaacaaacacatcaatgatgacatccgaaaagattacagtgacgacttccacagggtcaacactcggcaaccctggggagactagttctgtcccagtgacgggatccttgatgcccgtgacgtctgccgcactcgtgacctttgatccagagggccaatcacctgcgacattcagtaggaccagtacacaggacacaaccgccttttctaagaatcaccagacacaaagtgtggaaacgacaagagtgtcgcaaattaacaccctgaacaccctcacaccggtgacaacgtccacagtgctgagtagcccttccggcttcaacccaagcggcactgtttctcaggaaacctttccaagcggagaaacaaccacatctagtccctcctccgtgtcaaacacattcctcgtgaccagtaaggtgttccggatgcctacatctagggacagcaccctcgggaatacggaagagacgagcctgtctgtaagcgggaccatatccgcaataaccagcaaagtgtctacaatttggtggtctgatactctgtcaaccgctctgtccccatccagtctcccgccaaagattagcaccgcattccacactcagcagtccgaaggggctgagacaacaggaagaccacacgagaggtcatctttctctcccggtgtgtctcaggagatattcacactccacgagaccacaacatggccatcatcgttcagctcaaaggggcacaccacctggagtcaaacagaactaccgtccacttccaccggtgccgctacccggctggtgaccggtaatccttccacaggtacagccggaactatccctcgagtcccatctaaggtgagtgccataggcgagcctggcgaaccgaccacttatagctcccattctacgacgctcccaaagaccacgggcgcaggggcacaaactcagtggactcaggagacaggaactacaggtgaagctcttctgtccagtccttcttactctgtaacgcagatgataaagactgcgacttctcctagcagctctcctatgttggaccggcatacatctcagcaaatcacgactgcgccttcaaccaatcattcaaccatccactcaacaagcaccagtccgcaagagtctcccgctgtgagtcagagggggcatacgcaagctccccagactacccaggaatctcagacaactaggagcgtatctcccatgaccgacacaaaaacagtgaccaccccaggctcatccttcacagcatccggacattcaccaagtgagatagtgccccaggatgcgcctacgattagcgctgccactaccttcgcaccggctccaaccggcgacggtcatactacgcaggcaccaaccaccgctctgcaggctgcccctagttctcatgacgccacccttggcccatccggcggtacgagcttgtccaaaaccggagcactgaccctggcgaatagtgttgtaagcacgcccggaggcccagaaggacagtggaccagcgccagcgccagcacttcccccgacaccgcagcggcaatgacccacacacaccaagccgaaagcacagaagccagtgggcagacccagaccagcgagccagcctcatctggctctaggactacctccgccggaacagcaaccccgtccagttctggggcatctggaaccacaccttcaggtagcgaaggaatcagcacctccggcgagacaaccagattttcctctaacccgtcgcgtgactcccacactacccagagcactaccgagttactttccgcaagcgcttctcacggtgctattcccgttagcacaggtatggcatcatccatcgtgccaggaacgtttcatcctacacttagcgaagccagtaccgctgggaggcccacagggcaatcaagccctacctctccctccgccagtccccaggagaccgcggcaatcagcaggatggcccagacccagagaactcgaacatctcgcggatcagacactatcagcctggctagtcaagcaactgacaccttttccaccgtgcctccaacaccacccagtatcacaagcactggccttaccagcccacagacggaaacccatacactgtccccgtctggcagtggaaaaacttttaccacggcccttattagtaatgccactccactgcccgtcacgtacgccagttctgcttcaacgggccataccacccccttgcacgtgacagatgcatcttctgtgtccactgggcatgccacccctctccccgtgacatccccgtctagtgtgagtacggggcacaccactcccctgccggttaccgatacctcatcagagtccaccggacacgtgaccccgctgcccgtgactagtttcagttcggcgtcaacgggagactccacaccactgcctgtgactgatacctcatcagcaagtaccggccacgtgactcctctcccggtaactagcctaagctcagccagcaccggcgatacgacacctctgcctgtgaccgatacctcatccgccagcaccggccacgccacaagcctgccggtcactgatacatcatccgtcagtaccggacatactactcccctcccagtgacagatactagcagtgcctctacaggccacgctacctcactgccagtaactgatacttcatctgtgagcaccggccacaccactcccctacacgtcaccgatgcttcatcagcctccaccggccaggctacccccttacccgtgacgtcacttagctctgtctcaaccggtgacacaactcctctccctgtgaccagcccttcttcagcttcaactggtcatgccacacccttgctcgttacggacacatccagcgcaagtacaggccacgccactccactccccgtaacagacgccagttccgtttctacggatcacgctacgtccctcccggtgaccattcctagcgccgcaagtacaggacacacgacacccctccccgttacagatacatccagcgcgtcaactggtcaggctaccagcttgctggttaccgatactagctccgtgagcaccggcgatactacacccctgcccgtaacctccacttcgtctgcaagtaccggacatgtgacccctttacacgtgacttctccaagcagtgccagtacaggccatgcaacaccgttgcctgttacgagcctctcatctgcttccactggtgatactatgcctctgccagtcactagtccgtcaagcgcaagtactggcgataccacgccattgcccgtgacagacgcatccagcgtaagcacgggccatacgacaccccttcacgttaccgacgcctcctcagcaagcaccggacaggctacaccccttccagtgactagcctatcctctgtctctaccggagacactacccctctgcccgtcacctccccctcatctgccagtacagggcatgcaacgcccctgctggtcacagatacaagctccgcttccactggccacgccacacccctgcccgtgaccgatgcgtcatctgtttcgaccgatcacgccacttctctccccgtgacaatccctagcgccgcatccacaggacacacaactccattgcctgttactgacactagttccgcgagtacaggccaggccaccagcctcttggtcactgatacctcatcagtttctaccggggacaccacgccgctgcctgtgacgtcaacaagcagcgcttccacaggccatgttactcctctacatgtgacatctcccagttccgcttctactggccacgctacgcccctgcccgtgacttccctgtcatcggcatcaactggagataccatgcccctgcccgtgacatccccaagctcggcctcaaccggtgataccacccccctgcctgtgaccgatgcctcctctgttagtacggggcacactactcctctgccggtgaccagcccttccagtgcttcaaccggccacactactccactgcctgtcacagacacttcctccgcctccaaaggagataccactccactgcccgttacatcccccagctccgcttctaccggacatacaacacccctgccagtcaccgacacaagtagcgcgtctaccggagacaccacaccactgcctgtgactaacgcctcttcgctctcgacagggcacgcaacacccttgcatgttaccagcccgagctccgctagcaccggacatgctacccccctgccagttacttcaacttcctctgcctcaaccgggcacgctacccctttgcccgtgacgggcctgagctctgcgaccaccgacgataccacacggctccctgtcaccgatgtgtctagcgcgagcaccggacaagccacacccctgcctgtaacaagcctgtcatccgtgtcaaccggagacactactccacttccggtgaccagccccagctcagcctccaccggccacgcttctccactcctagtgacagatgcttctagcgccagcaccggccaggccacaccgctcccagtcacggatacatcaagcgtgagcaccgcccacgctaccccattgcctgtgacaggcctctcttcagcatcaacagatgataccacccgtctgcctgtcaccgacgtgtcatccgccagcacgggccaggctattccactccctgtaacatcccctagtagcgctagtacaggcgacacaacccccttgcctgtgacagatgcgtctagtgctagtacaggagacaccacgtctctgccagtaacgatacctagttcggcctcatccggacacaccacatcgctgcccgtcaccgacgcatcgagtgtgagtaccggccatgccaccagccttctggtaacagacgcctcttccgtgtccaccggagacaccactccactgccggtaacagataccaactccgctagcaccggggacacaacgcctctccatgtgacggacgctagcagcgtttccacaggccacgctacctccttgcccgtcacttcgttgtctagcgcctctactggcgacacaactccactgccggtcacaagcccatcctcagcaagctccggccacaccacaccactgcccgtaacagacgcctctagtgtcccaacaggacatgcaacgtctctacccgtgacagacgcctcaagtgtgagcacgggccacgccacacctctgccagtcactgatgcttcatcggtcagcaccggccacgccacccccctccccgtgacagatacttcctcggtaagcaccggtcaggccacccctctcccggtaacctcccttagcagcgcgtcaaccggagataccaccccgttgcctgttactgacacgagctctgctagtactggtcaggatactccgctcccggtgacgtcgctatcctcagtgtcaaccggcgacaccaccccactccccgtgactaacccgtcttccgccagtaccggacacgccaccccattgcttgttacagacgcctccagtatctcaaccggccacgccacttcactcctggttacggacgcatcctccgtctccaccggccatgccactgcactgcacgacactgatgcctctagtctgagcacaggcgacacaacccccctgcctgtaacaagcccatcctcaacctccaccggcgataccactcccctgcccgtgaccgagacctcatcagtgagcaccggtcacgctaccagcctgcccgtgaccgacacctcaagtgcatcaaccggacatgcgacttctttgcctgtgaccgatacatccagtgcctccacagggcatgcaacgccgttaccagtgaccgacactagtagcgcttccacaggccaagccaccccgctccccgtaacatcccccagtagtgcctccactggccacgccattccacttctggtaaccgatacaagcagcgctagcaccgggcaggctactccattacccgtcaccagcttatcatctgcctctactggagatacgacgccgctgccggtgaccgacgcatcttcggtatcaacggggcacgcaacctcattgcctgtcacatctttaagctccgtgtcgacgggggacaccacaccattgcccgtcacatccccctcctctgccagtaccggtcatgccaccccactgcatgtgactgatgcttccagtgccagtactggacatgccaccccactccccgttacgtctctttcatcagcctcgactggcgacaccacccctttgcctgttacgtccccgagcagcgcgtccacgggccacgccacaccgctccacgtaaccgacgcatccagcgttagtacaggagataccacccccttgcccgtcacatcctcgagcagcgcttctagtggtcatacaacgccactccccgtgactgatgccagttcagccagcaccggggacacaacccctctgcccgttacagacacaagctccgcaagcaccgggcatgccacccacctccctgttactggtctgtcatctgccagcaccggggataccacgcgacttcccgtgactaatgtatcgagtgccagcaccggtcacgcaacacccttgcctgtgacgagtaccagttccgccagtactggcgataccactcccttaccaggaacagatacctccagtgtcagtaccggccataccacccctctgctcgtgaccgatgcctcatcagtctctactggggacactaccaggctccctgtgacttctccctcctccgcttcgacaggccacacaaccccactacccgtgaccgacaccccatctgctagcacaggggacacgacgccactgccggttacgaacgcatctagtctttctacgcgacacgccaccagcctccatgtgacgagcccttcctctgccagcacgggtcatgcaacttccctgccagtgaccgacactagtgctgcttccaccggccacgccacaccgctgcccgttacatctacaagctctgcctcaacgggagacaccacgccactgcccgtgacggacacttactccgcaagtaccgggcaggctactccactacctgttacgtcgctttcttctgtgtcaacgggcgacaccacccccttaccagtaaccagccctagttccgccagcaccggccatgcaactccactcttggttactgacgcctcatcagccagcactggccaggccaccccattgcctgtgacatctttaagttccgtctccaccggagacacaaccccgttgcccgtgactagtccctcctcagcatcaaccggtcacgccacatcactacccgtaaccgacacctcgagtgctagcacgggagataccactagcctcccagttacggataccagctctgcctacacaggcgacactacctccctgcccgtcacagatacaagcagcagcagtacgggtgatacaacacctctgttggttactgagactagcagtgtcagtaccggcgatactacgccactgcctgttaccgatacctcgtcggcgtctaccggtcatgccacacccttgccggtgaccaatacatctagtgtctcaaccgggcatgccacacctctccacgtcacatctccttcatctgccagcacgggacacaccaccccgttgcctgtaaccgacgcctcttccgtgtcaacaggacacgctacttccttgcctgtgaccgacgcttcctccgtttttaccggccacgcaacctctctgcccgtgacaattccgagttcggcatcctctgggcacaccacccccctccccgttaccgacgccagctctgtgtctacaggacacgcgacctcgctgcctgtcaccgatgcgagtagtgtaagtacaggccatgcaactcctctaccagtcaccgatgcttcttccgtgtccaccggccacgccaccccactgcccctgacctctctaagctcagtgtccaccggagatacgacccccctgcccgtcactgatacaagctccgcatcaacaggtcaagctacccccctccctgtgacaagcctctccagcgtgagtaccggcgatacaacgcccctgccagtgacggacacatcgtccgcttccaccggacacgcgaccagcctgccagtaactgatacgagctccgcttcaacaggccacgccactcctttacctgacactgataccagcagcgcttccactggtcatgcgaccctgctgcctgtcactgacacctcctctgcatccatcgggcacgcaactagcctcccagtcacagacacatcttcgatatctacagggcatgccacacccctgcatgtgactagcccatcatccgcatccaccggtcatgcaacacccctgcccgtcaccgatacgtccagcgctagtaccggccacgctaatcccttgcatgtcactagtccttcatctgcgagcaccggacacgcaacacctctgccggtgacggataccagcagcgcgtccacaggacacgctactcctctccccgtgacaagtctaagttccgttagtaccggcgataccacaccactgcctgttacttccccttcctctgcaagtaccggccacaccactccacttcccgtcaccgatacttctagcgcatcgaccggtcaagccaccgccctaccagtgacgagcacgagctccgcctcaaccggtgacacaacacccttgccagtcactgatacctcaagcgccagcacgggacaggccacgcccctgcctgttacgtcattgtcttccgtgtctactggcgacaccacacctttgcccgtgacaagcccctcctcagcttcgaccggccacgcgacacccctgctggtaaccgatgcttcgtcggctagtacaggccaagccacgcccctgcctgtgactagcctgtcaagcgtgtctacaggcgacactacgccactacctgtgacctccccttcatcggcctccacggggcatgcaacgtccctccctgtgacagacaccagtagcgcctccactggtgatacaacaagtctcccagttactgacacctcgagtgcatataccggggacacaacatccctgccagtcactgataccagttcttcctctaccggggataccacaccactgctagttacagagactagctctgtgtctactgggcacgccacgccacttctggttacagatgcgtcctcagcctcaactggtcacgctacgccactgcacgtgacatccccatcaagcgcctcgaccggcgataccaccccagttccagtcactgacacgtcttccgtaagtacgggacacgctactcctctacctgtgacggggctctcttccgcctctactggggataccacccgcttacctgtgacagacatcagctccgcttctacgggtcaagcaacgcccctgcccgtaaccaataccagtagtgtgagtaccggcgacacaatgccgttaccagtaacctcacccagttctgccagtaccggccatgctacacccctgcctgtgacaagcacaagcagtgcttcaacgggacacgctactccagtccccgtgacatctactagctctgcctcaaccggacatactaccccattgccagtcactgatacatccagtgcgagtacgggcgacactacacccttgccggtcacctccccaagtagcgccagcacaggtcacactaccccactgcacgtgacaatccccagcagcgccagcacaggtgatacttccacacttccagtgacgggcgctagctccgcaagcacggggcacgccacccctcttccagtaactgacactagcagcgtatctaccggccatgctacaccgctccctgtcacgtccctgagttctgtgagtactggggacaccacaccactgcccgtgactgacgcctcctccgcttccactggccaagccactccactgcctgtgacttcactgagcagcgtgtcaacaggggatacaacccccctgctggtcaccgatgcctcatccgtatccacgggccacgcaacccctctccctgttaccgatacgagctctgcctctactggagacacgaccagactgccagtgacggacacaagcagtgcttccacaggccaggctacgccactgcccgtgacatctctgtccagtgtgagcaccggcgatacaactccactgttggtcaccgacgcctcttctgtgagcactggtcatgcgacaccactgccagtgactgacacttccagcgcaagcaccggagacacgacacgactgccagttacggacacctcttccgcaagtacaggccaggcgacaccactgcctgtgacgatccctagcagttcaagtagtggacatactactcctctccccgttacatccacatcaagtgtctctaccggccatgtcactcctctgcacgttacctctccctcctctgcaagcactggccatgtgacccccctccccgtgacctcgacaagcagtgcttctacgggtcatgccacacccttactggtgaccgacgcaagttccgtgtcgaccgggcacgccactcccctgcccgtgaccgacgccagtagcgcatccacaggagacacaaccccactccctgtcacagacacatcatcagcatctacaggccaagccacaccgttgccagtgaccagtctgagttccgtgagtaccggagacaccaccccgttgcccgtgaccgacgccagcagcgctagcactggtcatgcaacaccattgcctgtgactattcctagctcagtctcaacaggcgacacaatgcctctgccagtgacatctccaagctccgccagcacggggcatgctacccccctgcctgtgaccggcctatcctctgcctccacaggggacacgacacctctccccgttaccgacactagctcggcatccacccggcacgccacacccctgcctgtgactgacacaagctccgcctctacggatgacacaacaagactccccgtaacggatgtttcatccgcaagcaccgggcatgccactccacttccagtaactagtacatcatccgcatctacaggagatacgactcccctgccagtcacggacacttctagcgtaagcaccggccatgctacatcccttccagtgacttcaagatcctcggctagcactggccacgccaccccattacccgtcacagacacttcttctgtctcgacgggacacgcaacccccctgccagtcaccagcacttccagcgtttctacgggccacgctacacctctccccgtgacctctccctcatctgcttctacaggacacgcgactcctgtgccggtcacaagtactagctcagccagtaccggcgacaccactcccctgcccgtgaccaatgcaagcagcctatctactggacatgctactcccttgcacgttacttccccctcatctgcctcccgtggcgacaccagtactttgcccgttacggatgccagttcagcttctacaggtcatgcaacccccctgcccctgacttccctatccagcgtctcgaccggggatactactccccttcccgtgaccgatacctcatccgcaagtacagggcaggcaaccccactccctgtcacaagcctgtctagtgtttcaacaggtgataccacccccttgccagtaacaattccctcgagcgcctcaagtggtcacactacaagcctcccagttactgatgccagctctgtttcaaccggacacgggacgcctcttcccgttacaagcacttcatcagcctcgactggcgacaccacaccactgccagtgacggatacatcatcagctagtaccggtcatgctactccattgcctgtcaccgacacttcctctgcttctactggccatgctacccccctgcctgtcactagcctcagttccgtgtctactggtcatgcaacccccctggctgtttcatctgccacttcggctagcacagttagctccgactcccccctgaagatggaaacccccggaatgacaacaccatccctcaagactgacggcggaaggagaactgcaactagccccccacccaccaccagccaaacaattatttccaccatcccatctaccgcaatgcatacccgcagtactgcagctcctattcccatccttcccgagaggggtgtctccctcttcccctatggagctggcgcaggcgatttggagtttgtgagacggacagtcgactttacttcacccctgttcaagcctgctacaggattccctttgggcagctccttgcgcgactctctatacttcaccgataacggtcagatcattttcccagagtcagactaccaaatcttctcctatcctaaccctctgccaaccggttttacgggcagagaccctgtcgccttagtggcacctttctgggatgatgctgatttctctaccggcaggggtacgacattctatcaaagcaacacgtatcaggctatccttagtaccgatggaagccgctcatacgcgctctttctctaccagtcaggtggcatgcaatgggacgttgctcagaggtctggaaatcccgtattgatgggtttctcttccggtgacggctactttgagaactcaccgctaatgtctcagccagtctgggaaaggtatcgcccagataggtttctgaactctaactcaggacttcagggactccagttctatagactgcacagggaagagagacctaattaccggctcgaatgcttgcagtggctcaaaagccagccgagatggccaagctgggggtggaaccaggtgtcctgtccgtgctcttggcaacaggggcgtagagacctacggtttcagccagtttcaattggcagatggggcctgggatctagacagctctgcagcttcacctcctggagaggcggagtctgctgctcttatggtccctggggagaattccgcgaaggctggcatgtgcagaggccctggcagctggctcaagaactggaaccccagtcatggtgttgccgttggaacgacaaaccttatctgtgtgccctgtatcagcagaggcgaccccatgtcggatgtgctacatatcgcccacctcagcccgcttggatgtttggtgacccacacattactacgcttgacggggtgtcatatactttcaatggacttggagactttctgctggtaggcgcacaggacggaaattcttccttcttacttcaggggcgtactgcgcagactggatctgctcaagcaaccaattttatagctttcgctgcccagtatagatcctcttctctgggtcccgtaaccgtacaatggctattagagccccatgacgctatccgagtgctactggataaccagaccgtgaccttccagcctgaccatgaggacggaggaggtcaggagacattcaacgctacaggtgtgttgctgtcaagaaatggctccgaagtgtcagcatcattcgacggttgggccaccgtgtcagtcatcgccctgtccaacatattgcatgcttcagccagtctgcccccagagtaccagaaccgcacggagggtctgctgggggtgtggaataacaaccccgaggatgactttcgcatgccgaatggcagcaccattcccccaggcagccctgaggagatgcttttccatttcggaatgacatggcagattaatggcactggtctcctcggcaagcggaacgatcagctcccatccaatttcacaccagtcttttattcccagctgcaaaaaaattcaagttgggcagagcacttgatcagcaattgtgatggcgattcaagctgtatttacgataccttggcactaagaaatgcaagcattggcctgcacaccagggaagtgtcgaaaaattatgagcaggccaacgctaccctcaatcaatatccgccaagcataaacgggggaagagtgattgaagcatacaaggggcagactaccctgattcagtatactagcaacgcagaggacgctaactttacactaagagactcgtgcacagaccttgaactgtttgagaacggaacgttgctgtggacccccaaaagccttgaacccttcacattggagattcttgcccgatctgccaagattggccttgcgagcgccctgcagccacggacggtcgtttgccactgtaatgccgagagtcagtgtttatacaaccaaactagcagggtgggtaattcttccttagaggttgctgggtgtaagtgcgacggaggaacgttcgggagatattgtgagggctcagaagacgcgtgtgaggaaccatgctttcctagtgttcattgcgtgccgggtaaagggtgcgaggcatgccctcccaatctcaccggggatggcaggcactgtgcagcattgggtagcagtttcttatgtcagaaccaaagctgcccggttaactactgctacaatcaggggcattgctatatctcgcagacacttggttgccagcccatgtgcacttgccctccagcatttactgacagcagatgcttcctcgccggtaataactttagccccacagtcaacctggagttgccactgcgagtgattcaacttctgctcagcgaggaagagaacgccagcatggcagaggtaaatgctagtgtggcctacagactcggcaccctggacatgcgggcatttctgcgaaattcccaagtggaaagaatagactccgccgctcctgccagtggtagtcccattcagcattggatggtgatcagtgaattccagtacaggcctcggggtcctgtcattgacttccttaataaccagctattggccgctgtggtggaggccttcctgtaccatgtgccaaggcgatccgaggagccacggaatgacgttgtgttccagccaatctctggcgaggatgttagggatgtgacagccctgaacgtttcgaccctgaaagcatacttcaggtgcgacggctacaaaggttatgatctggtgtatagccctcagagtggcttcacatgtgtgtctccttgcagtcggggatactgtgatcatggaggacagtgccagcacctgcccagcggcccacgatgcagttgcgtctctttttcaatttacacagcctggggcgagcattgcgagcacctgtcaatgaaactggatgcattctttggtattttctttggggctcttggcggattgcttctgcttggggtcgggacattcgtggttctccgcttttggggttgcagtggcgcaagattctcctactttctcaattctgccgaggccttaccctac

SEQ ID NO: 198257 - DNA, 5739 bp, Artificial Sequence
  derived and/or modified sequence
cccggcaccaccgaggacaccctgatcaccggcagcaagaccgccgcccccgtgaccagcaccggcagcaccaccgccaccctggagggccagagcaccgccgccagcagcagaaccagcaaccaggacatcagcgccagcagccagaaccaccagaccaagagcaccgagaccaccagcaaggcccagaccgacaccctgacccagatgatgaccagcaccctgttcagcagccccagcgtgcacaacgtgatggagaccgccccccccgacgagatgaccaccagcttccccagcagcgtgaccaacaccctgatgatgaccagcaagaccatcaccatgaccaccagcaccgacagcaccctgggcaacaccgaggagaccagcaccgccggcaccgagagcagcacccccgtgaccagcgccgtgagcatcaccgccggccaggagggccagagcagaaccaccagctggagaaccagcatccaggacaccagcgccagcagccagaaccactggaccagaagcacccagaccaccagagagagccagaccagcaccctgacccacagaaccaccagcacccccagcttcagccccagcgtgcacaacgtgaccggcaccgtgagccagaagaccagccccagcggcgagaccgccaccagcagcctgtgcagcgtgaccaacaccagcatgatgaccagcgagaagatcaccgtgaccaccagcaccggcagcaccctgggcaaccccggcgagaccagcagcgtgcccgtgaccggcagcctgatgcccgtgaccagcgccgccctggtgaccttcgaccccgagggccagagccccgccaccttcagcagaaccagcacccaggacaccaccgccttcagcaagaaccaccagacccagagcgtggagaccaccagagtgagccagatcaacaccctgaacaccctgacccccgtgaccaccagcaccgtgctgagcagccccagcggcttcaaccccagcggcaccgtgagccaggagaccttccccagcggcgagaccaccaccagcagccccagcagcgtgagcaacaccttcctggtgaccagcaaggtgttcagaatgcccaccagcagagacagcaccctgggcaacaccgaggagaccagcctgagcgtgagcggcaccatcagcgccatcaccagcaaggtgagcaccatctggtggagcgacaccctgagcaccgccctgagccccagcagcctgccccccaagatcagcaccgccttccacacccagcagagcgagggcgccgagaccaccggcagaccccacgagagaagcagcttcagccccggcgtgagccaggagatcttcaccctgcacgagaccaccacctggcccagcagcttcagcagcaagggccacaccacctggagccagaccgagctgcccagcaccagcaccggcgccgccaccagactggtgaccggcaaccccagcaccggcaccgccggcaccatccccagagtgcccagcaaggtgagcgccatcggcgagcccggcgagcccaccacctacagcagccacagcaccaccctgcccaagaccaccggcgccggcgcccagacccagtggacccaggagaccggcaccaccggcgaggccctgctgagcagccccagctacagcgtgacccagatgatcaagaccgccaccagccccagcagcagccccatgctggacagacacaccagccagcagatcaccaccgcccccagcaccaaccacagcaccatccacagcaccagcaccagcccccaggagagccccgccgtgagccagagaggccacacccaggccccccagaccacccaggagagccagaccaccagaagcgtgagccccatgaccgacaccaagaccgtgaccacccccggcagcagcttcaccgccagcggccacagccccagcgagatcgtgccccaggacgcccccaccatcagcgccgccaccaccttcgcccccgcccccaccggcgacggccacaccacccaggcccccaccaccgccctgcaggccgcccccagcagccacgacgccaccctgggccccagcggcggcaccagcctgagcaagaccggcgccctgaccctggccaacagcgtggtgagcacccccggcggccccgagggccagtggaccagcgccagcgccagcaccagccccgacaccgccgccgccatgacccacacccaccaggccgagagcaccgaggccagcggccagacccagaccagcgagcccgccagcagcggcagcagaaccaccagcgccggcaccgccacccccagcagcagcggcgccagcggcaccacccccagcggcagcgagggcatcagcaccagcggcgagaccaccagattcagcagcaaccccagcagagacagccacaccacccagagcaccaccgagctgctgagcgccagcgccagccacggcgccatccccgtgagcaccggcatggccagcagcatcgtgcccggcaccttccaccccaccctgagcgaggccagcaccgccggcagacccaccggccagagcagccccaccagccccagcgccagcccccaggagaccgccgccatcagcagaatggcccagacccagagaaccagaaccagcagaggcagcgacaccatcagcctggccagccaggccaccgacaccttcagcaccgtgccccccaccccccccagcatcaccagcaccggcctgaccagcccccagaccgagacccacaccctgagccccagcggcagcggcaagaccttcaccaccgccctgatcagcaacgccacccccctgcccgtgacctacgccagcagcgccagcaccggccacgccacccccctggccgtgagcagcgccaccagcgccagcaccgtgagcagcgacagccccctgaagatggagacccccggcatgaccacccccagcctgaagaccgacggcggcagaagaaccgccaccagccccccccccaccaccagccagaccatcatcagcaccatccccagcaccgccatgcacaccagaagcaccgccgcccccatccccatcctgcccgagagaggcgtgagcctgttcccctacggcgccggcgccggcgacctggagttcgtgagaagaaccgtggacttcaccagccccctgttcaagcccgccaccggcttccccctgggcagcagcctgagagacagcctgtacttcaccgacaacggccagatcatcttccccgagagcgactaccagatcttcagctaccccaaccccctgcccaccggcttcaccggcagagaccccgtggccctggtggcccccttctgggacgacgccgacttcagcaccggcagaggcaccaccttctaccaggagtacgagaccttctacggcgagcacagcctgctggtgcagcaggccgagagctggatcagaaagatgaccaacaacggcggctacaaggccagatgggccctgaaggtgacctgggtgaacgcccacgcctaccccgcccagtggaccctgggcagcaacacctaccaggccatcctgagcaccgacggcagcagaagctacgccctgttcctgtaccagagcggcggcatgcagtgggacgtggcccagagaagcggcaaccccgtgctgatgggcttcagcagcggcgacggctacttcgagaacagccccctgatgagccagcccgtgtgggagagatacagacccgacagattcctgaacagcaacagcggcctgcagggcctgcagttctacagactgcacagagaggagagacccaactacagactggagtgcctgcagtggctgaagagccagcccagatggcccagctggggctggaaccaggtgagctgcccctgcagctggcagcagggcagaagagacctgagattccagcccgccagcctgccccccgagtaccagaacagaaccgagggcctgctgggcgtgtggaacaacaaccccgaggacgacttcagaatgcccaacggcagcaccatcccccccggcagccccgaggagatgctgttccacttcggcatgacctggcagatcaacggcaccggcctgctgggcaagagaaacgaccagctgcccagcaacttcacccccgtgttctacagccagctgcagaagaacagcagctgggccgagcacctgatcagcaactgcgacggcgacagcagctgcatctacgacaccctggccctgagaaacgccagcatcggcctgcacaccagagaggtgagcaagaactacgagcaggccaacgccaccctgaaccagtacccccccagcatcaacggcggcagagtgatcgaggcctacaagggccagaccaccctgatccagtacaccagcaacgccgaggacgccaacttcaccctgagagacagctgcaccgacctggagctgttcgagaacggcaccctgctgtggacccccaagagcctggagcccttcaccctggagatcctggccagaagcgccaagatcggcctggccagcgccctgcagcccagaaccgtggtgtgccactgcaacgccgagagccagtgcctgtacaaccagaccagcagagtgggcaacagcagcctggaggtggccggctgcaagtgcgacggcggcaccttcggcagatactgcgagggcagcgaggacgcctgcgaggagccctgcttccccagcgtgcactgcgtgcccggcaagggctgcgaggcctgcccccccaacctgaccggcgacggcagacactgcgccgccctgggcagcagcttcctgtgccagaaccagagctgccccgtgaactactgctacaaccagggccactgctacatcagccagaccctgggctgccagcccatgtgcacctgcccccccgccttcaccgacagcagatgcttcctggccggcaacaacttcagccccaccgtgaacctggagctgcccctgagagtgatccagctgctgctgagcgaggaggagaacgccagcatggccgaggtgaacgccagcgtggcctacagactgggcaccctggacatgagagccttcctgagaaacagccaggtggagagaatcgacagcgccgcccccgccagcggcagccccatccagcactggatggtgatcagcgagttccagtacagacccagaggccccgtgatcgacttcctgaacaaccagctgctggccgccgtggtggaggccttcctgtaccacgtgcccagaagaagcgaggagcccagaaacgacgtggtgttccagcccatcagcggcgaggacgtgagagacgtgaccgccctgaacgtgagcaccctgaaggcctacttcagatgcgacggctacaagggctacgacctggtgtacagcccccagagcggcttcacctgcgtgagcccctgcagcagaggctactgcgaccacggcggccagtgccagcacctgcccagcggccccagatgcagctgcgtgagcttcagcatctacaccgcctggggcgagcactgcgagcacctgagcatgaagctggacgccttcttcggcatcttcttcggcgccctgggcggcctgctgctgctgggcgtgggcaccttcgtggtgctgagattctggggctgcagcggcgccagattcagctacttcctgaacagcgccgaggccctgccctag

SEQ ID NO: 198258 - DNA, 16239 bp, Artificial Sequence
  derived and/or modified sequence
atgaagggcgccagatggagaagagtgccctgggtgagcctgagctgcctgtgcctgtgcctgctgccccacgtggtgcccggcaccaccgaggacaccctgatcaccggcagcaagaccgccgcccccgtgaccagcaccggcagcaccaccgccaccctggagggccagagcaccgccgccagcagcagaaccagcaaccaggacatcagcgccagcagccagaaccaccagaccaagagcaccgagaccaccagcaaggcccagaccgacaccctgacccagatgatgaccagcaccctgttcagcagccccagcgtgcacaacgtgatggagaccgccccccccgacgagatgaccaccagcttccccagcagcgtgaccaacaccctgatgatgaccagcaagaccatcaccatgaccaccagcaccgacagcaccctgggcaacaccgaggagaccagcaccgccggcaccgagagcagcacccccgtgaccagcgccgtgagcatcaccgccggccaggagggccagagcagaaccaccagctggagaaccagcatccaggacaccagcgccagcagccagaaccactggaccagaagcacccagaccaccagagagagccagaccagcaccctgacccacagaaccaccagcacccccagcttcagccccagcgtgcacaacgtgaccggcaccgtgagccagaagaccagccccagcggcgagaccgccaccagcagcctgtgcagcgtgaccaacaccagcatgatgaccagcgagaagatcaccgtgaccaccagcaccggcagcaccctgggcaaccccggcgagaccagcagcgtgcccgtgaccggcagcctgatgcccgtgaccagcgccgccctggtgaccttcgaccccgagggccagagccccgccaccttcagcagaaccagcacccaggacaccaccgccttcagcaagaaccaccagacccagagcgtggagaccaccagagtgagccagatcaacaccctgaacaccctgacccccgtgaccaccagcaccgtgctgagcagccccagcggcttcaaccccagcggcaccgtgagccaggagaccttccccagcggcgagaccaccaccagcagccccagcagcgtgagcaacaccttcctggtgaccagcaaggtgttcagaatgcccaccagcagagacagcaccctgggcaacaccgaggagaccagcctgagcgtgagcggcaccatcagcgccatcaccagcaaggtgagcaccatctggtggagcgacaccctgagcaccgccctgagccccagcagcctgccccccaagatcagcaccgccttccacacccagcagagcgagggcgccgagaccaccggcagaccccacgagagaagcagcttcagccccggcgtgagccaggagatcttcaccctgcacgagaccaccacctggcccagcagcttcagcagcaagggccacaccacctggagccagaccgagctgcccagcaccagcaccggcgccgccaccagactggtgaccggcaaccccagcaccggcaccgccggcaccatccccagagtgcccagcaaggtgagcgccatcggcgagcccggcgagcccaccacctacagcagccacagcaccaccctgcccaagaccaccggcgccggcgcccagacccagtggacccaggagaccggcaccaccggcgaggccctgctgagcagccccagctacagcgtgacccagatgatcaagaccgccaccagccccagcagcagccccatgctggacagacacaccagccagcagatcaccaccgcccccagcaccaaccacagcaccatccacagcaccagcaccagcccccaggagagccccgccgtgagccagagaggccacacccaggccccccagaccacccaggagagccagaccaccagaagcgtgagccccatgaccgacaccaagaccgtgaccacccccggcagcagcttcaccgccagcggccacagccccagcgagatcgtgccccaggacgcccccaccatcagcgccgccaccaccttcgcccccgcccccaccggcgacggccacaccacccaggcccccaccaccgccctgcaggccgcccccagcagccacgacgccaccctgggccccagcggcggcaccagcctgagcaagaccggcgccctgaccctggccaacagcgtggtgagcacccccggcggccccgagggccagtggaccagcgccagcgccagcaccagccccgacaccgccgccgccatgacccacacccaccaggccgagagcaccgaggccagcggccagacccagaccagcgagcccgccagcagcggcagcagaaccaccagcgccggcaccgccacccccagcagcagcggcgccagcggcaccacccccagcggcagcgagggcatcagcaccagcggcgagaccaccagattcagcagcaaccccagcagagacagccacaccacccagagcaccaccgagctgctgagcgccagcgccagccacggcgccatccccgtgagcaccggcatggccagcagcatcgtgcccggcaccttccaccccaccctgagcgaggccagcaccgccggcagacccaccggccagagcagccccaccagccccagcgccagcccccaggagaccgccgccatcagcagaatggcccagacccagagaaccagaaccagcagaggcagcgacaccatcagcctggccagccaggccaccgacaccttcagcaccgtgccccccaccccccccagcatcaccagcaccggcctgaccagcccccagaccgagacccacaccctgagccccagcggcagcggcaagaccttcaccaccgccctgatcagcaacgccacccccctgcccgtgacctacgccagcagcgccagcaccggccacaccacccccctgcacgtgaccgacgccagcagcgtgagcaccggccacgccacccccctgcccgtgaccagccccagcagcgtgagcaccggccacaccacccccctgcccgtgaccgacaccagcagcgagagcaccggccacgtgacccccctgcccgtgaccagcttcagcagcgccagcaccggcgacagcacccccctgcccgtgaccgacaccagcagcgccagcaccggccacgtgacccccctgcccgtgaccagcctgagcagcgccagcaccggcgacaccacccccctgcccgtgaccgacaccagcagcgccagcaccggccacgccaccagcctgcccgtgaccgacaccagcagcgtgagcaccggccacaccacccccctgcccgtgaccgacaccagcagcgccagcaccggccacgccaccagcctgcccgtgaccgacaccagcagcgtgagcaccggccacaccacccccctgcacgtgaccgacgccagcagcgccagcaccggccaggccacccccctgcccgtgaccagcctgagcagcgtgagcaccggcgacaccacccccctgcccgtgaccagccccagcagcgccagcaccggccacgccacccccctgctggtgaccgacaccagcagcgccagcaccggccacgccacccccctgcccgtgaccgacgccagcagcgtgagcaccgaccacgccaccagcctgcccgtgaccatccccagcgccgccagcaccggccacaccacccccctgcccgtgaccgacaccagcagcgccagcaccggccaggccaccagcctgctggtgaccgacaccagcagcgtgagcaccggcgacaccacccccctgcccgtgaccagcaccagcagcgccagcaccggccacgtgacccccctgcacgtgaccagccccagcagcgccagcaccggccacgccacccccctgcccgtgaccagcctgagcagcgccagcaccggcgacaccatgcccctgcccgtgaccagccccagcagcgccagcaccggcgacaccacccccctgcccgtgaccgacgccagcagcgtgagcaccggccacaccacccccctgcacgtgaccgacgccagcagcgccagcaccggccaggccacccccctgcccgtgaccagcctgagcagcgtgagcaccggcgacaccacccccctgcccgtgaccagccccagcagcgccagcaccggccacgccacccccctgctggtgaccgacaccagcagcgccagcaccggccacgccacccccctgcccgtgaccgacgccagcagcgtgagcaccgaccacgccaccagcctgcccgtgaccatccccagcgccgccagcaccggccacaccacccccctgcccgtgaccgacaccagcagcgccagcaccggccaggccaccagcctgctggtgaccgacaccagcagcgtgagcaccggcgacaccacccccctgcccgtgaccagcaccagcagcgccagcaccggccacgtgacccccctgcacgtgaccagccccagcagcgccagcaccggccacgccacccccctgcccgtgaccagcctgagcagcgccagcaccggcgacaccatgcccctgcccgtgaccagccccagcagcgccagcaccggcgacaccacccccctgcccgtgaccgacgccagcagcgtgagcaccggccacaccacccccctgcccgtgaccagccccagcagcgccagcaccggccacaccacccccctgcccgtgaccgacaccagcagcgccagcaagggcgacaccacccccctgcccgtgaccagccccagcagcgccagcaccggccacaccacccccctgcccgtgaccgacaccagcagcgccagcaccggcgacaccacccccctgcccgtgaccaacgccagcagcctgagcaccggccacgccacccccctgcacgtgaccagccccagcagcgccagcaccggccacgccacccccctgcccgtgaccagcaccagcagcgccagcaccggccacgccacccccctgcccgtgaccggcctgagcagcgccaccaccgacgacaccaccagactgcccgtgaccgacgtgagcagcgccagcaccggccaggccacccccctgcccgtgaccagcctgagcagcgtgagcaccggcgacaccacccccctgcccgtgaccagccccagcagcgccagcaccggccacgccagccccctgctggtgaccgacgccagcagcgccagcaccggccaggccacccccctgcccgtgaccgacaccagcagcgtgagcaccgcccacgccacccccctgcccgtgaccggcctgagcagcgccagcaccgacgacaccaccagactgcccgtgaccgacgtgagcagcgccagcaccggccaggccatccccctgcccgtgaccagccccagcagcgccagcaccggcgacaccacccccctgcccgtgaccgacgccagcagcgccagcaccggcgacaccaccagcctgcccgtgaccatccccagcagcgccagcagcggccacaccaccagcctgcccgtgaccgacgccagcagcgtgagcaccggccacgccaccagcctgctggtgaccgacgccagcagcgtgagcaccggcgacaccacccccctgcccgtgaccgacaccaacagcgccagcaccggcgacaccacccccctgcacgtgaccgacgccagcagcgtgagcaccggccacgccaccagcctgcccgtgaccagcctgagcagcgccagcaccggcgacaccacccccctgcccgtgaccagccccagcagcgccagcagcggccacaccacccccctgcccgtgaccgacgccagcagcgtgcccaccggccacgccaccagcctgcccgtgaccgacgccagcagcgtgagcaccggccacgccacccccctgcccgtgaccgacgccagcagcgtgagcaccggccacgccacccccctgcccgtgaccgacaccagcagcgtgagcaccggccaggccacccccctgcccgtgaccagcctgagcagcgccagcaccggcgacaccacccccctgcccgtgaccgacaccagcagcgccagcaccggccaggacacccccctgcccgtgaccagcctgagcagcgtgagcaccggcgacaccacccccctgcccgtgaccaaccccagcagcgccagcaccggccacgccacccccctgctggtgaccgacgccagcagcatcagcaccggccacgccaccagcctgctggtgaccgacgccagcagcgtgagcaccggccacgccaccgccctgcacgacaccgacgccagcagcctgagcaccggcgacaccacccccctgcccgtgaccagccccagcagcaccagcaccggcgacaccacccccctgcccgtgaccgagaccagcagcgtgagcaccggccacgccaccagcctgcccgtgaccgacaccagcagcgccagcaccggccacgccaccagcctgcccgtgaccgacaccagcagcgccagcaccggccacgccacccccctgcccgtgaccgacaccagcagcgccagcaccggccaggccacccccctgcccgtgaccagccccagcagcgccagcaccggccacgccatccccctgctggtgaccgacaccagcagcgccagcaccggccaggccacccccctgcccgtgaccagcctgagcagcgccagcaccggcgacaccacccccctgcccgtgaccgacgccagcagcgtgagcaccggccacgccaccagcctgcccgtgaccagcctgagcagcgtgagcaccggcgacaccacccccctgcccgtgaccagccccagcagcgccagcaccggccacgccacccccctgcacgtgaccgacgccagcagcgccagcaccggccacgccacccccctgcccgtgaccagcctgagcagcgccagcaccggcgacaccacccccctgcccgtgaccagccccagcagcgccagcaccggccacgccacccccctgcacgtgaccgacgccagcagcgtgagcaccggcgacaccacccccctgcccgtgaccagcagcagcagcgccagcagcggccacaccacccccctgcccgtgaccgacgccagcagcgccagcaccggcgacaccacccccctgcccgtgaccgacaccagcagcgccagcaccggccacgccacccacctgcccgtgaccggcctgagcagcgccagcaccggcgacaccaccagactgcccgtgaccaacgtgagcagcgccagcaccggccacgccacccccctgcccgtgaccagcaccagcagcgccagcaccggcgacaccacccccctgcccggcaccgacaccagcagcgtgagcaccggccacaccacccccctgctggtgaccgacgccagcagcgtgagcaccggcgacaccaccagactgcccgtgaccagccccagcagcgccagcaccggccacaccacccccctgcccgtgaccgacacccccagcgccagcaccggcgacaccacccccctgcccgtgaccaacgccagcagcctgagcaccagacacgccaccagcctgcacgtgaccagccccagcagcgccagcaccggccacgccaccagcctgcccgtgaccgacaccagcgccgccagcaccggccacgccacccccctgcccgtgaccagcaccagcagcgccagcaccggcgacaccacccccctgcccgtgaccgacacctacagcgccagcaccggccaggccacccccctgcccgtgaccagcctgagcagcgtgagcaccggcgacaccacccccctgcccgtgaccagccccagcagcgccagcaccggccacgccacccccctgctggtgaccgacgccagcagcgccagcaccggccaggccacccccctgcccgtgaccagcctgagcagcgtgagcaccggcgacaccacccccctgcccgtgaccagccccagcagcgccagcaccggccacgccaccagcctgcccgtgaccgacaccagcagcgccagcaccggcgacaccaccagcctgcccgtgaccgacaccagcagcgcctacaccggcgacaccaccagcctgcccgtgaccgacaccagcagcagcagcaccggcgacaccacccccctgctggtgaccgagaccagcagcgtgagcaccggcgacaccacccccctgcccgtgaccgacaccagcagcgccagcaccggccacgccacccccctgcccgtgaccaacaccagcagcgtgagcaccggccacgccacccccctgcacgtgaccagccccagcagcgccagcaccggccacaccacccccctgcccgtgaccgacgccagcagcgtgagcaccggccacgccaccagcctgcccgtgaccgacgccagcagcgtgttcaccggccacgccaccagcctgcccgtgaccatccccagcagcgccagcagcggccacaccacccccctgcccgtgaccgacgccagcagcgtgagcaccggccacgccaccagcctgcccgtgaccgacgccagcagcgtgagcaccggccacgccacccccctgcccgtgaccgacgccagcagcgtgagcaccggccacgccacccccctgcccctgaccagcctgagcagcgtgagcaccggcgacaccacccccctgcccgtgaccgacaccagcagcgccagcaccggccaggccacccccctgcccgtgaccagcctgagcagcgtgagcaccggcgacaccacccccctgcccgtgaccgacaccagcagcgccagcaccggccacgccaccagcctgcccgtgaccgacaccagcagcgccagcaccggccacgccacccccctgcccgacaccgacaccagcagcgccagcaccggccacgccaccctgctgcccgtgaccgacaccagcagcgccagcatcggccacgccaccagcctgcccgtgaccgacaccagcagcatcagcaccggccacgccacccccctgcacgtgaccagccccagcagcgccagcaccggccacgccacccccctgcccgtgaccgacaccagcagcgccagcaccggccacgccaaccccctgcacgtgaccagccccagcagcgccagcaccggccacgccacccccctgcccgtgaccgacaccagcagcgccagcaccggccacgccacccccctgcccgtgaccagcctgagcagcgtgagcaccggcgacaccacccccctgcccgtgaccagccccagcagcgccagcaccggccacaccacccccctgcccgtgaccgacaccagcagcgccagcaccggccaggccaccgccctgcccgtgaccagcaccagcagcgccagcaccggcgacaccacccccctgcccgtgaccgacaccagcagcgccagcaccggccaggccacccccctgcccgtgaccagcctgagcagcgtgagcaccggcgacaccacccccctgcccgtgaccagccccagcagcgccagcaccggccacgccacccccctgctggtgaccgacgccagcagcgccagcaccggccaggccacccccctgcccgtgaccagcctgagcagcgtgagcaccggcgacaccacccccctgcccgtgaccagccccagcagcgccagcaccggccacgccaccagcctgcccgtgaccgacaccagcagcgccagcaccggcgacaccaccagcctgcccgtgaccgacaccagcagcgcctacaccggcgacaccaccagcctgcccgtgaccgacaccagcagcagcagcaccggcgacaccacccccctgctggtgaccgagaccagcagcgtgagcaccggccacgccacccccctgctggtgaccgacgccagcagcgccagcaccggccacgccacccccctgcacgtgaccagccccagcagcgccagcaccggcgacaccacccccgtgcccgtgaccgacaccagcagcgtgagcaccggccacgccacccccctgcccgtgaccggcctgagcagcgccagcaccggcgacaccaccagactgcccgtgaccgacatcagcagcgccagcaccggccaggccacccccctgcccgtgaccaacaccagcagcgtgagcaccggcgacaccatgcccctgcccgtgaccagccccagcagcgccagcaccggccacgccacccccctgcccgtgaccagcaccagcagcgccagcaccggccacgccacccccgtgcccgtgaccagcaccagcagcgccagcaccggccacaccacccccctgcccgtgaccgacaccagcagcgccagcaccggcgacaccacccccctgcccgtgaccagccccagcagcgccagcaccggccacaccacccccctgcacgtgaccatccccagcagcgccagcaccggcgacaccagcaccctgcccgtgaccggcgccagcagcgccagcaccggccacgccacccccctgcccgtgaccgacaccagcagcgtgagcaccggccacgccacccccctgcccgtgaccagcctgagcagcgtgagcaccggcgacaccacccccctgcccgtgaccgacgccagcagcgccagcaccggccaggccacccccctgcccgtgaccagcctgagcagcgtgagcaccggcgacaccacccccctgctggtgaccgacgccagcagcgtgagcaccggccacgccacccccctgcccgtgaccgacaccagcagcgccagcaccggcgacaccaccagactgcccgtgaccgacaccagcagcgccagcaccggccaggccacccccctgcccgtgaccagcctgagcagcgtgagcaccggcgacaccacccccctgctggtgaccgacgccagcagcgtgagcaccggccacgccacccccctgcccgtgaccgacaccagcagcgccagcaccggcgacaccaccagactgcccgtgaccgacaccagcagcgccagcaccggccaggccacccccctgcccgtgaccatccccagcagcagcagcagcggccacaccacccccctgcccgtgaccagcaccagcagcgtgagcaccggccacgtgacccccctgcacgtgaccagccccagcagcgccagcaccggccacgtgacccccctgcccgtgaccagcaccagcagcgccagcaccggccacgccacccccctgctggtgaccgacgccagcagcgtgagcaccggccacgccacccccctgcccgtgaccgacgccagcagcgccagcaccggcgacaccacccccctgcccgtgaccgacaccagcagcgccagcaccggccaggccacccccctgcccgtgaccagcctgagcagcgtgagcaccggcgacaccacccccctgcccgtgaccgacgccagcagcgccagcaccggccacgccacccccctgcccgtgaccatccccagcagcgtgagcaccggcgacaccatgcccctgcccgtgaccagccccagcagcgccagcaccggccacgccacccccctgcccgtgaccggcctgagcagcgccagcaccggcgacaccacccccctgcccgtgaccgacaccagcagcgccagcaccagacacgccacccccctgcccgtgaccgacaccagcagcgccagcaccgacgacaccaccagactgcccgtgaccgacgtgagcagcgccagcaccggccacgccacccccctgcccgtgaccagcaccagcagcgccagcaccggcgacaccacccccctgcccgtgaccgacaccagcagcgtgagcaccggccacgccaccagcctgcccgtgaccagcagaagcagcgccagcaccggccacgccacccccctgcccgtgaccgacaccagcagcgtgagcaccggccacgccacccccctgcccgtgaccagcaccagcagcgtgagcaccggccacgccacccccctgcccgtgaccagccccagcagcgccagcaccggccacgccacccccgtgcccgtgaccagcaccagcagcgccagcaccggcgacaccacccccctgcccgtgaccaacgccagcagcctgagcaccggccacgccacccccctgcacgtgaccagccccagcagcgccagcagaggcgacaccagcaccctgcccgtgaccgacgccagcagcgccagcaccggccacgccacccccctgcccctgaccagcctgagcagcgtgagcaccggcgacaccacccccctgcccgtgaccgacaccagcagcgccagcaccggccaggccacccccctgcccgtgaccagcctgagcagcgtgagcaccggcgacaccacccccctgcccgtgaccatccccagcagcgccagcagcggccacaccaccagcctgcccgtgaccgacgccagcagcgtgagcaccggccacggcacccccctgcccgtgaccagcaccagcagcgccagcaccggcgacaccacccccctgcccgtgaccgacaccagcagcgccagcaccggccacgccacccccctgcccgtgaccgacaccagcagcgccagcaccggccacgccacccccctgcccgtgaccagcctgagcagcgtgagcaccggccacgccacccccctggccgtgagcagcgccaccagcgccagcaccgtgagcagcgacagccccctgaagatggagacccccggcatgaccacccccagcctgaagaccgacggcggcagaagaaccgccaccagccccccccccaccaccagccagaccatcatcagcaccatccccagcaccgccatgcacaccagaagcaccgccgcccccatccccatcctgcccgagagaggcgtgagcctgttcccctacggcgccggcgccggcgacctggagttcgtgagaagaaccgtggacttcaccagccccctgttcaagcccgccaccggcttccccctgggcagcagcctgagagacagcctgtacttcaccgacaacggccagatcatcttccccgagagcgactaccagatcttcagctaccccaaccccctgcccaccggcttcaccggcagagaccccgtggccctggtggcccccttctgggacgacgccgacttcagcaccggcagaggcaccaccttctaccaggagtacgagaccttctacggcgagcacagcctgctggtgcagcaggccgagagctggatcagaaagatgaccaacaacggcggctacaaggccagatgggccctgaaggtgacctgggtgaacgcccacgcctaccccgcccagtggaccctgggcagcaacacctaccaggccatcctgagcaccgacggcagcagaagctacgccctgttcctgtaccagagcggcggcatgcagtgggacgtggcccagagaagcggcaaccccgtgctgatgggcttcagcagcggcgacggctacttcgagaacagccccctgatgagccagcccgtgtgggagagatacagacccgacagattcctgaacagcaacagcggcctgcagggcctgcagttctacagactgcacagagaggagagacccaactacagactggagtgcctgcagtggctgaagagccagcccagatggcccagctggggctggaaccaggtgagctgcccctgcagctggcagcagggcagaagagacctgagattccagcccgtgagcatcggcagatggggcctgggcagcagacagctgtgcagcttcaccagctggagaggcggcgtgtgctgcagctacggcccctggggcgagttcagagagggctggcacgtgcagagaccctggcagctggcccaggagctggagccccagagctggtgctgcagatggaacgacaagccctacctgtgcgccctgtaccagcagagaagaccccacgtgggctgcgccacctacagacccccccagcccgcctggatgttcggcgacccccacatcaccaccctggacggcgtgagctacaccttcaacggcctgggcgacttcctgctggtgggcgcccaggacggcaacagcagcttcctgctgcagggcagaaccgcccagaccggcagcgcccaggccaccaacttcatcgccttcgccgcccagtacagaagcagcagcctgggccccgtgaccgtgcagtggctgctggagccccacgacgccatcagagtgctgctggacaaccagaccgtgaccttccagcccgaccacgaggacggcggcggccaggagaccttcaacgccaccggcgtgctgctgagcagaaacggcagcgaggtgagcgccagcttcgacggctgggccaccgtgagcgtgatcgccctgagcaacatcctgcacgccagcgccagcctgccccccgagtaccagaacagaaccgagggcctgctgggcgtgtggaacaacaaccccgaggacgacttcagaatgcccaacggcagcaccatcccccccggcagccccgaggagatgctgttccacttcggcatgacctggcagatcaacggcaccggcctgctgggcaagagaaacgaccagctgcccagcaacttcacccccgtgttctacagccagctgcagaagaacagcagctgggccgagcacctgatcagcaactgcgacggcgacagcagctgcatctacgacaccctggccctgagaaacgccagcatcggcctgcacaccagagaggtgagcaagaactacgagcaggccaacgccaccctgaaccagtacccccccagcatcaacggcggcagagtgatcgaggcctacaagggccagaccaccctgatccagtacaccagcaacgccgaggacgccaacttcaccctgagagacagctgcaccgacctggagctgttcgagaacggcaccctgctgtggacccccaagagcctggagcccttcaccctggagatcctggccagaagcgccaagatcggcctggccagcgccctgcagcccagaaccgtggtgtgccactgcaacgccgagagccagtgcctgtacaaccagaccagcagagtgggcaacagcagcctggaggtggccggctgcaagtgcgacggcggcaccttcggcagatactgcgagggcagcgaggacgcctgcgaggagccctgcttccccagcgtgcactgcgtgcccggcaagggctgcgaggcctgcccccccaacctgaccggcgacggcagacactgcgccgccctgggcagcagcttcctgtgccagaaccagagctgccccgtgaactactgctacaaccagggccactgctacatcagccagaccctgggctgccagcccatgtgcacctgcccccccgccttcaccgacagcagatgcttcctggccggcaacaacttcagccccaccgtgaacctggagctgcccctgagagtgatccagctgctgctgagcgaggaggagaacgccagcatggccgaggtgaacgccagcgtggcctacagactgggcaccctggacatgagagccttcctgagaaacagccaggtggagagaatcgacagcgccgcccccgccagcggcagccccatccagcactggatggtgatcagcgagttccagtacagacccagaggccccgtgatcgacttcctgaacaaccagctgctggccgccgtggtggaggccttcctgtaccacgtgcccagaagaagcgaggagcccagaaacgacgtggtgttccagcccatcagcggcgaggacgtgagagacgtgaccgccctgaacgtgagcaccctgaaggcctacttcagatgcgacggctacaagggctacgacctggtgtacagcccccagagcggcttcacctgcgtgagcccctgcagcagaggctactgcgaccacggcggccagtgccagcacctgcccagcggccccagatgcagctgcgtgagcttcagcatctacaccgcctggggcgagcactgcgagcacctgagcatgaagctggacgccttcttcggcatcttcttcggcgccctgggcggcctgctgctgctgggcgtgggcaccttcgtggtgctgagattctggggctgcagcggcgccagattcagctacttcctgaacagcgccgaggccctgccctag

SEQ ID NO: 198259 - DNA, 16083 bp, Artificial Sequence
  derived and/or modified sequence
atgaagggcgccagatggagaagagtgccctgggtgagcctgagctgcctgtgcctgtgcctgctgccccacgtggtgcccggcaccaccgaggacaccctgatcaccggcagcaagaccgccgcccccgtgaccagcaccggcagcaccaccgccaccctggagggccagagcaccgccgccagcagcagaaccagcaaccaggacatcagcgccagcagccagaaccaccagaccaagagcaccgagaccaccagcaaggcccagaccgacaccctgacccagatgatgaccagcaccctgttcagcagccccagcgtgcacaacgtgatggagaccgccccccccgacgagatgaccaccagcttccccagcagcgtgaccaacaccctgatgatgaccagcaagaccatcaccatgaccaccagcaccgacagcaccctgggcaacaccgaggagaccagcaccgccggcaccgagagcagcacccccgtgaccagcgccgtgagcatcaccgccggccaggagggccagagcagaaccaccagctggagaaccagcatccaggacaccagcgccagcagccagaaccactggaccagaagcacccagaccaccagagagagccagaccagcaccctgacccacagaaccaccagcacccccagcttcagccccagcgtgcacaacgtgaccggcaccgtgagccagaagaccagccccagcggcgagaccgccaccagcagcctgtgcagcgtgaccaacaccagcatgatgaccagcgagaagatcaccgtgaccaccagcaccggcagcaccctgggcaaccccggcgagaccagcagcgtgcccgtgaccggcagcctgatgcccgtgaccagcgccgccctggtgaccttcgaccccgagggccagagccccgccaccttcagcagaaccagcacccaggacaccaccgccttcagcaagaaccaccagacccagagcgtggagaccaccagagtgagccagatcaacaccctgaacaccctgacccccgtgaccaccagcaccgtgctgagcagccccagcggcttcaaccccagcggcaccgtgagccaggagaccttccccagcggcgagaccaccaccagcagccccagcagcgtgagcaacaccttcctggtgaccagcaaggtgttcagaatgcccaccagcagagacagcaccctgggcaacaccgaggagaccagcctgagcgtgagcggcaccatcagcgccatcaccagcaaggtgagcaccatctggtggagcgacaccctgagcaccgccctgagccccagcagcctgccccccaagatcagcaccgccttccacacccagcagagcgagggcgccgagaccaccggcagaccccacgagagaagcagcttcagccccggcgtgagccaggagatcttcaccctgcacgagaccaccacctggcccagcagcttcagcagcaagggccacaccacctggagccagaccgagctgcccagcaccagcaccggcgccgccaccagactggtgaccggcaaccccagcaccggcaccgccggcaccatccccagagtgcccagcaaggtgagcgccatcggcgagcccggcgagcccaccacctacagcagccacagcaccaccctgcccaagaccaccggcgccggcgcccagacccagtggacccaggagaccggcaccaccggcgaggccctgctgagcagccccagctacagcgtgacccagatgatcaagaccgccaccagccccagcagcagccccatgctggacagacacaccagccagcagatcaccaccgcccccagcaccaaccacagcaccatccacagcaccagcaccagcccccaggagagccccgccgtgagccagagaggccacacccaggccccccagaccacccaggagagccagaccaccagaagcgtgagccccatgaccgacaccaagaccgtgaccacccccggcagcagcttcaccgccagcggccacagccccagcgagatcgtgccccaggacgcccccaccatcagcgccgccaccaccttcgcccccgcccccaccggcgacggccacaccacccaggcccccaccaccgccctgcaggccgcccccagcagccacgacgccaccctgggccccagcggcggcaccagcctgagcaagaccggcgccctgaccctggccaacagcgtggtgagcacccccggcggccccgagggccagtggaccagcgccagcgccagcaccagccccgacaccgccgccgccatgacccacacccaccaggccgagagcaccgaggccagcggccagacccagaccagcgagcccgccagcagcggcagcagaaccaccagcgccggcaccgccacccccagcagcagcggcgccagcggcaccacccccagcggcagcgagggcatcagcaccagcggcgagaccaccagattcagcagcaaccccagcagagacagccacaccacccagagcaccaccgagctgctgagcgccagcgccagccacggcgccatccccgtgagcaccggcatggccagcagcatcgtgcccggcaccttccaccccaccctgagcgaggccagcaccgccggcagacccaccggccagagcagccccaccagccccagcgccagcccccaggagaccgccgccatcagcagaatggcccagacccagagaaccagaaccagcagaggcagcgacaccatcagcctggccagccaggccaccgacaccttcagcaccgtgccccccaccccccccagcatcaccagcaccggcctgaccagcccccagaccgagacccacaccctgagccccagcggcagcggcaagaccttcaccaccgccctgatcagcaacgccacccccctgcccgtgacctacgccagcagcgccagcaccggccacaccacccccctgcacgtgaccgacgccagcagcgtgagcaccggccacgccacccccctgcccgtgaccagccccagcagcgtgagcaccggccacaccacccccctgcccgtgaccgacaccagcagcgagagcaccggccacgtgacccccctgcccgtgaccagcttcagcagcgccagcaccggcgacagcacccccctgcccgtgaccgacaccagcagcgccagcaccggccacgtgacccccctgcccgtgaccagcctgagcagcgccagcaccggcgacaccacccccctgcccgtgaccgacaccagcagcgccagcaccggccacgccaccagcctgcccgtgaccgacaccagcagcgtgagcaccggccacaccacccccctgcccgtgaccgacaccagcagcgccagcaccggccacgccaccagcctgcccgtgaccgacaccagcagcgtgagcaccggccacaccacccccctgcacgtgaccgacgccagcagcgccagcaccggccaggccacccccctgcccgtgaccagcctgagcagcgtgagcaccggcgacaccacccccctgcccgtgaccagccccagcagcgccagcaccggccacgccacccccctgctggtgaccgacaccagcagcgccagcaccggccacgccacccccctgcccgtgaccgacgccagcagcgtgagcaccgaccacgccaccagcctgcccgtgaccatccccagcgccgccagcaccggccacaccacccccctgcccgtgaccgacaccagcagcgccagcaccggccaggccaccagcctgctggtgaccgacaccagcagcgtgagcaccggcgacaccacccccctgcccgtgaccagcaccagcagcgccagcaccggccacgtgacccccctgcacgtgaccagccccagcagcgccagcaccggccacgccacccccctgcccgtgaccagcctgagcagcgccagcaccggcgacaccatgcccctgcccgtgaccagccccagcagcgccagcaccggcgacaccacccccctgcccgtgaccgacgccagcagcgtgagcaccggccacaccacccccctgcacgtgaccgacgccagcagcgccagcaccggccaggccacccccctgcccgtgaccagcctgagcagcgtgagcaccggcgacaccacccccctgcccgtgaccagccccagcagcgccagcaccggccacgccacccccctgctggtgaccgacaccagcagcgccagcaccggccacgccacccccctgcccgtgaccgacgccagcagcgtgagcaccgaccacgccaccagcctgcccgtgaccatccccagcgccgccagcaccggccacaccacccccctgcccgtgaccgacaccagcagcgccagcaccggccaggccaccagcctgctggtgaccgacaccagcagcgtgagcaccggcgacaccacccccctgcccgtgaccagcaccagcagcgccagcaccggccacgtgacccccctgcacgtgaccagccccagcagcgccagcaccggccacgccacccccctgcccgtgaccagcctgagcagcgccagcaccggcgacaccatgcccctgcccgtgaccagccccagcagcgccagcaccggcgacaccacccccctgcccgtgaccgacgccagcagcgtgagcaccggccacaccacccccctgcccgtgaccagccccagcagcgccagcaccggccacaccacccccctgcccgtgaccgacaccagcagcgccagcaagggcgacaccacccccctgcccgtgaccagccccagcagcgccagcaccggccacaccacccccctgcccgtgaccgacaccagcagcgccagcaccggcgacaccacccccctgcccgtgaccaacgccagcagcctgagcaccggccacgccacccccctgcacgtgaccagccccagcagcgccagcaccggccacgccacccccctgcccgtgaccagcaccagcagcgccagcaccggccacgccacccccctgcccgtgaccggcctgagcagcgccaccaccgacgacaccaccagactgcccgtgaccgacgtgagcagcgccagcaccggccaggccacccccctgcccgtgaccagcctgagcagcgtgagcaccggcgacaccacccccctgcccgtgaccagccccagcagcgccagcaccggccacgccagccccctgctggtgaccgacgccagcagcgccagcaccggccaggccacccccctgcccgtgaccgacaccagcagcgtgagcaccgcccacgccacccccctgcccgtgaccggcctgagcagcgccagcaccgacgacaccaccagactgcccgtgaccgacgtgagcagcgccagcaccggccaggccatccccctgcccgtgaccagccccagcagcgccagcaccggcgacaccacccccctgcccgtgaccgacgccagcagcgccagcaccggcgacaccaccagcctgcccgtgaccatccccagcagcgccagcagcggccacaccaccagcctgcccgtgaccgacgccagcagcgtgagcaccggccacgccaccagcctgctggtgaccgacgccagcagcgtgagcaccggcgacaccacccccctgcccgtgaccgacaccaacagcgccagcaccggcgacaccacccccctgcacgtgaccgacgccagcagcgtgagcaccggccacgccaccagcctgcccgtgaccagcctgagcagcgccagcaccggcgacaccacccccctgcccgtgaccagccccagcagcgccagcagcggccacaccacccccctgcccgtgaccgacgccagcagcgtgcccaccggccacgccaccagcctgcccgtgaccgacgccagcagcgtgagcaccggccacgccacccccctgcccgtgaccgacgccagcagcgtgagcaccggccacgccacccccctgcccgtgaccgacaccagcagcgtgagcaccggccaggccacccccctgcccgtgaccagcctgagcagcgccagcaccggcgacaccacccccctgcccgtgaccgacaccagcagcgccagcaccggccaggacacccccctgcccgtgaccagcctgagcagcgtgagcaccggcgacaccacccccctgcccgtgaccaaccccagcagcgccagcaccggccacgccacccccctgctggtgaccgacgccagcagcatcagcaccggccacgccaccagcctgctggtgaccgacgccagcagcgtgagcaccggccacgccaccgccctgcacgacaccgacgccagcagcctgagcaccggcgacaccacccccctgcccgtgaccagccccagcagcaccagcaccggcgacaccacccccctgcccgtgaccgagaccagcagcgtgagcaccggccacgccaccagcctgcccgtgaccgacaccagcagcgccagcaccggccacgccaccagcctgcccgtgaccgacaccagcagcgccagcaccggccacgccacccccctgcccgtgaccgacaccagcagcgccagcaccggccaggccacccccctgcccgtgaccagccccagcagcgccagcaccggccacgccatccccctgctggtgaccgacaccagcagcgccagcaccggccaggccacccccctgcccgtgaccagcctgagcagcgccagcaccggcgacaccacccccctgcccgtgaccgacgccagcagcgtgagcaccggccacgccaccagcctgcccgtgaccagcctgagcagcgtgagcaccggcgacaccacccccctgcccgtgaccagccccagcagcgccagcaccggccacgccacccccctgcacgtgaccgacgccagcagcgccagcaccggccacgccacccccctgcccgtgaccagcctgagcagcgccagcaccggcgacaccacccccctgcccgtgaccagccccagcagcgccagcaccggccacgccacccccctgcacgtgaccgacgccagcagcgtgagcaccggcgacaccacccccctgcccgtgaccagcagcagcagcgccagcagcggccacaccacccccctgcccgtgaccgacgccagcagcgccagcaccggcgacaccacccccctgcccgtgaccgacaccagcagcgccagcaccggccacgccacccacctgcccgtgaccggcctgagcagcgccagcaccggcgacaccaccagactgcccgtgaccaacgtgagcagcgccagcaccggccacgccacccccctgcccgtgaccagcaccagcagcgccagcaccggcgacaccacccccctgcccggcaccgacaccagcagcgtgagcaccggccacaccacccccctgctggtgaccgacgccagcagcgtgagcaccggcgacaccaccagactgcccgtgaccagccccagcagcgccagcaccggccacaccacccccctgcccgtgaccgacacccccagcgccagcaccggcgacaccacccccctgcccgtgaccaacgccagcagcctgagcaccagacacgccaccagcctgcacgtgaccagccccagcagcgccagcaccggccacgccaccagcctgcccgtgaccgacaccagcgccgccagcaccggccacgccacccccctgcccgtgaccagcaccagcagcgccagcaccggcgacaccacccccctgcccgtgaccgacacctacagcgccagcaccggccaggccacccccctgcccgtgaccagcctgagcagcgtgagcaccggcgacaccacccccctgcccgtgaccagccccagcagcgccagcaccggccacgccacccccctgctggtgaccgacgccagcagcgccagcaccggccaggccacccccctgcccgtgaccagcctgagcagcgtgagcaccggcgacaccacccccctgcccgtgaccagccccagcagcgccagcaccggccacgccaccagcctgcccgtgaccgacaccagcagcgccagcaccggcgacaccaccagcctgcccgtgaccgacaccagcagcgcctacaccggcgacaccaccagcctgcccgtgaccgacaccagcagcagcagcaccggcgacaccacccccctgctggtgaccgagaccagcagcgtgagcaccggcgacaccacccccctgcccgtgaccgacaccagcagcgccagcaccggccacgccacccccctgcccgtgaccaacaccagcagcgtgagcaccggccacgccacccccctgcacgtgaccagccccagcagcgccagcaccggccacaccacccccctgcccgtgaccgacgccagcagcgtgagcaccggccacgccaccagcctgcccgtgaccgacgccagcagcgtgttcaccggccacgccaccagcctgcccgtgaccatccccagcagcgccagcagcggccacaccacccccctgcccgtgaccgacgccagcagcgtgagcaccggccacgccaccagcctgcccgtgaccgacgccagcagcgtgagcaccggccacgccacccccctgcccgtgaccgacgccagcagcgtgagcaccggccacgccacccccctgcccctgaccagcctgagcagcgtgagcaccggcgacaccacccccctgcccgtgaccgacaccagcagcgccagcaccggccaggccacccccctgcccgtgaccagcctgagcagcgtgagcaccggcgacaccacccccctgcccgtgaccgacaccagcagcgccagcaccggccacgccaccagcctgcccgtgaccgacaccagcagcgccagcaccggccacgccacccccctgcccgacaccgacaccagcagcgccagcaccggccacgccaccctgctgcccgtgaccgacaccagcagcgccagcatcggccacgccaccagcctgcccgtgaccgacaccagcagcatcagcaccggccacgccacccccctgcacgtgaccagccccagcagcgccagcaccggccacgccacccccctgcccgtgaccgacaccagcagcgccagcaccggccacgccaaccccctgcacgtgaccagccccagcagcgccagcaccggccacgccacccccctgcccgtgaccgacaccagcagcgccagcaccggccacgccacccccctgcccgtgaccagcctgagcagcgtgagcaccggcgacaccacccccctgcccgtgaccagccccagcagcgccagcaccggccacaccacccccctgcccgtgaccgacaccagcagcgccagcaccggccaggccaccgccctgcccgtgaccagcaccagcagcgccagcaccggcgacaccacccccctgcccgtgaccgacaccagcagcgccagcaccggccaggccacccccctgcccgtgaccagcctgagcagcgtgagcaccggcgacaccacccccctgcccgtgaccagccccagcagcgccagcaccggccacgccacccccctgctggtgaccgacgccagcagcgccagcaccggccaggccacccccctgcccgtgaccagcctgagcagcgtgagcaccggcgacaccacccccctgcccgtgaccagccccagcagcgccagcaccggccacgccaccagcctgcccgtgaccgacaccagcagcgccagcaccggcgacaccaccagcctgcccgtgaccgacaccagcagcgcctacaccggcgacaccaccagcctgcccgtgaccgacaccagcagcagcagcaccggcgacaccacccccctgctggtgaccgagaccagcagcgtgagcaccggccacgccacccccctgctggtgaccgacgccagcagcgccagcaccggccacgccacccccctgcacgtgaccagccccagcagcgccagcaccggcgacaccacccccgtgcccgtgaccgacaccagcagcgtgagcaccggccacgccacccccctgcccgtgaccggcctgagcagcgccagcaccggcgacaccaccagactgcccgtgaccgacatcagcagcgccagcaccggccaggccacccccctgcccgtgaccaacaccagcagcgtgagcaccggcgacaccatgcccctgcccgtgaccagccccagcagcgccagcaccggccacgccacccccctgcccgtgaccagcaccagcagcgccagcaccggccacgccacccccgtgcccgtgaccagcaccagcagcgccagcaccggccacaccacccccctgcccgtgaccgacaccagcagcgccagcaccggcgacaccacccccctgcccgtgaccagccccagcagcgccagcaccggccacaccacccccctgcacgtgaccatccccagcagcgccagcaccggcgacaccagcaccctgcccgtgaccggcgccagcagcgccagcaccggccacgccacccccctgcccgtgaccgacaccagcagcgtgagcaccggccacgccacccccctgcccgtgaccagcctgagcagcgtgagcaccggcgacaccacccccctgcccgtgaccgacgccagcagcgccagcaccggccaggccacccccctgcccgtgaccagcctgagcagcgtgagcaccggcgacaccacccccctgctggtgaccgacgccagcagcgtgagcaccggccacgccacccccctgcccgtgaccgacaccagcagcgccagcaccggcgacaccaccagactgcccgtgaccgacaccagcagcgccagcaccggccaggccacccccctgcccgtgaccagcctgagcagcgtgagcaccggcgacaccacccccctgctggtgaccgacgccagcagcgtgagcaccggccacgccacccccctgcccgtgaccgacaccagcagcgccagcaccggcgacaccaccagactgcccgtgaccgacaccagcagcgccagcaccggccaggccacccccctgcccgtgaccatccccagcagcagcagcagcggccacaccacccccctgcccgtgaccagcaccagcagcgtgagcaccggccacgtgacccccctgcacgtgaccagccccagcagcgccagcaccggccacgtgacccccctgcccgtgaccagcaccagcagcgccagcaccggccacgccacccccctgctggtgaccgacgccagcagcgtgagcaccggccacgccacccccctgcccgtgaccgacgccagcagcgccagcaccggcgacaccacccccctgcccgtgaccgacaccagcagcgccagcaccggccaggccacccccctgcccgtgaccagcctgagcagcgtgagcaccggcgacaccacccccctgcccgtgaccgacgccagcagcgccagcaccggccacgccacccccctgcccgtgaccatccccagcagcgtgagcaccggcgacaccatgcccctgcccgtgaccagccccagcagcgccagcaccggccacgccacccccctgcccgtgaccggcctgagcagcgccagcaccggcgacaccacccccctgcccgtgaccgacaccagcagcgccagcaccagacacgccacccccctgcccgtgaccgacaccagcagcgccagcaccgacgacaccaccagactgcccgtgaccgacgtgagcagcgccagcaccggccacgccacccccctgcccgtgaccagcaccagcagcgccagcaccggcgacaccacccccctgcccgtgaccgacaccagcagcgtgagcaccggccacgccaccagcctgcccgtgaccagcagaagcagcgccagcaccggccacgccacccccctgcccgtgaccgacaccagcagcgtgagcaccggccacgccacccccctgcccgtgaccagcaccagcagcgtgagcaccggccacgccacccccctgcccgtgaccagccccagcagcgccagcaccggccacgccacccccgtgcccgtgaccagcaccagcagcgccagcaccggcgacaccacccccctgcccgtgaccaacgccagcagcctgagcaccggccacgccacccccctgcacgtgaccagccccagcagcgccagcagaggcgacaccagcaccctgcccgtgaccgacgccagcagcgccagcaccggccacgccacccccctgcccctgaccagcctgagcagcgtgagcaccggcgacaccacccccctgcccgtgaccgacaccagcagcgccagcaccggccaggccacccccctgcccgtgaccagcctgagcagcgtgagcaccggcgacaccacccccctgcccgtgaccatccccagcagcgccagcagcggccacaccaccagcctgcccgtgaccgacgccagcagcgtgagcaccggccacggcacccccctgcccgtgaccagcaccagcagcgccagcaccggcgacaccacccccctgcccgtgaccgacaccagcagcgccagcaccggccacgccacccccctgcccgtgaccgacaccagcagcgccagcaccggccacgccacccccctgcccgtgaccagcctgagcagcgtgagcaccggccacgccacccccctggccgtgagcagcgccaccagcgccagcaccgtgagcagcgacagccccctgaagatggagacccccggcatgaccacccccagcctgaagaccgacggcggcagaagaaccgccaccagccccccccccaccaccagccagaccatcatcagcaccatccccagcaccgccatgcacaccagaagcaccgccgcccccatccccatcctgcccgagagaggcgtgagcctgttcccctacggcgccggcgccggcgacctggagttcgtgagaagaaccgtggacttcaccagccccctgttcaagcccgccaccggcttccccctgggcagcagcctgagagacagcctgtacttcaccgacaacggccagatcatcttccccgagagcgactaccagatcttcagctaccccaaccccctgcccaccggcttcaccggcagagaccccgtggccctggtggcccccttctgggacgacgccgacttcagcaccggcagaggcaccaccttctaccagagcaacacctaccaggccatcctgagcaccgacggcagcagaagctacgccctgttcctgtaccagagcggcggcatgcagtgggacgtggcccagagaagcggcaaccccgtgctgatgggcttcagcagcggcgacggctacttcgagaacagccccctgatgagccagcccgtgtgggagagatacagacccgacagattcctgaacagcaacagcggcctgcagggcctgcagttctacagactgcacagagaggagagacccaactacagactggagtgcctgcagtggctgaagagccagcccagatggcccagctggggctggaaccaggtgagctgcccctgcagctggcagcagggcagaagagacctgagattccagcccgtgagcatcggcagatggggcctgggcagcagacagctgtgcagcttcaccagctggagaggcggcgtgtgctgcagctacggcccctggggcgagttcagagagggctggcacgtgcagagaccctggcagctggcccaggagctggagccccagagctggtgctgcagatggaacgacaagccctacctgtgcgccctgtaccagcagagaagaccccacgtgggctgcgccacctacagacccccccagcccgcctggatgttcggcgacccccacatcaccaccctggacggcgtgagctacaccttcaacggcctgggcgacttcctgctggtgggcgcccaggacggcaacagcagcttcctgctgcagggcagaaccgcccagaccggcagcgcccaggccaccaacttcatcgccttcgccgcccagtacagaagcagcagcctgggccccgtgaccgtgcagtggctgctggagccccacgacgccatcagagtgctgctggacaaccagaccgtgaccttccagcccgaccacgaggacggcggcggccaggagaccttcaacgccaccggcgtgctgctgagcagaaacggcagcgaggtgagcgccagcttcgacggctgggccaccgtgagcgtgatcgccctgagcaacatcctgcacgccagcgccagcctgccccccgagtaccagaacagaaccgagggcctgctgggcgtgtggaacaacaaccccgaggacgacttcagaatgcccaacggcagcaccatcccccccggcagccccgaggagatgctgttccacttcggcatgacctggcagatcaacggcaccggcctgctgggcaagagaaacgaccagctgcccagcaacttcacccccgtgttctacagccagctgcagaagaacagcagctgggccgagcacctgatcagcaactgcgacggcgacagcagctgcatctacgacaccctggccctgagaaacgccagcatcggcctgcacaccagagaggtgagcaagaactacgagcaggccaacgccaccctgaaccagtacccccccagcatcaacggcggcagagtgatcgaggcctacaagggccagaccaccctgatccagtacaccagcaacgccgaggacgccaacttcaccctgagagacagctgcaccgacctggagctgttcgagaacggcaccctgctgtggacccccaagagcctggagcccttcaccctggagatcctggccagaagcgccaagatcggcctggccagcgccctgcagcccagaaccgtggtgtgccactgcaacgccgagagccagtgcctgtacaaccagaccagcagagtgggcaacagcagcctggaggtggccggctgcaagtgcgacggcggcaccttcggcagatactgcgagggcagcgaggacgcctgcgaggagccctgcttccccagcgtgcactgcgtgcccggcaagggctgcgaggcctgcccccccaacctgaccggcgacggcagacactgcgccgccctgggcagcagcttcctgtgccagaaccagagctgccccgtgaactactgctacaaccagggccactgctacatcagccagaccctgggctgccagcccatgtgcacctgcccccccgccttcaccgacagcagatgcttcctggccggcaacaacttcagccccaccgtgaacctggagctgcccctgagagtgatccagctgctgctgagcgaggaggagaacgccagcatggccgaggtgaacgccagcgtggcctacagactgggcaccctggacatgagagccttcctgagaaacagccaggtggagagaatcgacagcgccgcccccgccagcggcagccccatccagcactggatggtgatcagcgagttccagtacagacccagaggccccgtgatcgacttcctgaacaaccagctgctggccgccgtggtggaggccttcctgtaccacgtgcccagaagaagcgaggagcccagaaacgacgtggtgttccagcccatcagcggcgaggacgtgagagacgtgaccgccctgaacgtgagcaccctgaaggcctacttcagatgcgacggctacaagggctacgacctggtgtacagcccccagagcggcttcacctgcgtgagcccctgcagcagaggctactgcgaccacggcggccagtgccagcacctgcccagcggccccagatgcagctgcgtgagcttcagcatctacaccgcctggggcgagcactgcgagcacctgagcatgaagctggacgccttcttcggcatcttcttcggcgccctgggcggcctgctgctgctgggcgtgggcaccttcgtggtgctgagattctggggctgcagcggcgccagattcagctacttcctgaacagcgccgaggccctgccctag

SEQ ID NO: 198260 - protein, 363 aa, Artificial Sequence
  derived and/or modified sequence
MELHERPDERRKARTSTQGRLGDWRRVHADGFTHRVWSSSSWLEPAMTSRTRVTWPSPPRPLPVPAAAAVAFGAKGTDPAEARSSRGIEEAGPRAHGRAGREPERRRSRQQRRGGLQARRSTLLKTCARARATAPGAMKMVAPWTRFYSNSCCLCCHVRTGTILLGVWYLIINAVVLLILLSALADPDQYNFSSSELGGDFEFMDDANMCIAIAISLLMILICAMATYGAYKQRAAWIIPFFCYQIFDFALNMLVAITVLIYPNSIQEYIRQLPPNFPYRDDVMSVNPTCLVLIILLFISIILTFKGYLISCVWNCYRYINGRNSSDVLVYVTSNDTTVLLPPYDDATVNGAAKEPPPPYVSA

SEQ ID NO: 198261 - protein, 317 aa, Artificial Sequence
  derived and/or modified sequence
MTSRTRVTWPSPPRPLPVPAAAAVAFGAKGTDPAEARSSRGIEEAGPRAHGRAGREPERRRSRQQRRGGLQARRSTLLKTCARARATAPGAMKMVAPWTRFYSNSCCLCCHVRTGTILLGVWYLIINAVVLLILLSALADPDQYNFSSSELGGDFEFMDDANMCIAIAISLLMILICAMATYGAYKQRAAWIIPFFCYQIFDFALNMLVAITVLIYPNSIQEYIRQLPPNFPYRDDVMSVNPTCLVLIILLFISIILTFKGYLISCVWNCYRYINGRNSSDVLVYVTSNDTTVLLPPYDDATVNGAAKEPPPPYVSA

SEQ ID NO: 198262 - protein, 226 aa, Artificial Sequence
  derived and/or modified sequence
MKMVAPWTRFYSNSCCLCCHVRTGTILLGVWYLIINAVVLLILLSALADPDQYNFSSSELGGDFEFMDDANMCIAIAISLLMILICAMATYGAYKQRAAWIIPFFCYQIFDFALNMLVAITVLIYPNSIQEYIRQLPPNFPYRDDVMSVNPTCLVLIILLFISIILTFKGYLISCVWNCYRYINGRNSSDVLVYVTSNDTTVLLPPYDDATVNGAAKEPPPPYVSA

SEQ ID NO: 198263 - DNA, 1092 bp, Artificial Sequence
  derived and/or modified sequence
atggaattacatgagcggcctgatgaacggcggaaagctcggacaagcactcaggggcggcttggagattggaggcgcgtgcacgctgatgggttcactcatagggtgtggtcatcatcgtcctggctggagcctgcaatgacctcccggactagagtgacctggcctagtccgcccagacctctacccgtccccgctgccgcggccgtcgcgtttggggccaagggcacagaccccgccgaagcccgcagcagccgtggaatcgaagaggccggcccgagagcccatgggagagccggtcgggaaccagaaagacgccgttcgagacaacagagaaggggaggtctgcaagctaggaggagcactcttctcaagacttgcgcgcgtgctagagccaccgctcctggcgccatgaaaatggtagctccttggacccgtttttacagcaacagctgctgcctatgctgtcatgtgagaactggaacaattctcctgggcgtctggtacctaatcataaatgctgtggtcttattaatcctgctgtcagccttggctgatcctgatcaatataatttcagctccagtgagctgggaggcgactttgaattcatggatgacgcaaatatgtgcatcgcgatcgcaatcagtctgttgatgatcctgatctgtgctatggccacttacggcgcctacaagcagagagccgcttggatcattcctttcttctgttaccagatattcgattttgcccttaacatgctggtcgcgataaccgtgttaatatacccaaactcaattcaggagtatattagacaactgccccccaacttcccctaccgagatgacgtgatgtcagtgaatccgacttgcctggtgcttatcatccttttatttatcagtataattctgacctttaaagggtaccttatatcctgcgtttggaattgctaccgttatatcaacggtcgcaactccagcgatgtgctggtctatgttacctccaatgacaccaccgtgctgcttcccccttatgacgacgcgaccgtaaatggagcggcaaaggaaccccctcccccatacgtgtcggcttag

SEQ ID NO: 198264 - DNA, 954 bp, Artificial Sequence
  derived and/or modified sequence
atgactagcagaactcgcgtgacctggcctagtcccccgcggcctttacccgtccccgctgcggccgctgttgccttcggcgcgaagggcacagatcccgctgaggcaaggtcctcacgtggcattgaggaggccggacctcgggcccacggccgggccggccgtgagcccgagcggaggagaagtaggcagcaacggcggggtggattacaggctaggcgctctaccctgttgaagacgtgcgcacgagctcgcgccacggccccaggtgctatgaaaatggtcgcaccatggacacgcttctatagcaactcctgttgtctgtgctgtcacgtgcggactggcacaattcttctgggcgtgtggtatctgataatcaacgccgtagtcctgttgatactcctctcagccctcgctgacccggaccaatataactttagctcctcggagttgggaggcgattttgagttcatggacgatgccaacatgtgcattgctattgccatctctctccttatgatcctgatttgcgccatggccacttacggcgcatacaagcaacgtgccgcctggattatccctttcttctgttatcagattttcgattttgctctgaacatgctcgtggccatcaccgtcctgatttatcctaattccattcaggagtacatccggcagttacctccaaatttcccttatcgggatgatgtcatgagcgtgaatcccacatgcctggtgctgatcatcctcctctttattagcatcatcttaacctttaagggctatcttatctcctgtgtatggaactgttatagatatatcaacgggcgaaactctagtgacgtcctggtatacgtcacctcaaacgacaccacagtgttgctgcctccttacgacgatgctacagtcaatggagccgccaaggagcccccgcctccatacgtaagtgcttag

SEQ ID NO: 198265 - DNA, 681 bp, Artificial Sequence
  derived and/or modified sequence
atgaaaatggtggctccttggactagattttattcaaattcatgttgcttgtgttgccacgtgcgtaccggcactatactgctgggagtgtggtacctgattatcaacgcggtggttctgctgatcctgctgagcgccttggctgatccggatcagtataactttagttcaagtgaactgggaggagatttcgagttcatggacgacgcaaacatgtgcatcgctatagccatttccttgctaatgatcctgatctgcgccatggcgacttatggtgcatacaaacagagagccgcatggataatcccatttttctgttatcaaatatttgatttcgcgctgaacatgctagttgccattacagtgttgatctaccccaattcaatccaagagtacattagacagctgccacccaatttcccataccgcgatgatgttatgtcagtgaaccccacctgtctggtacttatcattctgctcttcatctcaatcattctgacatttaagggctacttgatctcctgcgtttggaactgctaccgttacatcaacggtcgaaatagctccgacgtcctggtgtacgtcactagcaacgacaccaccgttctgcttccaccttatgacgatgctacggtgaatggagcagccaaggagcctccaccaccctacgtaagcgcctag

SEQ ID NO: 198266 - DNA, 1092 bp, Artificial Sequence
  derived and/or modified sequence
atggagctgcacgagaggccagatgagaggaggaaggcccggaccagcacccagggccgcctgggggactggaggagagtgcatgctgatggcttcacccaccgggtgtggagcagcagctcctggctggagcccgccatgaccagcaggaccagggtgacctggcccagccccccccggcccctgcctgtgcctgctgctgctgctgtggccttcggggccaagggcacagatcctgctgaggcccggagcagccggggcatcgaggaggccggcccccgggcccacggccgggccggccgggagcctgagcggcggcgcagccggcagcagaggcggggcggcctgcaggcccggcgcagcaccctgctgaagacctgtgcccgggcccgggccacagcccctggggccatgaagatggtggccccctggacccgcttctacagcaacagctgctgcctgtgctgccacgtgaggacaggcaccatcctgctgggcgtgtggtacctgatcatcaatgctgtggtgctgctgatcctgctgagcgccctggccgaccctgaccagtacaacttcagcagcagcgagctgggcggggactttgagttcatggatgatgccaacatgtgcatcgccatcgccatcagcctgctgatgatcctgatctgtgccatggccacctacggggcctacaagcagagagctgcctggatcatccccttcttctgctaccagatctttgattttgccctgaacatgctggtggccatcaccgtgctgatctaccccaacagcatccaggagtacatccggcagctgccccccaacttcccctacagagatgatgtgatgtctgtgaaccccacctgcctggtgctgatcatcctgctcttcatcagcatcatcctgaccttcaagggctacctgatcagctgtgtgtggaactgctaccgctacatcaatggaagaaacagcagtgatgtgctggtgtatgtgaccagcaatgacaccaccgtgctgctgcccccctatgatgatgccaccgtgaatggagctgccaaggagcccccaccaccctacgtgtctgcctag

SEQ ID NO: 198267 - DNA, 954 bp, Artificial Sequence
  derived and/or modified sequence
atgaccagcaggaccagggtgacctggcccagccccccccggcccctgcctgtgcctgctgctgctgctgtggccttcggggccaagggcacagatcctgctgaggcccggagcagccggggcatcgaggaggccggcccccgggcccacggccgggccggccgggagcctgagcggcggcgcagccggcagcagaggcggggcggcctgcaggcccggcgcagcaccctgctgaagacctgtgcccgggcccgggccacagcccctggggccatgaagatggtggccccctggacccgcttctacagcaacagctgctgcctgtgctgccacgtgaggacaggcaccatcctgctgggcgtgtggtacctgatcatcaatgctgtggtgctgctgatcctgctgagcgccctggccgaccctgaccagtacaacttcagcagcagcgagctgggcggggactttgagttcatggatgatgccaacatgtgcatcgccatcgccatcagcctgctgatgatcctgatctgtgccatggccacctacggggcctacaagcagagagctgcctggatcatccccttcttctgctaccagatctttgattttgccctgaacatgctggtggccatcaccgtgctgatctaccccaacagcatccaggagtacatccggcagctgccccccaacttcccctacagagatgatgtgatgtctgtgaaccccacctgcctggtgctgatcatcctgctcttcatcagcatcatcctgaccttcaagggctacctgatcagctgtgtgtggaactgctaccgctacatcaatggaagaaacagcagtgatgtgctggtgtatgtgaccagcaatgacaccaccgtgctgctgcccccctatgatgatgccaccgtgaatggagctgccaaggagcccccaccaccctacgtgtctgcctag

SEQ ID NO: 198268 - DNA, 681 bp, Artificial Sequence
  derived and/or modified sequence
atgaagatggtggccccctggacccgcttctacagcaacagctgctgcctgtgctgccacgtgaggacaggcaccatcctgctgggcgtgtggtacctgatcatcaatgctgtggtgctgctgatcctgctgagcgccctggccgaccctgaccagtacaacttcagcagcagcgagctgggcggggactttgagttcatggatgatgccaacatgtgcatcgccatcgccatcagcctgctgatgatcctgatctgtgccatggccacctatggagcctacaagcagagagctgcctggatcatccccttcttctgctaccagatctttgattttgccctgaacatgctggtggccatcaccgtgctgatctaccccaacagcatccaggagtacatccggcagctgccccccaacttcccctacagagatgatgtgatgtctgtgaaccccacctgcctggtgctgatcatcctgctcttcatcagcatcatcctgaccttcaagggctacctgatcagctgtgtgtggaactgctaccgctacatcaatggaagaaacagcagtgatgtgctggtgtatgtgaccagcaatgacaccaccgtgctgctgcccccctatgatgatgccaccgtgaatggagctgccaaggagcccccaccaccctacgtgtctgcctag

SEQ ID NO: 198269 - DNA, 2212 bp, Artificial Sequence
  derived and/or modified sequence
atggagttacacgaacggccagatgaaagaaggaaggcccggacctccactcagggccgactaggggactggcggagggtgcacgctgatggatttactcaccgggtgtggagctccagcagctggctggagcccgcgatgacgtcacggactcgggtcacatggccaagtccgccccgccccctccccgtccccgccgctgcagcggtcgccttcggagcgaagggtaccgacccggcagaagctcggagctctcggggtatcgaggaggcaggcccgcgggcgcacgggcgagcgggccgggagccggagcggcggaggagccggcagcagcggcgcggcgggctccaggcgaggcggtcgacgctcctgaaaacttgcgcgcgcgctcgcgccactgcgcccggagcgatgaagatggtcgcgccctggacgcggttctactccaacagctgctgcttgtgctgccatgtccgcaccggcaccatcctgctcggcgtctggtatctgatcatcaatgctgtggtactgttgattttattgagtgccctggctgatccggatcagtataacttttcaagttctgaactgggaggtgactttgagttcatggatgatgccaacatgtgcattgccattgcgatttctcttctcatgatcctgatatgtgctatggctacttacggagcgtacaagcaacgcgcagcctggatcatcccattcttctgttaccagatctttgactttgccctgaacatgttggttgcaatcactgtgcttatttatccaaactccattcaggaatacatacggcaactgcctcctaattttccctacagagatgatgtcatgtcagtgaatcctacctgtttggtccttattattcttctgtttattagcattatcttgacttttaagggttacttgattagctgtgtttggaactgctaccgatacatcaatggtaggaactcctctgatgtcctggtttatgttaccagcaatgacactacggtgctgctacccccgtatgatgatgccactgtgaatggtgctgccaaggagccaccgccaccttacgtgtctgcctaagccttcaagtgggcggagctgagggcagcagcttgactttgcagacatctgagcaatagttctgttatttcacttttgccatgagcctctctgagcttgtttgttgctgaaatgctactttttaaaatttagatgttagattgaaaactgtagttttcaacatatgctttgctggaacactgtgatagattaactgtagaattcttcctgtacgattggggatataatgggcttcactaaccttccctaggcattgaaacttcccccaaatctgatggacctagaagtctgcttttgtacctgctgggccccaaagttgggcatttttctctctgttccctctcttttgaaaatgtaaaataaaaccaaaaatagacaactttttcttcagccattccagcatagagaacaaaaccttatggaaacaggaatgtcaattgtgtaatcattgttctaattaggtaaatagaagtccttatgtatgtgttacaagaatttcccccacaacatcctttatgactgaagttcaatgacagtttgtgtttggtggtaaaggattttctccatggcctgaattaagaccattagaaagcaccaggccgtgggagcagtgaccatctgctgactgttcttgtggatcttgtgtccagggacatggggtgacatgcctcgtatgtgttagagggtggaatggatgtgtttggcgctgcatgggatctggtgcccctcttctcctggattcacatccccacccagggcccgcttttactaagtgttctgccctagattggttcaaggaggtcatccaactgactttatcaagtggaattgggatatatttgatatacttctgcctaacaacatggaaaagggttttcttttccctgcaagctacatcctactgctttgaacttccaagtatgtctagtcaccttttaaaatgtaaacattttcagaaaaatgaggattgccttccttgtatgcgctttttaccttgactacctgaattgcaagggatttttatatattcatatgttacaaagtcagcaactctcctgttggttcattattgaatgtgctgtaaattaagttgtttgcaattaaaacaaggtttgcccac

SEQ ID NO: 198270 - DNA, 3173 bp, Artificial Sequence
  derived and/or modified sequence
atcctattttctgggaaaagattactaccacagtaattgagctgtgaagcggagacaaattgctctcggtggtggttcaaagtactgcaattgactggaatagcaccgcgcagttttccttcctctcgtgcaagataagagtgataggagctgtatcgattacctgcaagatagaagtagaagcgggccgggtgcggtggctcacgcctgtaatcccagcactttgggaggctgaggcgggtggatcattcgacgtcaggagttccagaccagcctgaccaacatggtgaaaccccgtctctactaaaaatacaacaaattagccgggtgtggtggcaagcgcctgtaatcccagctactcggttggttgggcaggagaatcgcttgaacccgggaggcggaggttgcagtgagccgagatcgcgccattgcactccagcctgggcgacaagagcgagactctgtctcaaaaaaaaaaaaaaaagaagtagaagggaagaaaatcgcaaggaactagactaaaagaatctcgacccttgaatggagttacacgaacggccagatgaaagaaggaaggcccggacctccactcagggccgactaggggactggcggagggtgcacgctgatggatttactcaccgggtgcttggagctccagcagctggctggagcccgcgatgacgtcacggactcgggtcacatggccaagtccgccccgccccctccccgtccccgccgctgcagcggtcgccttcggagcgaagggtaccgacccggcagaagctcggagctctcggggtatcgaggaggcaggcccgcgggcgcacgggcgagcgggccgggagccggagcggcggaggagccggcagcagcggcgcggcgggctccaggcgaggcggtcgacgctcctgaaaacttgcgcgcgcgctcgcgccactgcgcccggagcgatgaagatggtcgcgccctggacgcggttctactccaacagctgctgcttgtgctgccatgtccgcaccggcaccatcctgctcggcgtctggtatctgatcatcaatgctgtggtactgttgattttattgagtgccctggctgatccggatcagtataacttttcaagttctgaactgggaggtgactttgagttcatggatgatgccaacatgtgcattgccattgcgatttctcttctcatgatcctgatatgtgctatggctacttacggagcgtacaagcaacgcgcagcctggatcatcccattcttctgttaccagatctttgactttgccctgaacatgttggttgcaatcactgtgcttatttatccaaactccattcaggaatacatacggcaactgcctcctaattttccctacagagatgatgtcatgtcagtgaatcctacctgtttggtccttattattcttctgtttattagcattatcttgacttttaagggttacttgattagctgtgtttggaactgctaccgatacatcaatggtaggaactcctctgatgtcctggtttatgttaccagcaatgacactacggtgctgctacccccgtatgatgatgccactgtgaatggtgctgccaaggagccaccgccaccttacgtgtctgcctaagccttcaagtgggcggagctgagggcagcagcttgactttgcagacatctgagcaatagttctgttatttcacttttgccatgagcctctctgagcttgtttgttgctgaaatgctactttttaaaatttagatgttagattgaaaactgtagttttcaacatatgctttgctggaacactgtgatagattaactgtagaattcttcctgtacgattggggatataatgggcttcactaaccttccctaggcattgaaacttcccccaaatctgatggacctagaagtctgcttttgtacctgctgggccccaaagttgggcatttttctctctgttccctctcttttgaaaatgtaaaataaaaccaaaaatagacaactttttcttcagccattccagcatagagaacaaaaccttatggaaacaggaatgtcaattgtgtaatcattgttctaattaggtaaatagaagtccttatgtatgtgttacaagaatttcccccacaacatcctttatgactgaagttcaatgacagtttgtgtttggtggtaaaggattttctccatggcctgaattaagaccattagaaagcaccaggccgtgggagcagtgaccatctgctgactgttcttgtggatcttgtgtccagggacatggggtgacatgcctcgtatgtgttagagggtggaatggatgtgtttggcgctgcatgggatctggtgcccctcttctcctggattcacatccccacccagggcccgcttttactaagtgttctgccctagattggttcaaggaggtcatccaactgactttatcaagtggaattgggatatatttgatatacttctgcctaacaacatggaaaagggttttcttttccctgcaagctacatcctactgctttgaacttccaagtatgtctagtcaccttttaaaatgtaaacattttcagaaaaatgaggattgccttccttgtatgcgctttttaccttgactacctgaattgcaagggatttttatatattcatatgttacaaagtcagcaactctcctgttggttcattattgaatgtgctgtaaattaagttgtttgcaattaaaacaaggtttgcccacatccaagatgaccttgtgattttgtgctgattgtgtctgaggacctttccctccacatatggtctggcagatgcacccagttcagcctaaggagtaggcttttttttgggggggggaggtcgggtgggggggatttttaatcttttaattttcaagatggttaaaatattgaaatgtttaagtggataactatattattcataaaatgactgagtgaaaactaatacactatgagatgaaaagtacttgtcagggattttcaagcttttgctcaagtaattactatgaaataacaatttctagaaatgaagaacaatccgtggagaataaattaccattggtgtgggggaaaaaagccaaacagaagtagaaaaaggtgtagccggcatacaaatgttatctacagtgtatttttagat

SEQ ID NO: 198271 - DNA, 681 bp, Artificial Sequence
  derived and/or modified sequence
atgaagatggtcgcgccctggacgcggttctactccaacagctgctgcttgtgctgccatgtccgcaccggcaccatcctgctcggcgtctggtatctgatcatcaatgctgtggtactgttgattttattgagtgccctggctgatccggatcagtataacttttcaagttctgaactgggaggtgactttgagttcatggatgatgccaacatgtgcattgccattgcgatttctcttctcatgatcctgatatgtgctatggctacttacggagcgtacaagcaacgcgcagcctggatcatcccattcttctgttaccagatctttgactttgccctgaacatgttggttgcaatcactgtgcttatttatccaaactccattcaggaatacatacggcaactgcctcctaattttccctacagagatgatgtcatgtcagtgaatcctacctgtttggtccttattattcttctgtttattagcattatcttgacttttaagggttacttgattagctgtgtttggaactgctaccgatacatcaatggtaggaactcctctgatgtcctggtttatgttaccagcaatgacactacggtgctgctacccccgtatgatgatgccactgtgaatggtgctgccaaggagccaccgccaccttacgtgtctgcctaa

SEQ ID NO: 198272 - DNA, 1092 bp, Artificial Sequence
  derived and/or modified sequence
atggagctgcacgagcggcccgacgagcggcggaaggcccggacctctactcaggggcgcttgggggattggaggcgtgtacacgctgatggctttacccatcgagtttggtccagcagtagctggctcgagcctgcaatgacgagtagaacaagggtcacttggccgagtcccccccggcctctgcctgtgccagccgctgcagctgtggctttcggggcgaagggtaccgatccagcggaggctagaagctcgcgcggaatcgaggaggctggaccacgagcccacggacgggctgggcgggagcccgagaggcgaagatcccggcaacaacgaagagggggtctgcaagccagacgctcaactctccttaaaacctgtgctcgggctagagcgaccgccccgggcgccatgaagatggtggctccatggacccgtttctacagtaattcctgttgcctctgctgtcacgtgcggaccggaactatacttctaggcgtgtggtatctgattataaatgccgtcgtgctgcttattctgctatcagcactggctgatccagatcagtacaacttcagctcttctgagctcgggggggacttcgaattcatggacgatgccaatatgtgtattgcaatcgcgatttcactgctcatgattcttatctgtgccatggccacatacggagcctacaagcagcgtgcagcctggattattccatttttttgttaccagatctttgacttcgcgttgaacatgcttgtggctataaccgtgctgatctaccctaattctatacaggaatacatccggcagctgccacctaactttccatacagggacgatgtgatgtcagtgaacccgacgtgcctggtactcattattctgttattcatttccatcattctgacgtttaagggatacctgatctcctgtgtttggaactgctataggtatatcaacggcagaaacagttcagatgtgctggtgtacgtcacctcaaatgatactacagtgctgcttcccccctatgacgatgccaccgtcaacggagccgctaaagagccccctccgccctacgtgtccgcttag

SEQ ID NO: 198273 - DNA, 954 bp, Artificial Sequence
  derived and/or modified sequence
atgaccagccggacccgggtgacctggcccagccccccccggccccttcccgtccccgcagccgcagccgtggccttcggggctaagggaacagaccccgccgaggctcgcagttccagaggaattgaggaggccggccctagggcacacgggcgcgcaggaagggagcccgaacgacgcagaagcaggcagcagagacgggggggcctgcaggcgaggagatctaccctactcaagacctgcgcacgggccagggcaaccgcaccgggagccatgaaaatggtggccccttggacacggttctattccaattcttgttgtctttgttgtcacgtaagaacgggaacaatattgttgggggtgtggtacctcatcatcaatgcggtcgtcctgctgatccttttatcagccctcgctgatcccgatcagtacaatttctcgtctagtgagctcggcggcgatttcgagttcatggatgacgccaacatgtgtatagcaatagctatctcacttctgatgattctgatttgtgccatggccacatacggggcttacaaacagagggccgcttggattattccatttttttgctaccagatcttcgacttcgcgcttaatatgcttgtggccatcacagtgctcatatatcctaattcaattcaggagtatattaggcagttgccaccaaatttcccttatcgggacgatgtaatgagcgtgaaccccacatgccttgtgctcatcattctgctgtttatatccattattctaaccttcaaaggttacctcatctcctgtgtatggaactgctaccgctatataaacggacggaactcttccgatgtgctcgtctatgtaaccagcaacgacacgaccgttctgcttcctccatatgacgacgctacagtgaacggagctgctaaggagcccccacccccatacgtatctgcttag

SEQ ID NO: 198274 - DNA, 681 bp, Artificial Sequence
  derived and/or modified sequence
atgaagatggtggccccctggacccggttctacagcaacagctgctgcctctgttgtcacgttcgcactggcactatcctacttggcgtgtggtacctgattatcaatgccgtcgtcctgctgattttgctatcagcccttgccgatcctgaccagtataatttttcatcttctgaactgggcggcgatttcgaatttatggacgatgccaatatgtgtatcgcaatcgctattagcctgctgatgatacttatttgcgcgatggccacgtacggagcatacaaacagcgggccgcctggattataccatttttttgttatcaaatcttcgacttcgccttgaacatgctggtggccatcacggtgctgatttacccaaactccatccaggaatatattaggcagctgccgccaaattttccctacagagatgacgtgatgagcgttaatcctacttgcctggtcctgatcatactgctctttatcagtataatcctcacgttcaagggctacctgatatcctgcgtgtggaattgttacaggtatataaacggcagaaactcctctgatgtgctggtttacgtcacctccaatgacaccacggtgcttttacccccctacgacgatgcgaccgtcaatggggcggcaaaggaaccacctcccccatacgtatcagcctag

SEQ ID NO: 198275 - DNA, 1092 bp, Artificial Sequence
  derived and/or modified sequence
atggaattgcatgagagacctgacgaacgacgtaaagctcggaccagtacccaggggaggttgggggattggcgccgtgttcatgcagatgggtttacacatagggtctggagcagctcttcatggcttgaaccggcaatgacctctcggactcgcgtgacttggccgagcccacccagaccattgccagtgccagccgcagccgcagttgccttcggcgcaaagggaaccgatcctgcagaagctcgcagcagtcgcggtatcgaggaggcaggccctagagctcatggcagagcaggccgagagcccgaacgccgtagaagcaggcaacagcgcagaggagggctccaggctaggcgcagtactctccttaaaacatgcgccagggctagggccacagcccctggagctatgaagatggtggccccttggacacgattctattcaaattcttgttgcctgtgctgtcatgtgaggacagggaccattttattaggggtgtggtacctcattatcaacgcagtcgtcctgctgatcctgctttccgctctcgccgaccccgatcaatataacttttcctcttcagaactggggggtgacttcgagttcatggatgatgcaaacatgtgtatcgctatcgcaattagcctattgatgatcctcatctgtgctatggcgacctatggagcttacaagcagcgcgctgcatggatcattccttttttctgttaccagatattcgattttgccctaaacatgttggttgctataacagttttgatctaccccaatagtatacaggaatacattcgccagctgcccccaaattttccatacagggatgatgtgatgagtgttaatcctacttgcctggtcctcatcatactcttgttcatttctatcatactcacttttaaagggtatcttattagttgcgtgtggaactgttatcgttatatcaacggcaggaactcaagcgatgtgcttgtgtacgtcacaagcaatgataccacagtcctgctccctccttacgacgacgcaactgttaacggggcagccaaagaaccccctccaccctatgtgagcgcatag

SEQ ID NO: 198276 - DNA, 954 bp, Artificial Sequence
  derived and/or modified sequence
atgacttctcggactcgtgtgacatggcctagcccacccaggcccctgcccgtacctgctgctgcggctgtggcattcggtgccaaaggcactgacccagcagaagctaggtccagtagaggtatagaggaggccggtccaagagctcacgggagagcgggacgggagccagagagacggcgaagcagacaacaaagaaggggtggactccaggccaggcggtccacattactgaagacttgcgcacgggctagggccaccgcacccggagcaatgaaaatggtggcgccatggacacggttctatagcaattcctgctgtctgtgctgtcacgtgcgtactggcaccattctcctcggggtctggtatctgatcatcaacgcagtggtgcttcttatccttttatctgcgctcgccgatcctgatcagtataacttcagtagctcagagctcggaggtgactttgaattcatggatgatgccaacatgtgtattgccattgcaatctctttgctcatgatcttgatatgcgctatggccacatatggagcatacaagcaacgtgccgcttggattattcccttcttttgctaccagatctttgacttcgcgctgaatatgctggtggcaattaccgtacttatatatcccaacagtatccaggagtatattcgtcaactcccaccaaactttccttacagggacgatgtgatgtcagtcaaccccacctgcctggtcctgatcatcctcttgtttatatcaattattctcacatttaaagggtacttgattagttgtgtttggaattgctataggtacataaacgggcgaaattcctctgatgtgcttgtgtatgttaccagtaatgataccactgttctgttgcccccatacgacgatgccacagttaatggggcagctaaggagcctcctcccccatacgtaagtgcctag

SEQ ID NO: 198277 - DNA, 681 bp, Artificial Sequence
  derived and/or modified sequence
atgaaaatggttgccccttggacccggttttactcgaactcctgttgtctgtgctgtcacgtgagaacgggcacaatccttctgggtgtctggtacctcatcatcaacgctgtggtccttctgatcctccttagcgcccttgccgatccggatcagtataatttctcatctagtgagctcgggggagatttcgaatttatggatgacgcaaatatgtgtattgctatcgcgatctctttactgatgatcctgatttgcgccatggctacatatggggcttataagcagagagccgcatggattattccattcttttgctaccagatctttgatttcgccctcaacatgctggtagctatcacagtgttaatctacccaaatagtatccaggagtacattcggcaactgcctcccaactttccctaccgtgatgatgtgatgtccgtcaatcctacttgtctggttcttataattttgctctttatatcaattattctaacattcaaaggctacctaattagctgtgtgtggaattgctatcgctatataaacggcagaaactcaagcgacgttttggtttacgtgacttctaacgatactacagtgctcctgcctccttatgacgacgcaactgtgaacggggcagctaaggaaccacccccaccttacgtgagcgcatag

SEQ ID NO: 198278 - DNA, 1092 bp, Artificial Sequence
  derived and/or modified sequence
atggagctgcacgagagacccgacgagagaagaaaggccagaaccagcacccagggcagactgggcgactggagaagagtgcacgccgacggcttcacccacagagtgtggagcagcagcagctggctggagcccgccatgaccagcagaaccagagtgacctggcccagcccccccagacccctgcccgtgcccgccgccgccgccgtggccttcggcgccaagggcaccgaccccgccgaggccagaagcagcagaggcatcgaggaggccggccccagagcccacggcagagccggcagagagcccgagagaagaagaagcagacagcagagaagaggcggcctgcaggccagaagaagcaccctgctgaagacctgcgccagagccagagccaccgcccccggcgccatgaagatggtggccccctggaccagattctacagcaacagctgctgcctgtgctgccacgtgagaaccggcaccatcctgctgggcgtgtggtacctgatcatcaacgccgtggtgctgctgatcctgctgagcgccctggccgaccccgaccagtacaacttcagcagcagcgagctgggcggcgacttcgagttcatggacgacgccaacatgtgcatcgccatcgccatcagcctgctgatgatcctgatctgcgccatggccacctacggcgcctacaagcagagagccgcctggatcatccccttcttctgctaccagatcttcgacttcgccctgaacatgctggtggccatcaccgtgctgatctaccccaacagcatccaggagtacatcagacagctgccccccaacttcccctacagagacgacgtgatgagcgtgaaccccacctgcctggtgctgatcatcctgctgttcatcagcatcatcctgaccttcaagggctacctgatcagctgcgtgtggaactgctacagatacatcaacggcagaaacagcagcgacgtgctggtgtacgtgaccagcaacgacaccaccgtgctgctgcccccctacgacgacgccaccgtgaacggcgccgccaaggagcccccccccccctacgtgagcgcctag

SEQ ID NO: 198279 - DNA, 954 bp, Artificial Sequence
  derived and/or modified sequence
atgaccagcagaaccagagtgacctggcccagcccccccagacccctgcccgtgcccgccgccgccgccgtggccttcggcgccaagggcaccgaccccgccgaggccagaagcagcagaggcatcgaggaggccggccccagagcccacggcagagccggcagagagcccgagagaagaagaagcagacagcagagaagaggcggcctgcaggccagaagaagcaccctgctgaagacctgcgccagagccagagccaccgcccccggcgccatgaagatggtggccccctggaccagattctacagcaacagctgctgcctgtgctgccacgtgagaaccggcaccatcctgctgggcgtgtggtacctgatcatcaacgccgtggtgctgctgatcctgctgagcgccctggccgaccccgaccagtacaacttcagcagcagcgagctgggcggcgacttcgagttcatggacgacgccaacatgtgcatcgccatcgccatcagcctgctgatgatcctgatctgcgccatggccacctacggcgcctacaagcagagagccgcctggatcatccccttcttctgctaccagatcttcgacttcgccctgaacatgctggtggccatcaccgtgctgatctaccccaacagcatccaggagtacatcagacagctgccccccaacttcccctacagagacgacgtgatgagcgtgaaccccacctgcctggtgctgatcatcctgctgttcatcagcatcatcctgaccttcaagggctacctgatcagctgcgtgtggaactgctacagatacatcaacggcagaaacagcagcgacgtgctggtgtacgtgaccagcaacgacaccaccgtgctgctgcccccctacgacgacgccaccgtgaacggcgccgccaaggagcccccccccccctacgtgagcgcctag

SEQ ID NO: 198280 - DNA, 681 bp, Artificial Sequence
  derived and/or modified sequence
atgaagatggtggccccctggaccagattctacagcaacagctgctgcctgtgctgccacgtgagaaccggcaccatcctgctgggcgtgtggtacctgatcatcaacgccgtggtgctgctgatcctgctgagcgccctggccgaccccgaccagtacaacttcagcagcagcgagctgggcggcgacttcgagttcatggacgacgccaacatgtgcatcgccatcgccatcagcctgctgatgatcctgatctgcgccatggccacctacggcgcctacaagcagagagccgcctggatcatccccttcttctgctaccagatcttcgacttcgccctgaacatgctggtggccatcaccgtgctgatctaccccaacagcatccaggagtacatcagacagctgccccccaacttcccctacagagacgacgtgatgagcgtgaaccccacctgcctggtgctgatcatcctgctgttcatcagcatcatcctgaccttcaagggctacctgatcagctgcgtgtggaactgctacagatacatcaacggcagaaacagcagcgacgtgctggtgtacgtgaccagcaacgacaccaccgtgctgctgcccccctacgacgacgccaccgtgaacggcgccgccaaggagcccccccccccctacgtgagcgcctag

SEQ ID NO: 198281 - protein, 347 aa, Artificial Sequence
  derived and/or modified sequence
MKLTSEKLPKNPFYASVSQYAAKNQKFFQWKKEKTDYTHANLVDKALQLLKERILKGDTLAYFLRGQLYFEEGWYEEALEQFEEIKEKDHQATYQLGVMYYDGLGTTLDAEKGVDYMKKILDSPCPKARHLKFAAAYNLGRAYYEGKGVKRSNEEAERLWLIAADNGNPKASVKAQSMLGLYYSTKEPKELEKAFYWHSEACGNGNLESQGALGLMYLYGQGIRQDTEAALQCLREAAERGNVYAQGNLVEYYYKMKFFTKCVAFSKRIADYDEVHDIPMIAQVTDCLPEFIGRGMAMASFYHARCLQLGLGITRDETTAKHYYSKACRLNPALADELHSLLIRQRI

SEQ ID NO: 198282 - protein, 349 aa, Artificial Sequence
  derived and/or modified sequence
MKLTSEKLPKNPFYASVSQYAAKNQKFFQWKKEKTESDYTHANLVDKALQLLKERILKGDTLAYFLRGQLYFEEGWYEEALEQFEEIKEKDHQATYQLGVMYYDGLGTTLDAEKGVDYMKKILDSPCPKARHLKFAAAYNLGRAYYEGKGVKRSNEEAERLWLIAADNGNPKASVKAQSMLGLYYSTKEPKELEKAFYWHSEACGNGNLESQGALGLMYLYGQGIRQDTEAALQCLREAAERGNVYAQGNLVEYYYKMKFFTKCVAFSKRIADYDEVHDIPMIAQVTDCLPEFIGRGMAMASFYHARCLQLGLGITRDETTAKHYYSKACRLNPALADELHSLLIRQRI

SEQ ID NO: 198283 - protein, 153 aa, Artificial Sequence
  derived and/or modified sequence
MKLTSEKLPKNPFYASVSQYAAKNQKFFQWKKEKTDYTHANLVDKALQLLKERILKGDTLAYFLRGQLYFEEGWYEEALEQFEEIKEKDHQATYQLGVMYYDGLGTTLDAEKGVDYMKKILDSPCPKARHLKFAAAYNLGRAYYEGKGVKRSN

SEQ ID NO: 198284 - DNA, 5157 bp, Artificial Sequence
  derived and/or modified sequence
gcatcatggaatgatataaaaatgcagctttccaatcacactaagggtctctctatttcttctcttgaccaccaatcaggaacctttgctggaagcttgtttctgattggtgaaagtaagccataacagtggaatgccaaggagtaaatacaaaagtgtagcaacaactgagtttgctgtctcactaccctcagcctaggccaacctggactccttcaccccaaatgaggtgaccgctacattttatatgaagacactgatttaccattcaactgtgatccatcttataacatggcaatccaatacagacaggaagataaaactcaacaacagctaaaataaagtgtattcccaggtaaaatagacaagtgctttaatttgaaatggattcgtccgatgagtgtcagttacaagggcagagaaggtaccagtgcagaagagctctgactgtgggcagtgtcaccaggtcccactaagtggcaacacttgtgctgggtgacttgacccatcttgatgtataaacccatagccagacaggacgtgcaaacaggtctcatggtgaatgcgatgctgtggaaaatgacatggagaatggctgtctctcagctagggaggagggtcttggtgtcctagtaaagaatgttcacgtcctggagttggtggttggtgttctatctaggcgatgagagaaggatgcttttcctaatgagcacctggtgggaatagagtctctctttgcacttcgctggaggaagaaatttctaccacttattttttcttcttgcttatagaatacacattgcagaaaaaggatgaagttgaccagtgaaaagttgcccaagaaccccttttatgcctctgtatctcagtatgctgctaaaaaccaaaaatttttccagtggaaaaaggaaaagactgattacacccatgctaatttggtggataaggcattgcagctcttgaaggaaagaatactgaaaggagacactctggcatatttcctacgaggtcaactatattttgaagagggatggtatgaagaagcattagaacagtttgaagaaatcaaggagaaagaccatcaagcaacttaccagctaggagtgatgtactatgatgggctggggaccactctagacgctgagaaaggggtggactatatgaagaaaattcttgattctccatgtcccaaagcaagacacttaaaatttgcagctgcttacaacctcggaagagcttattatgaaggaaaaggtgttaaacgatcaaatgaggaagctgaaagactgtggcttatcgcagcagacaatggaaatcccaaagctagtgtgaaggctcaaagtatgctcgggctgtattactcaaccaaggagcccaaggagttagaaaaggcattttactggcattccgaagcatgtggcaatgggaatctggagtcccagggtgcacttgggctcatgtacttgtatggacaaggcatccggcaggatacggaagctgccctgcagtgcttaagagaagcagcagaacgcggaaacgtctatgctcaagggaatctcgtggagtattactataagatgaaattttttacaaagtgtgttgcattttccaaaaggatcgctgactatgatgaggttcacgacatccccatgatcgcccaggtcacagactgtctcccggagttcatcggcagaggcatggcaatggcatccttctaccacgcaaggtgtcttcagcttggcttgggcatcaccagggatgaaacaaccgctaaacactattattctaaagcttgtcgtctgaatcccgcattggcagatgaacttcactccttacttattcgtcaaagaatttagaccacaatgtatttcaacaaagatcatcaatgctaacacctcacaatgtgtgtatttttacagtagctatgtttggttattttgcacatcacaaattacactatcctgggtattttacaggtgacatgttacttcgttcttgaattcgtacgctgttaagttttgcaacttgaaacctagacacaaggtcaaattgctggaagagtcctcagaggtccacctcttaccctacagactggccgagaccatatcaagtattaaaaccattctatacagcaagtatcgtttatcctttcttaaacaccgagtctccaaaaatacttagtttagctttagtttagtaagttcagaagtagaaacaaacttatttaaaaccatcatttgaaagtttaattctttaaatttgtctcttagttttgtgaattttgaataataatgtttaaattttgtttcagtcatttaaaatttaaattttcagtcatttaaaattttaaaaatttaaaatttcacaaaactaagggtaaaagacatttaaagaattaaacttaaataagtgtgtgcagcatttctacttctgaagttattaaagctaaaactgcactaagccttttgagacatcctttattcttaaaaagctcataaataattggcttattacatataaacttcaaaaaagtgggttataagacattgctttagaatcttgcccctccaaatcttccctcaaagatcttaatgagtaaaacaactgctacatacatatgcagaatgtgtaataaaacaaaaagcaattgctatatgaaaatattcgtaagaaaagtaaagcaaattgtttctttgtgcttcagctcattttccatatttttaaaaccctgtggtaaaagcctcaatgaaatcatttacaagaactacaattaaatattgttaaaattagcaaaaggctttccgtatatagatgacatctatgaaggcaaaaggtgacagtaaaaacagtaagatccatatgcataagattgtacaaggctattcatttgtgaaacaaatatacatatcgaagacaggtctcagagataccttaactattcctttttttataaacatattaaaggatgtggctttattttataaatcacaaccatcccaacagtggatttaaacaagatttctttttagtaatgggaaaatgcaattaatatggaggtgatagtcactaagaactgttgaatggcagaaaagtatttgctctcgttttatgttctggcttgtctgtattgcctgaacttcattttgtctttgtgtaagggaagaaatttcaacagactcgggtttgagatatcctcaaatggtcatgtatttctgtctcaaatctcttaataccacccatgtaacattccttcaaccacttgaagatccaaattcccaactagtattctcttctccacacttaatccagttcctaaagattattattattattattattattatttttttttttttgagacggagtctcctgacctaatcttagcccggcgcagtggctcacgtctgtaatcccagcactttgggaggctgaggcgggcagatcatgaggtcaggagtttgagaccaggctggccaacgtggtgaaaccccgtctctactaaaaatacaaaaattagccgggcgtgatggcggacgcctgtagtcccagctactcgggaggctgagacagaagaactgcttgaaaccaggaggcagaggttgcagtgagctgagatcgcgcaaattgcactccagcctcggtgacaagagcgagactccatctcaaaaaaaaataaaaagaatcttaaaataggaacataataaaagatcggccctaagtaaagagcactttttaaactgccattaaagatgggtttcagaaatcataaactttgacgtgtgccatacatggtaacatgctatgcttatatgtcttctataaatccaatgcagaatttaaaatttcagtttactctagttaccataaagctaatgctctggcacaagcgagtccctgcaaactaccactgctgaggacagtagtaaaccccttgacctgagactgcggtgagtctgtaactcgagtgcattgagacttccagatcattactcttacacacacacacacacacacacatacacacacacacactccttctctaagattccttgtagctgatatctcatggaaaaatgacattttatcataaataaatatagagacaaaataatagtgatctttctcattcgcaatgtaaacttaacagctacagtttaaatgatagcatagaattatgcctaaaatagacatttcccataattgtattgtgataagttcttcaggcttgacaacttcacattgcctctcttccttgaatgtattttatctggtcttttctatatagtcttttgaaggataatttttatcaatagccaactttgggtatttttttaagtgtcaaatatcatcatggtttgaaaaaaggataaaaaagctataactaaaaaaatcttaaggataacatttggtttactaatttttaatcatttatctttcagaacttgtttcttatcaagaagttagcaggtatgatatgtatatcatacgtatataaactggcataggttacatcctagggcatgaggggagtatctttcagggattcaaatggaatttttacctgttacttgtttaattgttttgttttcaatattcttggggattagacaggggaaggtattttattactgcataatagatggtgaaacccaggaaaattaagtacttgtgcatggccccactatcaataacacaaagtctgtactctggatctcccctaatgtccctgtggtctaaacggcttgataatacaaccgagcccctgaagtagctgccctcctctttccgctcccccatctcggccctgcccatactccaagggtcagctcccatctctcctccctaatgcctcacttcaagcactaatttggctctttctgctcactaaaaatcatatattttacagatttattttgtttctggagaaggcagcaaacttttacttccctgcagaagtagttaagtacatagtgttttctctaaaaaggcatttgataaatatttgaacagcctgtagagtttcaacctctttgagatataagtatcttaaatatcatagagcactgtgattcatttttatattttattgctttgaatgctcaaactatgggaaatctttggtaaaaataaagacaataaaatcttcacaataacttt

SEQ ID NO: 198285 - DNA, 1044 bp, Artificial Sequence
  derived and/or modified sequence
atgaagctgaccagcgagaagctgcccaagaaccccttctacgccagcgtgagccagtacgccgccaagaaccagaagttcttccagtggaagaaggagaagaccgactacacccacgccaacctggtggacaaggccctgcagctgctgaaggagagaatcctgaagggcgacaccctggcctacttcctgagaggccagctgtacttcgaggagggctggtacgaggaggccctggagcagttcgaggagatcaaggagaaggaccaccaggccacctaccagctgggcgtgatgtactacgacggcctgggcaccaccctggacgccgagaagggcgtggactacatgaagaagatcctggacagcccctgccccaaggccagacacctgaagttcgccgccgcctacaacctgggcagagcctactacgagggcaagggcgtgaagagaagcaacgaggaggccgagagactgtggctgatcgccgccgacaacggcaaccccaaggccagcgtgaaggcccagagcatgctgggcctgtactacagcaccaaggagcccaaggagctggagaaggccttctactggcacagcgaggcctgcggcaacggcaacctggagagccagggcgccctgggcctgatgtacctgtacggccagggcatcagacaggacaccgaggccgccctgcagtgcctgagagaggccgccgagagaggcaacgtgtacgcccagggcaacctggtggagtactactacaagatgaagttcttcaccaagtgcgtggccttcagcaagagaatcgccgactacgacgaggtgcacgacatccccatgatcgcccaggtgaccgactgcctgcccgagttcatcggcagaggcatggccatggccagcttctaccacgccagatgcctgcagctgggcctgggcatcaccagagacgagaccaccgccaagcactactacagcaaggcctgcagactgaaccccgccctggccgacgagctgcacagcctgctgatcagacagagaatctag

SEQ ID NO: 198286 - DNA, 1050 bp, Artificial Sequence
  derived and/or modified sequence
atgaagctgaccagcgagaagctgcccaagaaccccttctacgccagcgtgagccagtacgccgccaagaaccagaagttcttccagtggaagaaggagaagaccgagagcgactacacccacgccaacctggtggacaaggccctgcagctgctgaaggagagaatcctgaagggcgacaccctggcctacttcctgagaggccagctgtacttcgaggagggctggtacgaggaggccctggagcagttcgaggagatcaaggagaaggaccaccaggccacctaccagctgggcgtgatgtactacgacggcctgggcaccaccctggacgccgagaagggcgtggactacatgaagaagatcctggacagcccctgccccaaggccagacacctgaagttcgccgccgcctacaacctgggcagagcctactacgagggcaagggcgtgaagagaagcaacgaggaggccgagagactgtggctgatcgccgccgacaacggcaaccccaaggccagcgtgaaggcccagagcatgctgggcctgtactacagcaccaaggagcccaaggagctggagaaggccttctactggcacagcgaggcctgcggcaacggcaacctggagagccagggcgccctgggcctgatgtacctgtacggccagggcatcagacaggacaccgaggccgccctgcagtgcctgagagaggccgccgagagaggcaacgtgtacgcccagggcaacctggtggagtactactacaagatgaagttcttcaccaagtgcgtggccttcagcaagagaatcgccgactacgacgaggtgcacgacatccccatgatcgcccaggtgaccgactgcctgcccgagttcatcggcagaggcatggccatggccagcttctaccacgccagatgcctgcagctgggcctgggcatcaccagagacgagaccaccgccaagcactactacagcaaggcctgcagactgaaccccgccctggccgacgagctgcacagcctgctgatcagacagagaatctag

SEQ ID NO: 198287 - DNA, 462 bp, Artificial Sequence
  derived and/or modified sequence
atgaagctgaccagcgagaagctgcccaagaaccccttctacgccagcgtgagccagtacgccgccaagaaccagaagttcttccagtggaagaaggagaagaccgactacacccacgccaacctggtggacaaggccctgcagctgctgaaggagagaatcctgaagggcgacaccctggcctacttcctgagaggccagctgtacttcgaggagggctggtacgaggaggccctggagcagttcgaggagatcaaggagaaggaccaccaggccacctaccagctgggcgtgatgtactacgacggcctgggcaccaccctggacgccgagaagggcgtggactacatgaagaagatcctggacagcccctgccccaaggccagacacctgaagttcgccgccgcctacaacctgggcagagcctactacgagggcaagggcgtgaagagaagcaactag

SEQ ID NO: 198288 - DNA, 1044 bp, Artificial Sequence
  derived and/or modified sequence
atgaagttaacaagtgagaagcttccgaaaaatcccttctacgcctctgtctcccagtatgcagccaagaatcagaaattctttcagtggaagaaggagaagaccgactatacccacgccaatcttgtagacaaggctcttcaattgttaaaagagcgtatactgaaaggggatacgcttgcctactttttgagaggccagttatacttcgaggagggctggtatgaggaagcccttgagcagttcgaggagatcaaggaaaaagaccaccaagcaacgtaccaactgggtgtgatgtactatgatggcctagggacaaccctggatgccgaaaaaggcgtcgactatatgaagaagattctggattcaccctgcccaaaagcaagacatctgaagtttgcggccgcatataacctgggtagggcttactatgaaggaaaaggagtgaaacgttcaaacgaggaagctgaacgattgtggctaatcgcagcagacaacgggaatcccaaagcttctgtcaaggcccagtctatgttaggcctgtattatagcacaaaggaacctaaagagctcgagaaggcgttctactggcattctgaggcatgcgggaacggcaatctggagagccaaggcgcattaggcttgatgtatctgtatggtcagggcattagacaggacacagaggccgccctacagtgcctccgagaggccgccgaaagagggaatgtgtacgcacagggtaatctggtcgagtactactataagatgaaattcttcacaaagtgtgtagcctttagcaagcggatcgccgactacgatgaagttcatgacattcctatgatcgcgcaggtcaccgactgcctccccgagttcatcgggagaggtatggctatggcctctttctatcacgcacgatgcttacagttagggctagggataacccgggatgaaacgaccgccaaacactattactctaaagcctgtcggcttaatcccgccctggctgatgagctgcattccctgctcatccggcagcgtatctag

SEQ ID NO: 198289 - DNA, 1050 bp, Artificial Sequence
  derived and/or modified sequence
atgaaactcacaagcgagaagctgcccaagaatcccttttacgcgtccgtgagccagtacgctgctaaaaatcagaaattcttccagtggaaaaaagagaaaacggaatcggactacacacacgccaatctggtagataaggccttacagttactcaaagaaagaatactgaagggagacacactggcctacttcctcagaggtcagttgtacttcgaggagggatggtatgaggaggccctggagcagtttgaggagattaaggaaaaagatcaccaggcaacttatcagctaggtgtgatgtactatgacggtctcggtactacactagacgccgaaaagggagtcgactacatgaaaaagatacttgactcaccctgcccaaaggcacggcatctgaagttcgcggctgcatataatctagggcgagcgtattatgagggtaagggagttaaaaggtcaaatgaagaggctgaacgactgtggctgattgctgccgataatggcaaccccaaggcatctgtgaaagcccagtctatgcttggattgtactacagtacgaaggagcccaaggaactcgagaaagccttttactggcattcagaagcatgcgggaacgggaatctggagtcccagggtgctttgggactgatgtacctgtatggccaaggcatcagacaggacactgaagcggccctccaatgcctgcgggaagcagcagagagaggcaacgtttacgcccaaggcaatctggtggaatactattataaaatgaaatttttcactaagtgcgtcgccttctctaaaaggatcgccgattatgacgaggtgcatgatatccctatgatcgcccaagttacggactgcctccccgaattcattggccgtgggatggccatggcttctttttatcacgcgcgttgtcttcagctcggcctaggcatcacaagggacgagacaactgctaagcactactatagcaaggcgtgtcgactgaaccccgcactggccgacgaactgcatagcctcctgatacgccaaaggatctag

SEQ ID NO: 198290 - DNA, 5164 bp, Artificial Sequence
  derived and/or modified sequence
gcatcatggaatgatataaaaatgcagctttccaatcacactaagggtctctctatttcttctcttgaccaccaatcaggaacctttgctggaagcttgtttctgattggtgaaagtaagccataacagtggaatgccaaggagtaaatacaaaagtgtagcaacaactgagtttgctgtctcactaccctcagcctaggccaacctggactccttcaccccaaatgaggtgaccgctacattttatatgaagacactgatttaccattcaactgtgatccatcttataacatggcaatccaatacagacaggaagataaaactcaacaacagctaaaataaagtgtattcccaggtaaaatagacaagtgctttaatttgaaatggattcgtccgatgagtgtcagttacaagggcagagaaggtaccagtgcagaagagctctgactgtgggcagtgtcaccaggtcccactaagtggcaacacttgtgctgggtgacttgacccatcttgatgtataaacccatagccagacaggacgtgcaaacaggtctcatggtgaatgcgatgctgtggaaaatgacatggagaatggctgtctctcagctagggaggagggtcttggtgtcctagtaaagaatgttcacgtcctggagttggtggttggtgttctatctaggcgatgagagaaggatgcttttcctaatgagcacctggtgggaatagagtctctctttgcacttcgctggaggaagaaatttctaccacttattttttcttcttgcttatagaatacacattgcagaaaaaggatgaagttgaccagtgaaaagttgcccaagaaccccttttatgcctctgtatctcagtatgctgctaaaaaccaaaaatttttccagtggaaaaaggaaaagactgaatcagattacacccatgctaatttggtggataaggcattgcagctcttgaaggaaagaatactgaaaggagacactctggcatatttcctacgaggtcaactatattttgaagagggatggtatgaagaagcattagaacagtttgaagaaatcaaggagaaagaccatcaagcaacttaccagctaggagtgatgtactatgatgggctggggaccactctagacgctgagaaaggggtggactatatgaagaaaattcttgattctccatgtcccaaagcaagacacttaaaatttgcagctgcttacaacctcggaagagcttattatgaaggaaaaggtgttaaacgatcaaatgaggaagctgaaagactgtggcttatcgcagcagacaatggaaatcccaaagctagtgtgaaggctcaaagtatgctcgggctgtattactcaaccaaggagcccaaggagttagaaaaggcattttactggcattccgaagcatgtggcaatgggaatctggagtcccagggtgcacttgggctcatgtacttgtatggacaaggcatccggcaggatacggaagctgccctgcagtgcttaagagaagcagcagaacgcggaaacgtctatgctcaagggaatctcgtggagtattactataagatgaaattttttacaaagtgtgttgcattttccaaaaggatcgctgactatgatgaggttcacgacatccccatgatcgcccaggtcacagactgtctcccggagttcatcggcagaggcatggcaatggcatccttctaccacgcaaggtgtcttcagcttggcttgggcatcaccagggatgaaacaaccgctaaacactattattctaaagcttgtcgtctgaatcccgcattggcagatgaacttcactccttacttattcgtcaaagaatttagaccacaatgtatttcaacaaagatcatcaatgctaacacctcacaatgtgtgtatttttacagtagctatgtttggttattttgcacatcacaaattacactatcctgggtattttacaggtgacatgttacttcgttcttgaattcgtacgctgttaagttttgcaacttgaaacctagacacaaggtcaaattgctggaagagtcctcagaggtccacctcttaccctacagactggccgagaccatatcaagtattaaaaccattctatacagcaagtatcgtttatcctttcttaaacaccgagtctccaaaaatacttagtttagctttagtttagtaagttcagaagtagaaacaaacttatttaaaaccatcatttgaaagtttaattctttaaatttgtctcttagttttgtgaattttgaataataatgtttaaattttgtttcagtcatttaaaatttaaattttcagtcatttaaaattttaaaaatttaaaatttcacaaaactaagggtaaaagacatttaaagaattaaacttaaataagtgtgtgcagcatttctacttctgaagttattaaagctaaaactgcactaagccttttgagacatcctttattcttaaaaagctcataaataattggcttattacatataaacttcaaaaaagtgggttataagacattgctttagaatcttgcccctccaaatcttccctcaaagatcttaatgagtaaaacaactgctacatacatatgcagaatgtgtaataaaacaaaaagcaattgctatatgaaaatattcgtaagaaaagtaaagcaaattgtttctttgtgcttcagctcattttccatatttttaaaaccctgtggtaaaagcctcaatgaaatcatttacaagaactacaattaaatattgttaaaattagcaaaaggctttccgtatatagatgacatctatgaaggcaaaaggtgacagtaaaaacagtaagatccatatgcataagattgtacaaggctattcatttgtgaaacaaatatacatatcgaagacaggtctcagagataccttaactattcctttttttataaacatattaaaggatgtggctttattttataaatcacaaccatcccaacagtggatttaaacaagatttctttttagtaatgggaaaatgcaattaatatggaggtgatagtcactaagaactgttgaatggcagaaaagtatttgctctcgttttatgttctggcttgtctgtattgcctgaacttcattttgtctttgtgtaagggaagaaatttcaacagactcgggtttgagatatcctcaaatggtcatgtatttctgtctcaaatctcttaataccacccatgtaacattccttcaaccacttgaagatccaaattcccaactagtattctcttctccacacttaatccagttcctaaagattattattattattattattattatttttttttttttgagacggagtctcctgacctaatcttagcccggcgcagtggctcacgtctgtaatcccagcactttgggaggctgaggcgggcagatcatgaggtcaggagtttgagaccaggctggccaacgtggtgaaaccccgtctctactaaaaatacaaaaattagccgggcgtgatggcggacgcctgtagtcccagctactcgggaggctgagacagaagaactgcttgaaaccaggaggcagaggttgcagtgagctgagatcgcgcaaattgcactccagcctcggtgacaagagcgagactccatctcaaaaaaaaataaaaagaatcttaaaataggaacataataaaagatcggccctaagtaaagagcactttttaaactgccattaaagatgggtttcagaaatcataaactttgacgtgtgccatacatggtaacatgctatgcttatatgtcttctataaatccaatgcagaatttaaaatttcagtttactctagttaccataaagctaatgctctggcacaagcgagtccctgcaaactaccactgctgaggacagtagtaaaccccttgacctgagactgcggtgagtctgtaactcgagtgcattgagacttccagatcattactcttacacacacacacacacacacacatacacacacacacactccttctctaagattccttgtagctgatatctcatggaaaaatgacattttatcataaataaatatagagacaaaataatagtgatctttctcattcgcaatgtaaacttaacagctacagtttaaatgatagcatagaattatgcctaaaatagacatttcccataattgtattgtgataagttcttcaggcttgacaacttcacattgcctctcttccttgaatgtattttatctggtcttttctatatagtcttttgaaggataatttttatcaatagccaactttgggtatttttttaagtgtcaaatatcatcatggtttgaaaaaaggataaaaaagctataactaaaaaaatcttaaggataacatttggtttactaatttttaatcatttatctttcagaacttgtttcttatcaagaagttagcaggtatgatatgtatatcatacgtatataaactggcataggttacatcctagggcatgaggggagtatctttcagggattcaaatggaatttttacctgttacttgtttaattgttttgttttcaatattcttggggattagacaggggaaggtattttattactgcataatagatggtgaaacccaggaaaattaagtacttgtgcatggccccactatcaataacacaaagtctgtactctggatctcccctaatgtccctgtggtctaaacggcttgataatacaaccgagcccctgaagtagctgccctcctctttccgctcccccatctcggccctgcccatactccaagggtcagctcccatctctcctccctaatgcctcacttcaagcactaatttggctctttctgctcactaaaaatcatatattttacagatttattttgtttctggagaaggcagcaaacttttacttccctgcagaagtagttaagtacatagtgttttctctaaaaaggcatttgataaatatttgaacagcctgtagagtttcaacctctttgagatataagtatcttaaatatcatagagcactgtgattcatttttatattttattgctttgaatgctcaaactatgggaaatctttggtaaaaataaagacaataaaatcttcacaataacttta

SEQ ID NO: 198291 - DNA, 1044 bp, Artificial Sequence
  derived and/or modified sequence
atgaagcttaccagcgaaaagctgcctaaaaatccgttctatgcctcagtgtctcaatatgctgccaaaaaccaaaagttttttcagtggaaaaaggaaaaaactgactatacacacgccaatctggtggacaaggctcttcaactgctgaaagagcggatactgaaaggcgacactctcgcctatttcttgagaggacagctgtatttcgaagaagggtggtacgaagaggcactcgaacagtttgaagaaattaaggagaaagatcaccaggccacctaccaattgggcgttatgtattacgacggtctcgggactaccctggacgctgagaaaggggtggactacatgaaaaaaattttagatagtccatgccccaaagcccggcatttgaaattcgctgctgcatacaatttgggacgcgcttattatgaaggaaaaggcgtgaaaagaagcaacgaggaagctgagcgcctgtggctcatcgccgccgataatgggaaccctaaagcatccgttaaggctcaatcaatgttggggctatattattccaccaaggagcccaaggagctagaaaaggcattttactggcattctgaggcatgcggcaacggcaatctggagtctcagggtgcactgggattaatgtatctctacggtcagggaataagacaggatacagaggctgctttgcagtgccttcgcgaggccgctgaacgtggcaatgtgtacgctcagggaaacctggttgaatattactataagatgaaattctttaccaagtgcgtagccttcagcaagaggatcgctgactacgatgaggttcacgacatcccaatgattgcccaggttacggattgcctcccggaatttatcgggcggggaatggccatggcctctttttaccacgcaaggtgcctgcaactcggcttgggcattacacgagatgagactaccgctaagcactattactctaaagcctgtaggctgaaccctgccttagccgatgaactgcactctcttttaatccgccagcgaatatag

SEQ ID NO: 198292 - DNA, 462 bp, Artificial Sequence
  derived and/or modified sequence
atgaaactaacgagcgagaaactgcccaagaaccctttctacgctagcgtgagccaatacgccgctaaaaatcagaaattttttcagtggaaaaaggaaaagactgattacacacatgccaatctggtcgataaggcccttcagttactgaaggaaaggatcctgaaaggggatacactggcctattttctgcgggggcaactctatttcgaagaggggtggtacgaagaagccctagaacagttcgaggagataaaggaaaaggaccatcaggccacttaccaactgggagttatgtattatgacggcctggggaccacattggatgcggaaaagggcgtggactacatgaagaaaatcctagatagcccttgtcccaaagcgagacacttgaaatttgcagctgcatacaatttggggcgggcctactatgagggtaagggcgtgaaacgtagcaattag

SEQ ID NO: 198293 - DNA, 1044 bp, Artificial Sequence
  derived and/or modified sequence
atgaagctgaccagcgagaagctgcccaagaaccccttctacgcctctgtgtcccagtatgctgccaagaaccagaagttcttccagtggaagaaggagaagacagactacacccacgccaacctggtggacaaggccctgcagctgctgaaggagcgcatcctgaagggggacaccctggcctacttcctgcggggccagctgtactttgaggagggctggtatgaggaggccctggagcagtttgaggagatcaaggagaaggaccaccaggccacctaccagctgggcgtgatgtactatgatggcctgggcaccaccctggatgctgagaagggcgtggactacatgaagaagatcctggacagcccctgccccaaggcccggcacctgaagtttgctgctgcctacaacctgggccgggcctactatgagggcaaaggagtgaagaggagcaatgaggaggccgagcggctgtggctgattgctgctgacaatggaaaccccaaggcctctgtgaaggcccagagcatgctgggcctgtactacagcaccaaggagcccaaggagctggagaaggccttctactggcacagcgaggcctgtggaaatggaaacctggagagccagggcgccctgggcctgatgtacctgtatggccagggcatccggcaggacacagaagctgccctgcagtgcctgcgggaggccgctgagagaggaaatgtgtatgcccagggcaacctggtggagtactactacaagatgaagttcttcaccaagtgtgtggccttcagcaagagaattgctgactatgatgaggtgcatgacatccccatgattgcccaggtgacagactgcctgcctgagttcatcggccggggcatggccatggccagcttctaccacgcccgctgcctgcagctgggcctgggcatcaccagagatgagaccacagccaagcactactacagcaaggcctgccgcctgaacccagccctggctgatgagctgcacagcctgctgatccggcagaggatctag

SEQ ID NO: 198294 - DNA, 1050 bp, Artificial Sequence
  derived and/or modified sequence
atgaagctgaccagcgagaagctgcccaagaaccccttctacgcctctgtgtcccagtatgctgccaagaaccagaagttcttccagtggaagaaggagaagacagaaagtgactacacccacgccaacctggtggacaaggccctgcagctgctgaaggagcgcatcctgaagggggacaccctggcctacttcctgcggggccagctgtactttgaggagggctggtatgaggaggccctggagcagtttgaggagatcaaggagaaggaccaccaggccacctaccagctgggcgtgatgtactatgatggcctgggcaccaccctggatgctgagaagggcgtggactacatgaagaagatcctggacagcccctgccccaaggcccggcacctgaagtttgctgctgcctacaacctgggccgggcctactatgagggcaaaggagtgaagaggagcaatgaggaggccgagcggctgtggctgattgctgctgacaatggaaaccccaaggcctctgtgaaggcccagagcatgctgggcctgtactacagcaccaaggagcccaaggagctggagaaggccttctactggcacagcgaggcctgtggaaatggaaacctggagagccagggcgccctgggcctgatgtacctgtatggccagggcatccggcaggacacagaagctgccctgcagtgcctgcgggaggccgctgagagaggaaatgtgtatgcccagggcaacctggtggagtactactacaagatgaagttcttcaccaagtgtgtggccttcagcaagagaattgctgactatgatgaggtgcatgacatccccatgattgcccaggtgacagactgcctgcctgagttcatcggccggggcatggccatggccagcttctaccacgcccgctgcctgcagctgggcctgggcatcaccagagatgagaccacagccaagcactactacagcaaggcctgccgcctgaacccagccctggctgatgagctgcacagcctgctgatccggcagaggatctag

SEQ ID NO: 198295 - DNA, 462 bp, Artificial Sequence
  derived and/or modified sequence
atgaagctgaccagcgagaagctgcccaagaaccccttctacgcctctgtgtcccagtatgctgccaagaaccagaagttcttccagtggaagaaggagaagacagactacacccacgccaacctggtggacaaggccctgcagctgctgaaggagcgcatcctgaagggggacaccctggcctacttcctgcggggccagctgtactttgaggagggctggtatgaggaggccctggagcagtttgaggagatcaaggagaaggaccaccaggccacctaccagctgggcgtgatgtactatgatggcctgggcaccaccctggatgctgagaagggcgtggactacatgaagaagatcctggacagcccctgccccaaggcccggcacctgaagtttgctgctgcctacaacctgggccgggcctactatgagggcaaaggagtgaagaggagcaactag

SEQ ID NO: 198296 - DNA, 1044 bp, Artificial Sequence
  derived and/or modified sequence
atgaagctgaccagcgagaagctgcccaagaaccccttctacgccagtgtgagtcagtatgcagccaagaaccagaaattcttccaatggaaaaaggaaaagacggactatacccacgctaatctggtcgacaaggccctccaactattaaaagaaagaatcctgaaaggggacacccttgcctacttccttcgggggcaactgtacttcgaggaggggtggtacgaggaagctctagagcaattcgaagagataaaggaaaaggaccaccaggctacgtaccaactcggggttatgtactacgatggactgggcacaacactcgacgccgaaaaaggtgtagactacatgaagaagatcctcgattccccctgcccaaaagcaagacacctgaagttcgccgccgcctataaccttgggagggcctattacgaggggaaaggagtgaaaaggtccaacgaagaggccgaacgcttgtggctcatcgccgccgataatggcaatcccaaggcaagcgtcaaggcccagtctatgctggggctctactattcaaccaaggaaccaaaggagctcgaaaaggccttctactggcatagtgaagcctgcggcaacggcaacctcgaaagccaaggtgcgctgggcctcatgtatctctacgggcagggcatccggcaggacactgaggcggccctgcagtgcttgagagaagccgctgaaaggggcaatgtttatgcgcaaggtaacctggttgagtactattataaaatgaaattctttacgaagtgtgtggcattctctaagaggatcgcggactacgatgaggtgcacgacatccctatgattgcccaggtcacggactgtctaccagagtttattggcagagggatggccatggcctctttctatcacgcaagatgtttgcagttaggactaggcatcacaagggacgaaaccaccgctaaacattactattccaaggcatgtcggcttaatcccgccctggccgatgaactgcacagccttctcattcggcagcgtatttag

SEQ ID NO: 198297 - DNA, 1050 bp, Artificial Sequence
  derived and/or modified sequence
atgaagctgaccagcgagaagctgcccaagaaccccttctacgcctctgttagccagtatgcggcaaaaaatcagaagtttttccagtggaagaaggagaaaaccgaaagcgattacacgcatgctaatctggtggacaaagccttgcaacttctcaaagaaaggattcttaaaggcgatacactggcctattttctccgcggccaactttatttcgaggagggttggtatgaggaagccttggaacagtttgaagaaattaaggaaaaagaccatcaggctacctatcagctgggagtgatgtactacgacggcctcgggactaccctcgatgccgaaaagggagtggactatatgaagaagatcttagattcaccgtgtcctaaagccaggcacctgaaatttgcagcagcatataatttgggcagggcctactatgagggaaaaggcgttaagcgctccaatgaagaggctgaaaggttgtggttgattgcagcggataatggaaatccaaaggcatccgtcaaagcgcagtccatgttgggtttatattattccactaaggaacccaaggagctcgagaaggccttttattggcactctgaggcgtgtggtaatggaaacctcgaatctcagggcgcactgggcctcatgtacctttacgggcagggaatacgacaggacacggaagcagctcttcaatgtcttagggaggcggcagaacggggaaatgtgtacgcacaagggaacctggtggagtattattataaaatgaagttcttcactaagtgtgtcgccttctctaagcgcatcgcagattatgatgaggtgcacgacatccccatgatcgctcaggtgaccgattgccttcctgagttcattggccggggaatggcgatggcttcgttttatcacgcacggtgtctgcaactgggcctgggaattaccagagatgaaacaaccgccaaacactactacagtaaagcctgtcgcctgaacccagcactggccgacgagctgcatagtctgctgataagacagcggatctag

SEQ ID NO: 198298 - DNA, 1044 bp, Artificial Sequence
  derived and/or modified sequence
atgaagctgaccagcgagaagctgcccaagaaccccttctacgcctcagtgtctcaatatgccgctaagaatcagaaatttttccagtggaaaaaagagaagacagactatacccatgccaatctggtcgataaggccctgcagctgctcaaagagagaatcctcaaaggtgacacactggcctattttctgcggggtcagctgtactttgaagaagggtggtacgaggaggccctcgaacagtttgaagaaataaaagagaaggaccatcaggccacgtaccagctcggcgttatgtattacgatggcttgggcactaccctggacgccgagaaaggcgttgactacatgaagaagatccttgattccccctgccctaaggcccggcaccttaaattcgccgcagcctacaatctggggagagcttactacgagggtaagggggtgaagcgaagcaatgaggaagcggaacggctgtggctgatcgccgccgataacgggaatcctaaggctagcgtcaaagcacagagcatgctgggactgtattactctacaaaagagccaaaggagctcgagaaggctttctactggcactcagaagcttgcggaaacggaaatttagaaagccagggtgccttaggtctcatgtacctttacggtcagggaatcaggcaggacacagaggccgctctgcaatgcctgcgggaggcagccgagaggggcaatgtatatgcacagggcaacctcgtcgaatattactataagatgaagttcttcaccaagtgcgtcgccttctctaaacggattgcggactatgatgaggtccacgacatccccatgatcgcacaggtgaccgactgtcttcctgaatttatcggccgagggatggcgatggcctcgttctaccacgcccggtgcctgcagctaggattggggattacaagggatgaaacgaccgctaaacattactacagtaaagcctgcaggctaaatcctgctctcgctgacgagcttcatagcctcttgattaggcagcgaatatag

SEQ ID NO: 198299 - DNA, 462 bp, Artificial Sequence
  derived and/or modified sequence
atgaagctgaccagcgagaagctgcccaagaaccccttctacgccagcgtcagccagtatgcggctaaaaatcagaaatttttccagtggaagaaagagaaaacagactatacccacgcgaatttggtcgataaagccctgcagttacttaaggaaaggattctcaagggggataccctcgcctatttcctcaggggtcagctgtattttgaggagggatggtatgaagaggccctcgagcagtttgaagagatcaaggagaaagatcaccaggccacctatcaactgggcgtgatgtattacgatggcctgggcaccaccctcgacgcagaaaaaggggtcgattacatgaagaaaattttggactccccatgcccaaaagcaagacatttgaagtttgccgcagcgtacaatctgggacgtgcttactacgagggtaagggcgtgaaacggagtaactag

SEQ ID NO: 198300 - DNA, 1044 bp, Artificial Sequence
  derived and/or modified sequence
atgaagctgacatctgagaagctcccaaagaaccccttctacgctagcgtatcccagtatgcagctaagaatcagaagttcttccagtggaagaaggagaagaccgactatacacatgcgaatcttgtggataaggcactccaattgctcaaagaaagaattctgaagggggacaccctggcgtacttcttgcggggtcagctatactttgaggaggggtggtacgaagaagcgcttgagcaatttgaagaaattaaagagaaggatcaccaagcaacttatcagctgggggtcatgtattatgatggcctcgggactaccctcgatgccgagaaaggagtggattacatgaagaagatcctcgacagtccctgcccaaaggccagacacctaaaatttgctgcagcctataacttaggacgcgcatactacgaaggtaaaggagttaaacgatctaatgaggaagccgaaaggctgtggttaattgctgccgacaatggcaacccgaaggcatctgtcaaggcgcagagtatgttaggactttactactctaccaaagaaccgaaagaactagaaaaggccttttactggcattccgaggcatgcggaaacgggaacctcgaatcccagggggctctggggctgatgtacctttacggccagggaatcaggcaggatactgaggccgcattgcagtgcctgcgagaggccgctgagaggggaaacgtgtatgcccagggcaacctggtcgagtactattacaaaatgaagtttttcacaaaatgcgtcgcctttagcaagcggatagccgactatgatgaggtccacgatatccccatgattgcgcaagttactgactgcttgcccgagtttattggtaggggcatggcaatggcatccttctaccatgcccgttgcctacagctgggactgggcatcactcgagatgagaccaccgccaagcactactatagcaaggcctgtagattaaaccctgcactggcagatgaactccactctctcctgatcagacagagaatttag

SEQ ID NO: 198301 - DNA, 1050 bp, Artificial Sequence
  derived and/or modified sequence
atgaagttgacttctgagaagttaccaaagaatccattctacgcctctgtgtcccagtacgccgcaaagaaccaaaagttctttcaatggaagaaggagaaaaccgagtcagactacactcatgctaacctcgtggataaggccctccaactgctgaaggagaggatcctgaagggcgacactcttgcttactttctccgcggacagctgtacttcgaagagggctggtacgaagaagcccttgagcagtttgaggagattaaggagaaggaccaccaggcaacctaccagctcggtgtcatgtactatgatggactggggacgacgctggacgctgaaaagggggtggattatatgaagaagatactggactcaccctgtcccaaagcacgccacctaaagttcgccgcagcatacaacctgggtagggcctattacgaaggaaagggggtcaagcgttccaacgaggaggcggagcggctatggctgatcgccgctgataacgggaacccaaaggcctcagtaaaggcacagagcatgctgggtctctattactctactaaggaaccgaaggagcttgagaaggccttctattggcattcggaggcgtgcggaaatggcaatctggagtctcagggagccttgggcttgatgtacctctacggacaaggcataagacaagacaccgaagcagcactgcagtgcctgcgggaggcagcagaacgcggtaacgtttacgcccagggtaatctcgtcgaatattattacaagatgaagtttttcaccaaatgtgtggccttttcgaagaggattgccgattacgatgaggttcacgacatccccatgatcgcgcaggtgacggattgcctgccagaatttattggacgtggaatggccatggcctccttctaccacgcccgttgcctacagctgggactgggcattactcgcgacgagacgaccgccaagcattactattccaaagcctgtaggttgaatcccgcacttgccgatgagctgcatagtcttttaattcgtcagcgtatttag

SEQ ID NO: 198302 - DNA, 1044 bp, Artificial Sequence
  derived and/or modified sequence
atgaaactgacctcagaaaagctgcccaagaatcctttttatgcctcagtgagccaatacgcagcaaaaaatcagaaattcttccagtggaagaaggaaaagaccgattacactcacgcgaatttggtggataaggccttgcagctccttaaggagcgcatccttaaaggcgacaccctcgcatacttcctgagagggcagctgtactttgaggaaggatggtatgaagaggccctggaacaatttgaagagatcaaggaaaaagaccatcaggctacataccaattgggcgttatgtactatgatggcctgggaacaaccctcgatgctgagaaaggtgtggactacatgaagaagattctagacagtccttgcccgaaggcaagacacctcaaattcgcggcagcctataacctcggtagagcatattatgagggtaaaggagtcaagaggagcaacgaagaggccgaacggctctggctgattgccgctgataacgggaacccgaaggcttcagtgaaagctcaatccatgctgggcctctattatagcacgaaggagcccaaagaactcgagaaggccttttactggcacagcgaggcctgcggaaatgggaacctggagtctcagggagccctcgggctgatgtatctgtacggccaaggaatacggcaggatacagaggcagccctgcagtgcttgcgcgaagctgctgagaggggaaatgtgtatgcacagggcaatctagtggaatattattataagatgaaatttttcaccaagtgtgtagcatttagcaagcgaattgcggactacgatgaagtgcatgatatcccaatgatcgcccaagtaacagactgtttgccagaatttatcggaaggggcatggccatggctagcttttaccatgctcggtgtttgcagctgggtctgggcatcaccagggacgaaaccacagccaaacactactatagtaaggcttgccgcctgaacccggctcttgccgacgagttacattcgttgctgattagacagagaatttag

SEQ ID NO: 198303 - DNA, 462 bp, Artificial Sequence
  derived and/or modified sequence
atgaaactgacttccgaaaaattacccaagaatccattttacgcgtcagtctctcagtacgcggcaaagaatcagaagttcttccagtggaaaaaggagaagactgattacacccacgcaaacctggtagacaaggccctgcagctcctcaaagaacggatattgaagggagataccctagcgtatttcctgcgcggacaactgtacttcgaggaggggtggtacgaagaagcactggagcagttcgaggaaatcaaagagaaagatcaccaggctacctatcagctaggagtaatgtattacgacggactgggtactacgcttgacgctgagaagggggtagactacatgaagaaaatccttgacagtccctgcccgaaagcccgtcacctgaaatttgccgcagcctataatctgggtcgggcatactatgaaggcaaaggtgtgaaacgaagcaattag

SEQ ID NO: 198304 - DNA, 2302 bp, Artificial Sequence
  derived and/or modified sequence
aaggatctgcttagaaaccaaagctccagccgagtgtttcttttcccctacatttttagtgattcccttctgttgatgcctttgaaagctcggagaaataaatacgtttattgttatgctgttagaaaacaagttcatgcttgtcctctaaagataagtggtcttttcattctactttttgttttgtagtaagagccataaaatttgcaatcgcaagtttatgttgttatacttagttacccaaggggtagttttaagcatttttattcatatgaatatttgaatataaatgtgtgttcaaatatatagaatcgttcttatattccacatttttaatatttaaactattcacaatatcttttaatgatgtttaaagaacggcagtgtagagatactgttgtcagatttgtgaggtgagcacacgttgatattgccagtttcgcttttgtttatcaattcaataagcactgctttttaaaacacgtgttgaagcttcaggtttgcacagaagttcattttcaggaattcctaactaataaagggtatcagacacgttcttacagttttgaacataaatactgcagttagcatatgtagtgggatatttgtgtggtgaaagtgcctccatatttcatatcttttctttgaaacaagattctgttcagtatgcattaagtggtagttattttttaacttcctgttacatacgtaaatttcataaggaaaggaaatttggggagtcgttacagcttttctccctttaatcacagcgtacctgtccattgctcacattgttttcagaaaaaaaagttgtatctcagctggatatctgacttgactttagtaatgggcctagaaactataaactgaacaaagcttataatgcacaaaaacaggataagtacatttgggggacaatatcttactggcaagtaactggagtttcaccaggcgtgtagcaggtgggatcaattttctaaaacggaagatgatctaagatgcatattttataggcgttctcctaagcagtgctaattctacatgttttaattgctggtagatgcgtttccagaacgaggatgccatttacagcgagtgttaaaaaaaacgttggatgatgaaatacacattgcagaaaaaggatgaagttgaccagtgaaaagttgcccaagaaccccttttatgcctctgtatctcagtatgctgctaaaaaccaaaaatttttccagtggaaaaaggaaaagactgattacacccatgctaatttggtggataaggcattgcagctcttgaaggaaagaatactgaaaggagacactctggcatatttcctacgaggtcaactatattttgaagagggatggtatgaagaagcattagaacagtttgaagaaatcaaggagaaagaccatcaagcaacttaccagctaggagtgatgtactatgatgggctggggaccactctagacgctgagaaaggggtggactatatgaagaaaattcttgattctccatgtcccaaagcaagacacttaaaatttgcagctgcttacaacctcggaagagcttattatgaaggaaaaggtgttaaacgatcaaatgaggaagctgaaagactgtggcttatcgcagcagacaatggaaatcccaaagctagtgtgaaggctcaaagtatgctcgggctgtattactcaaccaaggagcccaaggagttagaaaaggcattttactggcattccgaagcatgtggcaatgggaatctggagtcccagggtgcacttgggctcatgtacttgtatggacaaggcatccggcaggatacggaagctgccctgcagtgcttaagagaagcagcagaacgcggaaacgtctatgctcaagggaatctcgtggagtattactataagatgaaattttttacaaagtgtgttgcattttccaaaaggatcgctgactatgatgaggttcacgacatccccatgatcgcccaggtcacagactgtctcccggagttcatcggcagaggcatggcaatggcatccttctaccacgcaaggtgtcttcagcttggcttgggcatcaccagggatgaaacaaccgctaaacactattattctaaagcttgtcgtctgaatcccgcattggcagatgaacttcactccttacttattcgtcaaagaatttagaccacaatgtatttcaacaaagatcatcaatgctaacacctcacaatgtgtgtatttttacagtagctatgtttggttattttgcacatcacaaattacactatcctgggtatttt

SEQ ID NO: 198305 - DNA, 685 bp, Artificial Sequence
  derived and/or modified sequence
aaaagtgtagcaacaactgagtttgctgtctcactaccctcagcctaggccaacctggactccttcaccccaaatgaggtgaccgctacattttatatgaagacactgatttaccattcaactgtgatccatcttataacatggcaatccaatacagacaggaagataaaactcaacaacagctaaaataaagtgtattcccagaatacacattgcagaaaaaggatgaagttgaccagtgaaaagttgcccaagaaccccttttatgcctctgtatctcagtatgctgctaaaaaccaaaaatttttccagtggaaaaaggaaaagactgattacacccatgctaatttggtggataaggcattgcagctcttgaaggaaagaatactgaaaggagacactctggcatatttcctacgaggtcaactatattttgaagagggatggtatgaagaagcattagaacagtttgaagaaatcaaggagaaagaccatcaagcaacttaccagctaggagtgatgtactatgatgggctggggaccactctagacgctgagaaaggggtggactatatgaagaaaattcttgattctccatgtcccaaagcaagacacttaaaatttgcagctgcttacaacctcggaagagcttattatgaaggaaaaggtgttaaacgatcaaatg

SEQ ID NO: 198306 - protein, 748 aa, Artificial Sequence
  derived and/or modified sequence
MLGTLRAMEGEDVEDDQLLQKLRASRRRFQRRMQRLIEKYNQPFEDTPVVQMATLTYETPQGLRIWGGRLIKERNEGEIQDSSMKPADRTDGSVQAAAWGPELPSHRTVLGADSKSGEVDATSDQEESVAWALAPAVPQSPLKNELRRKYLTQVDILLQGAEYFECAGNRAGRDVRVTPLPSLASPAVPAPGYCSRISRKSPGDPAKPASSPREWDPLHPSSTDMALVPRNDSLSLQETSSSSFLSSQPFEDDDICNVTISDLYAGMLHSMSRLLSTKPSSIISTKTFIMQNWNSRRRHRYKSRMNKTYCKGARRSQRSSKENFIPCSEPVKGTGALRDCKNVLDVSCRKTGLKLEKAFLEVNRPQIHKLDPSWKERKVTPSKYSSLIYFDSSATYNLDEENRFRTLKWLISPVKIVSRPTIRQGHGENRQREIEIRFDQLHREYCLSPRNQPRRMCLPDSWAMNMYRGGPASPGGLQGLETRRLSLPSSKAKAKSLSEAFENLGKRSLEAGRCLPKSDSSSSLPKTNPTHSATRPQQTSDLHVQGNSSGIFRKSVSPSKTLSVPDKEVPGHGRNRYDEIKEEFDKLHQKYCLKSPGQMTVPLCIGVSTDKASMEVRYQTEGFLGKLNPDPHFQGFQKLPSSPLGCRKSLLGSTAIEAPSSTCVARAITRDGTRDHQFPAKRPRLSEPQGSGRQGNSLGASDGVDNTVRPGDQGSSSQPNSEERGENTSYRMEEKSDFMLEKLETKSV

SEQ ID NO: 198307 - DNA, 2247 bp, Artificial Sequence
  derived and/or modified sequence
atgctgggcacgctgagagcaatggagggagaagatgtggaggacgatcagctcttgcagaagttgcgcgcaagccgcaggcgatttcagaggcggatgcagcgccttatcgagaagtacaaccagccttttgaggatactccggtggtgcagatggctactttgacctacgaaacaccccagggcctgcgcatctggggaggtcggctcataaaggaacgcaatgagggggagattcaagactcgtccatgaaaccagctgacagaactgacggttctgtgcaggccgccgcgtgggggccagaactgccttctcataggaccgtccttggcgcagacagcaagtctggcgaggtggacgcaacatcagatcaggaagagtctgttgcatgggccctggcgcccgctgtgcctcagtcacccctgaagaacgagctgcgacgcaagtatctgacccaggtagatatactgcttcagggcgccgagtacttcgagtgtgctgggaaccgcgcagggcgggacgttcgcgtcacacctctgccttctctggcatcgccagccgtgccggcccctgggtattgctccagaatttctcgaaaaagtcctggggaccccgccaagcccgcatcatcccctcgcgaatgggatcccttgcacccttccagcactgacatggccctcgtaccgaggaatgactctttgtcactgcaggaaacctccagcagctccttcctttccagccagcccttcgaggatgatgacatctgcaacgtgaccatttctgacctgtacgctggcatgctacactcgatgtcgcgtctgcttagcactaagccttcctcaattatttcaacgaaaactttcatcatgcagaattggaattcacggcgacgccaccgttacaagtccagaatgaacaagacatattgcaagggcgctcgccgctcgcaaaggagttccaaggagaacttcatcccttgcagcgagcctgtcaagggcacaggcgctctccgtgattgcaagaatgtattagatgtttcatgtagaaaaacaggcctgaaactggaaaaggcctttctggaggtcaacaggccacagatccataaactggacccaagttggaaagagcggaaagtgaccccctctaaatactccagcttaatttatttcgattcttccgccacttataatctggatgaggaaaaccgattccggactctcaagtggcttatctctccagttaaaatcgtctctcgcccaacgattcggcagggacacggggaaaatagacaacgggagatagaaattcgctttgaccagcttcaccgtgagtactgcctgagcccccggaatcagccccgcagaatgtgcctgcccgactcatgggcaatgaatatgtaccggggggggcccgccagccctggtgggttgcagggactcgaaacacgccgcttgagtctgcccagcagtaaggccaaggcaaagtcactgagcgaggcctttgaaaacctcggaaaacgctccctagaggctggcaggtgcctgcctaagtcagactcatcatcctctctcccgaagacaaaccctacacacagtgcaacccgaccgcagcagacatcagatttacatgttcagggaaactcatctggaattttccgaaagagcgtcagccctagtaagaccttgagcgtgccggacaaggaggttcccggccacggtagaaatcggtacgatgagatcaaagaggagttcgataagctgcatcagaagtattgcctgaaaagccccggccaaatgacagtgccattatgcatcggtgtatccacagataaagctagcatggaagtccgataccagacagaaggatttctcgggaaactcaatccagatccacactttcaggggtttcaaaagcttccttctagtcccctgggctgcagaaaatctctcctcgggagcaccgcaatcgaggctccttccagtacttgcgttgctcgcgctattactagagatggaacacgtgatcatcagtttcctgccaagcgaccgcgattaagtgaaccccaggggtccgggagacaggggaacagcctcggagcctctgatggggtagataacacagtgcgccctggggatcagggctcgtcctcccagccaaactcagaggagcgcggggaaaataccagttaccgcatggaggaaaagtccgacttcatgctggaaaagctcgaaactaagtctgtgtag

SEQ ID NO: 198308 - DNA, 3050 bp, Artificial Sequence
  derived and/or modified sequence
ctatttgagtttgtggcgcgcgaggccctgcagtccgggttggcgcttgggtactggctgggtccgatgctgggtacgctgcgcgccatggagggcgaggacgtggaagacgaccagctgctgcagaagctcagggccagtcgccgccgcttccagaggcgcatgcagcggctgatagagaagtacaaccagcccttcgaggacaccccggtggtgcaaatggccacgctgacctacgagacgccacagggattgagaatttggggtggaagactaataaaggaaagaaacgaaggagagatccaggactcctccatgaagcccgcggacaggacagatggctccgtgcaagctgcagcctggggtcctgagcttccctcgcaccgcacagtcctgggagccgattcaaaaagcggtgaggtcgatgccacgtcagaccaggaagagtcagttgcttgggccttagcacctgcagtgcctcaaagccctttgaaaaatgaattaagaaggaaatacttgacccaagtggatatactgctacaaggtgcagagtattttgagtgtgcaggtaacagagctggaagggatgtacgtgtgactccgctgccttcactggcctcacctgccgtgcctgcccccggatactgcagtcgtatctccagaaagagtcctggtgacccagcgaaaccagcttcatctcccagagaatgggatcctttgcatccttcctccacagacatggccttagtacctagaaatgacagcctctccctacaagagaccagtagcagcagcttcttaagcagccagccctttgaagatgatgacatttgcaatgtgaccatcagtgacctgtacgcagggatgctgcactccatgagccggctgttgagcacaaagccatcaagcatcatctccaccaaaacgttcatcatgcaaaactggaactccaggaggaggcacagatataagagcaggatgaacaaaacatattgcaaaggagccagacgttctcagaggagctccaaggagaacttcataccctgctctgagcctgtgaaagggacaggggcattaagagattgcaagaacgtattagatgtttcttgccgtaagacaggtttaaaattggaaaaagcttttcttgaagtcaacagaccccaaatccataagttagatccaagttggaaggagcgcaaagtgacaccctcgaagtattcttccttgatttacttcgactccagtgcaacatataatcttgatgaggaaaatagatttaggacattaaaatggttaatttctcctgtaaaaatagtttccagaccaacaatacgacagggccatggagagaaccgtcagagggagattgaaatccgatttgatcagcttcatcgggaatattgcctgagtcccaggaaccagcctcgccggatgtgcctcccggactcctgggccatgaacatgtacagagggggtcctgcgagtcctggtggccttcagggcttagaaacccgcaggctgagtttaccttccagcaaagcaaaagcaaaaagtttaagtgaggcttttgaaaacctaggcaaaagatctctggaagcaggtaggtgcctgcccaagagcgattcatcttcatcacttccaaagaccaaccccacacacagcgcaactcgcccgcagcagacatctgaccttcacgttcagggaaatagttctggaatatttagaaagtcagtgtcacccagcaaaactctttcagtcccagataaagaagtgccaggccacggaaggaatcgttacgatgaaattaaagaagaatttgacaagcttcatcaaaagtattgcctcaaatctcctgggcagatgacagtgcctttatgtattggagtgtctacagataaagcaagtatggaagttcgatatcaaacagaaggcttcttaggaaaattaaatccagaccctcacttccagggtttccagaagttgccatcatcacccctggggtgcagaaaaagtctactgggctcaactgcaattgaggctccttcatctacatgtgttgctcgtgccatcacgagggatggcacgagggaccatcagttccctgcaaaaagacccaggctatcagaaccccagggctccggacgccagggcaattccctgggtgcctcagatggggtggacaacaccgtcagaccgggagaccagggcagctcttcacagcccaactcagaagagagaggagagaacacgtcttacaggatggaagagaaaagtgatttcatgctagaaaaattggaaactaaaagtgtgtagctaggttatttcggagtgttatttatcttcccacttgctctctgtttgtatttttgttttgtttttgattcttgagactgtgaggacttggttgacttctctgcccttaaagtaaatattagtgaaattggttccatcagagataacctcgagttcttggtgtagaaattatgtgaataaagttgctcaattagaatttttagggttctctttgataggcctgtttttctgatgtgtgtgttttttttgggggggggttatttgtttgtttgtttgtttgtttgtttgtttttgagacagtctctctctatcgcccaggctggagtgcggtggcacaatcttggctcactgcaacttccgcctcccgggttcaagcgattcttctgcctcagcctcccgagtagctgggattacaggcgcgcgccaccacgcctggctaatttttgtagttttagtagagacggggtttcaccatattgaccaggctggtctcgagctcctggcctcgtgatccatctgcctcggcctcccaaagtgctgggattataggcgtgagccactgctcccagccgtgtgttcttttttaaatttagatatgtccagagaatcctctctcctgtttcccatttcattcgagaatattgtttgcttgtgagacgtaagttcgagccctgcatgcaatgacccttgaaggaaaataaacagtcctggtggtcccagacgctcctgcagccaca

SEQ ID NO: 198309 - DNA, 2247 bp, Artificial Sequence
  derived and/or modified sequence
atgctgggcaccctgcgggccatggagggagaagatgtggaggatgaccagctgctgcagaagctgcgggccagcagaagacgcttccagaggaggatgcagaggctgattgagaagtacaaccagccctttgaggacacccctgtggtgcagatggccaccctgacctatgagaccccccagggcctgcgcatctggggcggccgcctcatcaaggagagaaatgaaggagagatccaggacagctccatgaagccagctgacagaacagatggctctgtgcaggccgccgcctggggccctgagctgcccagccacaggacagtgctgggcgctgacagcaagagcggggaggtggatgccaccagtgaccaggaggagagcgtggcctgggccctggccccagctgtgccccagagccccctgaagaatgagctgcggaggaagtacctgacccaggtggacatcctgctgcagggcgctgagtactttgaatgtgccggcaacagagctggaagagatgtgcgggtgacccccctgcccagcctggccagccctgctgtgcctgcccctggctactgcagccgcatcagcaggaagagccctggggaccctgccaagccagccagcagcccccgggagtgggaccccctgcaccccagcagcacagacatggccctggtgcccagaaatgacagcctgagcctgcaggagaccagcagcagcagcttcctgagcagccagccctttgaagatgatgacatctgcaatgtgaccatcagtgacctgtatgccggcatgctgcacagcatgagccggctgctgagcaccaagcccagcagcatcatcagcaccaagaccttcatcatgcagaactggaacagcagaagaagacaccgctacaagagcaggatgaacaagacctactgcaagggggcccggcgcagccagaggagcagcaaggagaacttcatcccctgcagcgagcctgtgaagggcaccggggccctgcgggactgcaagaatgtgctggatgtgtcctgcaggaagacaggcctgaagctggagaaggccttcctggaggtgaaccggccccagatccacaagctggaccccagctggaaggagaggaaggtgacccccagcaagtacagcagcctcatctactttgacagcagcgccacctacaacctggatgaagaaaatcgcttccgcaccctgaagtggctgatcagccctgtgaagatcgtgtcccggcccaccatccggcagggccacggggagaaccggcagcgggagattgagatccgctttgaccagctgcaccgggagtactgcctgagccccaggaaccagcccaggaggatgtgcctgcctgacagctgggccatgaacatgtacagaggaggccctgccagccctgggggcctgcagggcctggagacccggcggctgagcctgcccagcagcaaggccaaggccaagagcctgtctgaggcctttgagaacctgggcaagaggagcctggaggccggccgctgcctgcccaagagtgacagcagcagcagcctgcccaagaccaaccccacccacagcgccacccggccccagcagaccagtgacctgcacgtgcagggcaacagcagcggcatcttcaggaagtctgtgagccccagcaagaccctgtctgtgcctgacaaggaggtgcccggccacggcaggaacagatatgatgagatcaaggaggagtttgacaagctgcaccagaagtactgcctgaagagccctggccagatgacagtgcccctgtgcattggagtgtccacagacaaggcctccatggaggtgcgctaccagacagagggcttcctgggcaagctgaacccagacccccacttccagggcttccagaagctgcccagcagccccctgggctgcaggaagagcctgctgggcagcacagccatcgaggcccccagcagcacctgtgtggcccgggccatcaccagagatggcacccgggaccaccagtttcctgccaagaggccccggctgtctgagccccagggcagcggccggcagggcaacagcctgggcgccagtgatggagtggacaacacagtgcggcctggggaccagggcagcagcagccagcccaacagcgaggagcggggggagaacaccagctacaggatggaggagaagagtgacttcatgctggagaagctggagaccaagtctgtgtag

SEQ ID NO: 198310 - DNA, 2247 bp, Artificial Sequence
  derived and/or modified sequence
atgctgggcaccctgcgggccatggagggcgaggacgtggaggacgatcagctgcttcagaaactcagagccagtcgccgccgcttccagcgaaggatgcagagactcatcgagaagtacaaccaaccattcgaggacaccccagtcgtccagatggccactctcacctacgaaaccccccagggtctgaggatctggggcgggaggctgatcaaggagcgcaatgagggcgagattcaggactcatcaatgaagcctgcggatcggacggatgggagtgtgcaggcagcagcttgggggcctgagctgccttctcatcgaaccgtgctgggggccgacagtaaatccggcgaggttgacgctacatccgatcaggaagagtcagtggcgtgggccttagctcctgcagtccctcagagtcctctcaagaacgagttgagaaggaagtacctgactcaggttgatatactcctccagggggcagagtatttcgagtgtgccggtaatagggccggcagggatgtacgcgtcacacctcttccttctttggcctctccggctgtgcccgccccgggctattgtagtcgcatttcaaggaaaagcccgggtgacccagccaagcccgcctcaagtcccagagaatgggatccgcttcatccaagttctaccgatatggccctcgtccctaggaacgattctctgtccctgcaagaaacctcttcctcgagctttttgagctcccagccgtttgaggatgacgacatatgtaacgtaaccattagcgacttgtatgcgggaatgctgcacagcatgtcacgacttctgagcaccaagccttccagtatcataagcactaagaccttcattatgcaaaattggaactcccggcgaagacatcggtataagtcccgcatgaacaagacttactgtaagggggcccgtagatcccagcgtagctcaaaggaaaatttcataccgtgtagtgaaccagtgaaggggacaggcgctttgcgggactgtaaaaatgtgttggatgtgagttgtagaaagaccgggctgaagctagagaaagcttttctggaggtgaatagaccacaaattcacaaactggatccaagctggaaagaacgcaaggtaactcccagtaaatattcttcactgatctatttcgattcctcagctacctacaacttggatgaagaaaacagattccggactctgaagtggttgataagtccagtcaagatagtgagtcgtcccacaatcaggcagggtcatggagaaaaccggcaaagagaaattgagatccggtttgaccagctgcacagggaatattgcttgagtcctcgaaatcaaccccggcgaatgtgcctccctgacagttgggccatgaacatgtataggggtggacctgcttccccaggcggcctgcagggcctcgagactagaaggctttcgctgccttcttccaaagccaaggccaaaagcctgtccgaagccttcgagaatttgggaaagaggagcctggaggcaggaaggtgtctccccaagtccgacagttccagctcactaccaaaaacaaatcccacgcacagtgccactagaccacagcagacttctgacctgcacgtgcagggtaattcatccggtatcttccgtaagagtgtctcaccaagcaagaccctgtccgtccctgacaaagaggttcctgggcatggaagaaaccggtacgatgaaattaaagaagagtttgataaattacaccagaaatattgcctgaaaagcccaggtcaaatgactgtgcctctctgcatcggcgtttctactgacaaagcctctatggaagtgcgctatcagactgaggggtttcttggcaagctgaatcccgatccacacttccagggctttcagaagttaccttcaagtccattggggtgcagaaaaagcctgttaggcagtaccgctattgaagcaccctcatcaacatgtgtggctagagcaatcacgagggacggcacaagagatcaccaatttcctgctaaacgaccacgactaagtgagcctcaaggcagtggccgccagggaaattccctgggcgcctctgatggagtcgataatactgttagacccggcgaccagggaagttcttctcagccaaacagtgaagaaaggggcgaaaatacatcttatagaatggaagagaagagtgattttatgctggagaaactggagaccaaaagcgtttag

SEQ ID NO: 198311 - DNA, 2247 bp, Artificial Sequence
  derived and/or modified sequence
atgctcggtactctgagggctatggagggagaagacgtcgaagacgaccagctgctgcagaaattgcgggcatcccgcaggcgcttccagcgcagaatgcagagattgattgagaagtataatcagccatttgaagacacccccgtggttcagatggcgacattgacttacgagacaccccagggcctgaggatatgggggggacgcttgatcaaggagcgtaatgagggggaaattcaagattcatcaatgaaacctgctgatagaacagacgggtccgttcaggctgctgcctggggccctgaactgccctctcatcgtaccgtgttgggcgctgactcgaagtccggcgaggtcgacgccacatcagaccaggaagaaagcgtcgcgtgggctctggcccctgccgtgccccagtcccccctgaagaacgagctccggcgtaaatacttgacacaagttgacattcttcttcagggcgcagaatactttgagtgtgctgggaacagagctggtagagacgtgagagtcactccgctgccatctctcgcgtctcccgctgttcccgctccaggctattgttccaggatcagtcgcaaaagcccaggcgaccccgcaaaacccgcaagctcaccaagagagtgggaccctttacacccatcttccactgatatggccttggtcccccgtaatgactccctctccctccaggaaacctcctcaagctccttcctgagcagccagccgtttgaggacgatgacatctgcaacgttaccataagcgacctctacgcagggatgttgcatagcatgtccagattactatccactaaacccagttccataattagcactaagacgttcatcatgcagaactggaacagccggaggaggcacagatataaaagccgcatgaacaagacttactgcaagggcgctcgcagatctcagaggagttccaaggagaacttcattccctgcagtgagccagtcaagggcacaggggcactgagagactgtaagaacgtcttggacgtcagctgcagaaaaaccgggctgaagctggaaaaggcctttctggaggtgaatcgtccacagatccataagctggacccttcatggaaggaaaggaaagtcacaccgagcaagtattcgtcccttatctattttgactcttctgccacctataatctagacgaggaaaatcggttccgaaccctgaaatggctcattagccctgtgaaaattgtcagccggccaaccatacggcaaggtcatggcgagaatcgccagcgcgaaatagaaattcgctttgaccagctgcaccgggaatactgcctgtccccaaggaaccagccgagaaggatgtgtctgcccgactcttgggctatgaatatgtatcgcggtggcccagcatcaccagggggtctgcagggtcttgagaccagaagactctctctgccctctagcaaagccaaggcaaagtctctgtccgaagcttttgaaaacctcggaaaaaggtctcttgaagctgggcgttgcctgcctaaaagcgactcatcgtcctctctcccgaagaccaacccgacccatagcgctacccgaccccaacagaccagcgatctgcacgtccaaggaaattcttctggcatcttccggaaaagtgtgtccccctcaaaaaccttgtcagtgcccgacaaggaagttcctggccacggtaggaatcgttatgatgagatcaaggaggagtttgataagctgcatcagaaatattgtctgaaaagccctggacagatgaccgtgcccctctgtatcggagtcagcacggataaggccagtatggaggtgaggtaccagactgaggggttcctcggtaaactgaaccctgatccccactttcaagggtttcagaagctgcccagttcaccacttgggtgccgcaaatctctgttggggtcgacagctatagaggcaccgtcgtccacctgcgtggctcgggctatcacacgcgacggcacccgcgatcaccaattccctgccaaacggcctcggttgagcgagccccagggttcaggcagacaggggaacagtttgggtgcttcggacggagtcgataacaccgtgcgtcctggtgaccaggggtcatcttcacaaccaaattcagaggaaagaggggaaaacacctcctataggatggaggaaaaatcagacttcatgctagaaaaattggaaaccaagtctgtgtag

SEQ ID NO: 198312 - DNA, 2247 bp, Artificial Sequence
  derived and/or modified sequence
atgctgggcaccctgagagccatggagggcgaggacgtggaggacgaccagctgctgcagaagctgagagccagcagaagaagattccagagaagaatgcagagactgatcgagaagtacaaccagcccttcgaggacacccccgtggtgcagatggccaccctgacctacgagaccccccagggcctgagaatctggggcggcagactgatcaaggagagaaacgagggcgagatccaggacagcagcatgaagcccgccgacagaaccgacggcagcgtgcaggccgccgcctggggccccgagctgcccagccacagaaccgtgctgggcgccgacagcaagagcggcgaggtggacgccaccagcgaccaggaggagagcgtggcctgggccctggcccccgccgtgccccagagccccctgaagaacgagctgagaagaaagtacctgacccaggtggacatcctgctgcagggcgccgagtacttcgagtgcgccggcaacagagccggcagagacgtgagagtgacccccctgcccagcctggccagccccgccgtgcccgcccccggctactgcagcagaatcagcagaaagagccccggcgaccccgccaagcccgccagcagccccagagagtgggaccccctgcaccccagcagcaccgacatggccctggtgcccagaaacgacagcctgagcctgcaggagaccagcagcagcagcttcctgagcagccagcccttcgaggacgacgacatctgcaacgtgaccatcagcgacctgtacgccggcatgctgcacagcatgagcagactgctgagcaccaagcccagcagcatcatcagcaccaagaccttcatcatgcagaactggaacagcagaagaagacacagatacaagagcagaatgaacaagacctactgcaagggcgccagaagaagccagagaagcagcaaggagaacttcatcccctgcagcgagcccgtgaagggcaccggcgccctgagagactgcaagaacgtgctggacgtgagctgcagaaagaccggcctgaagctggagaaggccttcctggaggtgaacagaccccagatccacaagctggaccccagctggaaggagagaaaggtgacccccagcaagtacagcagcctgatctacttcgacagcagcgccacctacaacctggacgaggagaacagattcagaaccctgaagtggctgatcagccccgtgaagatcgtgagcagacccaccatcagacagggccacggcgagaacagacagagagagatcgagatcagattcgaccagctgcacagagagtactgcctgagccccagaaaccagcccagaagaatgtgcctgcccgacagctgggccatgaacatgtacagaggcggccccgccagccccggcggcctgcagggcctggagaccagaagactgagcctgcccagcagcaaggccaaggccaagagcctgagcgaggccttcgagaacctgggcaagagaagcctggaggccggcagatgcctgcccaagagcgacagcagcagcagcctgcccaagaccaaccccacccacagcgccaccagaccccagcagaccagcgacctgcacgtgcagggcaacagcagcggcatcttcagaaagagcgtgagccccagcaagaccctgagcgtgcccgacaaggaggtgcccggccacggcagaaacagatacgacgagatcaaggaggagttcgacaagctgcaccagaagtactgcctgaagagccccggccagatgaccgtgcccctgtgcatcggcgtgagcaccgacaaggccagcatggaggtgagataccagaccgagggcttcctgggcaagctgaaccccgacccccacttccagggcttccagaagctgcccagcagccccctgggctgcagaaagagcctgctgggcagcaccgccatcgaggcccccagcagcacctgcgtggccagagccatcaccagagacggcaccagagaccaccagttccccgccaagagacccagactgagcgagccccagggcagcggcagacagggcaacagcctgggcgccagcgacggcgtggacaacaccgtgagacccggcgaccagggcagcagcagccagcccaacagcgaggagagaggcgagaacaccagctacagaatggaggagaagagcgacttcatgctggagaagctggagaccaagagcgtgtag

SEQ ID NO: 198313 - protein, 1134 aa, Artificial Sequence
  derived and/or modified sequence
MESTPSFLKGTPTWEKTAPENGIVRQEPGSPPRDGLHHGPLCLGEPAPFWRGVLSTPDSWLPPGFPQGPKDMLPLVEGEGPQNGERKVNWLGSKEGLRWKEAMLTHPLAFCGPACPPRCGPLMPEHSGGHLKSDPVAFRPWHCPFLLETKILERAPFWVPTCLPPYLVSGLPPEHPCDWPLTPHPWVYSGGQPKVPSAFSLGSKGFYYKDPSIPRLAKEPLAAAEPGLFGLNSGGHLQRAGEAERPSLHQRDGEMGAGRQQNPCPLFLGQPDTVPWTSWPACPPGLVHTLGNVWAGPGDGNLGYQLGPPATPRCPSPEPPVTQRGCCSSYPPTKGGGLGPCGKCQEGLEGGASGASEPSEEVNKASGPRACPPSHHTKLKKTWLTRHSEQFECPRGCPEVEERPVARLRALKRAGSPEVQGAMGSPAPKRPPDPFPGTAEQGAGGWQEVRDTSIGNKDVDSGQHDEQKGPQDGQASLQDPGLQDIPCLALPAKLAQCQSCAQAAGEGGGHACHSQQVRRSPLGGELQQEEDTATNSSSEEGPGSGPDSRLSTGLAKHLLSGLGDRLCRLLRREREALAWAQREGQGPAVTEDSPGIPRCCSRCHHGLFNTHWRCPRCSHRLCVACGRVAGTGRAREKAGFQEQSAEECTQEAGHAACSLMLTQFVSSQALAELSTAMHQVWVKFDIRGHCPCQADARVWAPGDAGQQKESTQKTPPTPQPSCNGDTHRTKSIKEETPDSAETPAEDRAGRGPLPCPSLCELLASTAVKLCLGHERIHMAFAPVTPALPSDDRITNILDSIIAQVVERKIQEKALGPGLRAGPGLRKGLGLPLSPVRPRLPPPGALLWLQEPQPCPRRGFHLFQEHWRQGQPVLVSGIQRTLQGNLWGTEALGALGGQVQALSPLGPPQPSSLGSTTFWEGFSWPELRPKSDEGSVLLLHRALGDEDTSRVENLAASLPLPEYCALHGKLNLASYLPPGLALRPLEPQLWAAYGVSPHRGHLGTKNLCVEVADLVSILVHADTPLPAWHRAQKDFLSGLDGEGLWSPGSQVSTVWHVFRAQDAQRIRRFLQMVQGLVSTVSVTQHFLSPETSALSAQLCHQGPSLPPDCHLLYAQMDWAVFQAVKVAVGTLQEAK

SEQ ID NO: 198314 - DNA, 3405 bp, Artificial Sequence
  derived and/or modified sequence
atggagtctaccccctccttcctaaaaggcacccctacctgggagaaaaccgcgcccgagaacggaattgtacgtcaggaaccaggatctcctcctagagatggtctccaccatgggcccctgtgcttgggcgagccagcacctttttggcggggcgtgctatccactcctgattcttggttgcctcctggtttccctcaggggcctaaggacatgcttccccttgtcgagggcgaagggcctcagaatggcgagaggaaggtgaactggctggggtcaaaggaggggttaagatggaaggaggccatgcttactcacccactcgccttttgcggaccagcttgccctcccaggtgtggcccactaatgcctgagcattctggcggccatcttaaatctgatccagtcgcctttaggccatggcattgcccattcctcctggaaaccaaaattctggagcgcgcacctttttgggtccccacgtgcctgcccccttacctggtgtcaggcctgcctcctgagcatccctgtgattggcccctcacaccgcatccttgggtgtatagtggcggtcaaccgaaggtgccgtctgctttctcactagggagcaaagggttctactataaggatccctctatcccaaggctcgccaaagagcccctcgccgccgccgagcccggactgtttgggctcaattccggcggccatctacagagagctggggaggcagaacgcccatcactgcaccaacgcgatggagagatgggcgcgggccggcaacagaatccttgtcctctgtttctgggtcaacccgacaccgtgccctggacctcatggcctgcatgtccccctggcctggtgcacacacttggaaacgtatgggccggaccaggcgatggaaatctgggctatcagttgggtccgccagctacaccgcgctgcccttcaccagagccgcccgtgacccagagaggctgctgtagctcttacccacccactaaaggggggggcttgggaccgtgcggaaagtgtcaggagggcttggaaggcggcgcctccggcgcttctgaaccttcggaagaagtcaacaaggcctcaggccctagagcttgtccaccttcgcatcacactaaattaaagaagacttggttgactaggcattcagagcagttcgaatgtccccggggctgcccagaagttgaggagcggcctgtggccaggctgcgggctctgaagcgggcaggttcccctgaggtgcagggggccatgggatcacccgctcccaagcgtccaccagatcctttccctggcactgctgagcagggcgccggcggatggcaggaggtgagggacacctccatcggcaataaagacgtcgattccggtcaacacgatgagcagaagggcccgcaggacggccaggccagtctccaggatcctggacttcaggacatcccttgtctggctctgccagccaagctagctcagtgtcagtcttgcgcccaggcagccggcgaaggaggtggccatgcatgccactcccagcaggtcagacgaagtcccctggggggcgagctccagcaggaggaagatacagccaccaacagttcatctgaggagggccctgggagtggcccggattcacgtctcagcactggcctcgccaagcacctgctaagcggcctgggcgacagactgtgtagattgctccggagggagagagaagcactagcctgggctcaaagagagggtcagggccccgccgtcaccgaggactccccaggcatcccacgatgctgctccagatgtcatcacggactgttcaatactcactggaggtgccctcggtgcagtcataggttgtgcgtagcgtgtggacgcgtcgcgggcaccggaagggcccgagagaaagccgggtttcaggagcagtcggctgaggaatgcacccaggaggcgggccacgccgcgtgcagtttgatgctgactcaatttgtttcctctcaggctttggccgaactgagcacagctatgcaccaggtctgggtgaaatttgacattcgcggccactgtccatgccaggccgatgcccgcgtgtgggctccgggggatgccggccagcagaaagaatcaacccaaaaaacaccacctactccacaacccagctgcaatggtgatactcatcgtacgaagtcaattaaagaggagacacccgacagcgccgaaacgccggcagaagaccgggctggccggggacccctcccttgtcccagtctctgcgagttattggccagcacagccgtgaaattgtgcctcggccacgagagaattcatatggcgtttgcgcctgttactccagccctgccgtcagacgatcgcattactaacatccttgacagcatcattgcacaggtcgtggagagaaaaatccaagaaaaggccctcgggccgggcctgcgtgctggcccggggcttaggaaaggactagggttaccactgtcaccagtccgccccagattgccaccgcctggcgctcttctatggctgcaagaaccacagccctgcccacgaaggggctttcacctttttcaggaacattggcggcagggccagcccgtactcgtatccggtatccagcgaaccctccaaggcaatttgtggggcaccgaggcattgggggcgttgggagggcaggtgcaggcattgtctcctctggggcctccgcagccgagtagcctaggtagtaccacattttgggaaggattttcctggcccgagttgcgccctaaatccgacgaaggtagtgtcctcttactgcatagagccctgggagacgaggatacctccagagtggagaatcttgcagcaagcctgccgctgcctgagtattgtgctctgcacggcaagttgaatctagcgagctacctcccgccaggtctcgcccttagacctctggagcctcagctctgggctgcatatggtgtgtcaccacacagggggcacctgggcacaaagaatctgtgcgtggaggtcgccgatctcgtttccattcttgtccacgcagatactccgctgccagcttggcacagggcccagaaagatttcctatcgggcctcgacggcgagggcctctggagtccgggctcacaagtcagtaccgtctggcatgtctttagagctcaagacgcccagcgcattagacgattcctgcagatggtgcagggcctggtaagcaccgttagtgtcacccagcactttcttagcccagagaccagtgctcttagcgcacagctgtgccaccagggcccttctctgccacccgattgccatttattgtatgcccagatggactgggcagtttttcaggcagtgaaggtcgctgtggggactctccaggaagccaaatag

SEQ ID NO: 198315 - DNA, 5351 bp, Artificial Sequence
  derived and/or modified sequence
ggtgctggaggaggaaaccggcggagcagcttccccactctcagttgcgcttctggcgatggcgatcagaggtcctgctgcgctctccgccgcgctctacctccattagccgcgctgcgcggtgctgcgccctcgccggtgcctctctcctgggtcccaggatcggcccccaccatccaggcacgacccccttccccggcccctcggcctttcccccaactcggccatctccgacccggggcgcgtgttccccccggcccggcgccttctctccctccgggggcacccgctccctagccccggcccggccctccccgcggcgcagcacggagtctcggcgtcccatggcgcaacctacggcctcggcccagaagctggtgcggccgatccgcgccgtgtgccgcatcctgcagatcccggagtccgacccctccaacctgcggccctagagcgcccccgccgccccgggggaaggagagcgcgagcgcgctgagcagacagagcgggagaacgcgtcctcgcccgccggccgggaggccccggagctggcccatggggagcaggcgcccggtgccggccacgacgaccgccaccgcccgcgccgcgaccggccggtgaagcccagggacccccctctgggagagccccatgagggcaggagagtgatggagagtacgcccagcttcctgaagggcaccccaacctgggagaagacggccccagagaacggcatcgtgagacaggagcccggcagcccgcctcgagatggactgcaccatgggccgctgtgcctgggagagcctgctcccttttggaggggcgtcctgagcaccccagactcctggcttccccctggcttcccccagggccccaaggacatgctcccacttgtggagggcgagggcccccagaatggggagaggaaggtcaactggctgggcagcaaagagggactgcgctggaaggaggccatgcttacccatccgctggcattctgcgggccagcgtgcccacctcgctgtggccccctgatgcctgagcatagtggtggccatctcaagagtgaccctgtggccttccggccctggcactgccctttccttctggagaccaagatcctggagcgagctcccttctgggtgcccacctgcttgccaccctacctagtgtctggcctgcccccagagcatccatgtgactggcccctgaccccgcacccctgggtatactccgggggccagcccaaagtgccctctgccttcagcttaggcagcaagggcttttactacaaggatccgagcattcccaggttggcaaaggagcccttggcagctgcggaacctgggttgtttggcttaaactctggtgggcacctgcagagagccggggaggccgaacgcccttcactgcaccagagggatggagagatgggagctggccggcagcagaatccttgcccgctcttcctggggcagccagacactgtgccctggacctcctggcccgcttgtcccccaggccttgttcatactcttggcaacgtctgggctgggccaggcgatgggaaccttgggtaccagctggggccaccagcaacaccaaggtgcccctctcctgagccgcctgtcacccagcggggctgctgttcatcctacccacccactaaaggtgggggtcttggcccttgtgggaagtgccaggagggcctggaggggggtgccagtggagccagcgaacccagcgaggaagtgaacaaggcctctggccccagggcctgtccccccagccaccacaccaagctgaagaagacatggctcacacggcactcggagcagtttgaatgtccacgcggctgccctgaggtcgaggagaggccggttgctcggctccgggccctcaaaagggcaggcagccccgaggtccagggagcaatgggcagtccagcccccaagcggccaccggacccttttccaggcactgcagaacagggggctgggggttggcaggaggtgcgggacacatcgatagggaacaaggatgtggactcgggacagcatgatgagcagaaaggaccccaagatggccaggccagtctccaggacccgggacttcaggacataccatgcctggctctccctgcaaaactggctcaatgccaaagttgtgcccaggcagctggagagggaggagggcacgcctgccactctcagcaagtgcggagatcgcctctgggaggggagctgcagcaggaggaagacacagccaccaactccagctctgaggaaggcccagggtccggccctgacagccggctcagcacaggcctcgccaagcacctgctcagtggtttgggggaccgactgtgccgcctgctgcggagggagcgggaggccctggcttgggcccagcgggaaggccaagggccagccgtgacagaggacagcccaggcattccacgctgctgcagccgttgccaccatggactcttcaacacccactggcgatgtccccgctgcagccaccggctgtgtgtggcctgtggtcgtgtggcaggcactgggcgggccagggagaaagcaggctttcaggagcagtccgcggaggagtgcacgcaggaggccgggcacgctgcctgttccctgatgctgacccagtttgtctccagccaggctttggcagagctgagcactgcaatgcaccaggtctgggtcaagtttgatatccgggggcactgcccctgccaagctgatgcccgggtatgggcccccggggatgcaggccagcagaaggaatcaacacagaaaacgcccccaactccacaaccttcctgcaatggcgacacccacaggaccaagagcatcaaagaggagacccccgattccgctgagaccccagcagaggaccgtgctggccgagggcccctgccttgtccttctctctgcgaactgctggcttctaccgcggtcaaactctgcttgggccatgagcgaatacacatggccttcgcccccgtcactccggccctgcccagtgatgaccgcatcaccaacatcctggacagcattatcgcacaggtggtggaacggaagatccaggagaaagccctggggccggggcttcgagctggcccgggtctgcgcaagggcctgggcctgcccctctctccagtgcggccccggctgcctcccccaggggctttgctgtggctgcaggagccccagccttgccctcggcgtggcttccacctcttccaggagcactggaggcagggccagcctgtgttggtgtcagggatccaaaggacattgcagggcaacctgtgggggacagaagctcttggggcacttggaggccaggtgcaggcgctgagccccctcggacctccccagcccagcagcctgggcagcacaacattctgggagggcttctcctggcctgagcttcgcccaaagtcagacgagggctctgtcctcctgctgcaccgagctttgggggatgaggacaccagcagggtggagaacctagctgccagtctgccacttccggagtactgcgccctccatggaaaactcaacctggcttcctacctcccaccgggccttgccctgcgtccactggagccccagctctgggcagcctatggtgtgagcccgcaccggggacacctggggaccaagaacctctgtgtggaggtggccgacctggtcagcatcctggtgcatgccgacacaccactgcctgcctggcaccgggcacagaaagacttcctttcaggcctggacggggaggggctctggtctccgggcagccaggtcagcactgtgtggcacgtgttccgggcacaggacgcccagcgcatccgccgctttctccagatggtgcagggcctggtgagcacagtcagcgtcactcagcacttcctctcccctgagacctctgccctctctgctcagctctgccaccagggacccagccttccccctgactgccacctgctttatgcccagatggactgggctgtgttccaagcagtgaaggtggccgtggggacattacaggaggccaaatagagggatgctaggtgtctgggatcggggtggggacaggtagaccaggtgctcagcccaggcacaacttcagcaggggatggcgctaggggacttggggatttctggtcaaccccacaagcaccactctgggcacaagcagggcactctgttcccctcccccttaagccaacaaccacagtgccaccaagctcacacctgtccttctcaggctggcatctcccccaccctgtgccccttttcatggtaccaggcccgcactgggggcaattgacttcctccaatccccactcctccgagacccaggagacaaacagcccttccttggggaaacttgggaatcattctggcttaaacaacacctcctcctgctgctcactcccgctgagcccactctactgccccagctccgtttctaccaccgcatcctcactgggctcactgcaggcatgctgaacaaggggcctccaaccttctgccctcctgccaaaagatctggggagtgtgaggagagggtggcatcaggagctgctcaggcttggcggagggagcggcatgggcgatgtcactcagccccttcccggtccgcccgcttccctccttcatgatttccattaaagtctgttgttttgtgactgctgccagtgtggttggccctgcccctgcaggccacatggtccagggagggagggggacatggaaatctgccttagagacaaatggagtagggcagcccggagctggggcccaagggacaggacaccactgcctgctcttcgtctggggcctggggccttgcctcccactgaggagactttgggtggggtggggggctgtcccccaaagatgctcctgagtgcaagagcaggcaaggcagagtcctggggcacagccacgaggtgacctccctgtgcagagactcccgagccctactccacccagcaagctccagtccgccccatctctcccgtctaccctgacctggagatccagaagtatggcccagaagagcccttgccccgcctgtctgcccttggtggcagtggccatggccgacgccaggcccagccaccctgggactgagcctgactgcttcagacagccgacccctccttgtccccgctccacgcccgcagcctcctggtggcgctccgccctctcccgcttcctttgtgtatctcagccctacaaagaaaaacactcccactcttgtcatacctaattgttcctgctgtggtttggggaattttttttattaaataaagttttttattataagggtaa

SEQ ID NO: 198316 - DNA, 3405 bp, Artificial Sequence
  derived and/or modified sequence
atggagagcacccccagcttcctgaagggcacccccacctgggagaagacagccccagaaaatggaattgtgcggcaggagcccggcagccccccaagagatggcctgcaccacggccccctgtgcctgggggagcccgcccccttctggaggggcgtgctgagcaccccagacagctggctgcccccaggcttcccccagggccccaaggacatgctgcccctggtggagggggagggcccccagaatggagagaggaaggtgaactggctgggcagcaaggagggcctgcgctggaaggaggccatgctgacccaccccctggccttctgtggccctgcctgccccccaagatgtggccccctgatgcctgagcacagcggcggccacctgaagagtgaccctgtggccttccggccctggcactgccccttcctgctggagaccaagatcctggagcgggcccccttctgggtgcccacctgcctgcccccctacctggtgtctggcctgcccccagagcacccctgtgactggcccctgaccccccacccctgggtgtacagcggcggccagcccaaggtgcccagcgccttcagcctgggcagcaagggcttctactacaaggaccccagcatcccccggctggccaaggagcccctggccgctgctgagcccggcctgtttggcctgaacagcggcggccacctgcagagagctggggaggccgagcggcccagcctgcaccagagagatggagagatgggcgccggccggcagcagaacccctgccccctcttcctgggccagcctgacacagtgccctggacctcctggccagcctgccccccaggcctggtgcacaccctgggcaatgtgtgggccggccctggagatggcaacctgggctaccagctgggccccccagccaccccccgctgccccagccctgagccccctgtgacccagaggggctgctgcagcagctacccacccaccaagggcggcggcctgggcccctgtgggaagtgccaggagggcctggagggcggggccagcggggccagcgagcccagcgaggaggtgaacaaggccagcggcccccgggcctgcccccccagccaccacaccaagctgaagaagacctggctgaccaggcacagcgagcagtttgagtgcccccggggctgcccagaggtggaggagaggcctgtggcccggctgcgggccctgaagagagctggcagccctgaggtgcagggcgccatgggcagccctgcccccaagaggcccccagaccccttccctggaacagctgagcagggcgccggcggctggcaggaggtgcgggacaccagcatcggcaacaaggatgtggacagcggccagcatgatgagcagaagggcccccaggacggccaggccagcctgcaggaccccggcctgcaggacatcccctgcctggccctgcctgccaagctggcccagtgccagagctgtgcccaggccgccggggagggcggcggccacgcctgccacagccagcaggtgcggcgcagccccctgggcggggagctgcagcaggaggaggacacagccaccaacagcagcagcgaggagggccctggcagcggccctgacagccggctgagcacaggcctggccaagcacctgctgagcggcctgggggaccggctgtgccgcctgctgcggcgggagcgggaggccctggcctgggcccagcgggagggccagggccctgctgtgacagaggacagccctggcatcccccgctgctgcagccgctgccaccacggcctcttcaacacccactggcgctgcccccgctgcagccaccggctgtgtgtggcctgtggccgggtggccggcaccggccgggcccgggagaaggccggcttccaggagcagagcgcagaagaatgtacccaggaggccggccatgctgcctgcagcctgatgctgacccagtttgtgagcagccaggccctggccgagctgagcacagccatgcaccaggtgtgggtgaagtttgacatccggggccactgcccctgccaggctgatgcccgggtgtgggcccctggagatgctggccagcagaaggagagcacccagaagaccccacccaccccccagcccagctgcaatggagacacccacaggaccaagagcatcaaggaggagaccccagattctgctgagaccccagcagaagatcgggccggccggggccccctgccctgccccagcctgtgtgagctgctggccagcacagctgtgaagctgtgcctgggccacgagcgcatccacatggcctttgcccctgtgaccccagccctgcccagtgatgaccgcatcaccaacatcctggacagcatcatcgcccaggtggtggagaggaagatccaggagaaggccctgggccctggcctgcgggccggccctggcctgaggaagggcctgggcctgcccctgagccctgtgcggccccggctgcccccacctggggccctgctgtggctgcaggagccccagccctgcccccggcggggcttccacctgttccaggagcactggaggcagggccagcctgtgctggtgtctggcatccagaggaccctgcagggcaacctgtggggcacagaggccctgggcgccctgggcggccaggtgcaggccctgagccccctgggccccccccagcccagcagcctgggcagcaccaccttctgggagggcttctcctggccagagctgcggcccaagagtgatgagggctctgtgctgctgctgcaccgggccctgggagatgaggacaccagccgggtggagaacctggccgccagcctgcccctgcctgagtactgtgccctgcacggcaagctgaacctggccagctacctgcccccaggcctggccctgcggcccctggagccccagctgtgggccgcctacggcgtgagcccccaccggggccacctgggcaccaagaacctgtgtgtggaggtggccgacctggtgtccatcctggtgcacgccgacacccccctgcctgcctggcaccgggcccagaaggacttcctgagcggcctggatggagagggcctgtggagccctggcagccaggtgtccacagtgtggcacgtgttccgggcccaggatgcccagaggatccgccgcttcctgcagatggtgcagggcctggtgtccacagtgtctgtgacccagcacttcctgagccctgagaccagcgccctgagcgcccagctgtgccaccagggccccagcctgcccccagactgccacctgctgtatgcccagatggactgggccgtgttccaggccgtgaaggtggccgtgggcaccctgcaggaggccaagtag

SEQ ID NO: 198317 - DNA, 3405 bp, Artificial Sequence
  derived and/or modified sequence
atggagagcacccccagcttcctgaagggcacccccacctgggagaaaaccgcccctgagaacgggatcgtcaggcaagagccaggttctcctccccgagatgggctgcaccatgggcccctttgtctgggcgagcccgcccccttctggcgaggcgtgctgtccactcctgatagttggctgccacccgggtttcctcagggtcctaaagacatgttgcccctagttgagggtgagggacctcagaatggggaaagaaaggtgaactggctgggatccaaagaggggcttagatggaaagaggcaatgctgacacaccctttagccttttgcggtcccgcctgtcccccccgctgcggaccactgatgccagagcattccgggggtcatctgaaatctgatcccgtggcgttccggccttggcactgccctttcctgctggaaactaagattctggaacgcgccccattttgggtgcccacgtgcctacccccttacttggtgagcggactgccacctgagcacccctgcgactggcctcttaccccacacccttgggtctacagcgggggacaaccaaaagtaccctccgcattctctctgggtagcaaagggttttattacaaggatccatcaatccccagacttgctaaagagccactggcggcagcagaacccggcttgtttggactgaacagcggagggcatctgcagagagctggagaggcggagaggccttccctgcaccagagagacggagagatgggggccggcagacagcagaatccctgtccactgtttctggggcagcccgacaccgtaccctggacgagctggcccgcttgtcccccagggctggtgcataccctgggtaatgtgtgggctggccctggagatgggaacctcgggtaccagctcgggccacccgcaacacccagatgtccctccccagagcccccagtaacgcagcgcggctgctgctcgtcctaccctccgactaaaggcggcgggctcgggccatgcggcaaatgtcaagagggcctcgagggcggcgccagtggcgcctctgagccttccgaggaggtgaacaaagccagcggtccgcgcgcatgtcctcctagtcatcatacgaagctgaaaaaaacctggctgacccgtcattctgagcagtttgaatgtcccagagggtgccctgaggtcgaggaaaggcccgtggcccgtctgagagcattgaagagagccggctctcctgaggttcaaggcgcaatggggtctcccgccccaaaaagacctcccgacccctttcccgggaccgccgagcaaggggccggcggatggcaggaggtgcgagacaccagtattggaaacaaggatgtagactccggccagcatgacgagcagaagggaccccaagacgggcaggctagcctgcaagacccaggcctgcaggacattccatgtctggctcttcccgccaaactggcccagtgccagagttgcgctcaagccgccggcgaggggggtggccacgcttgtcatagccagcaggtacgtcggtctcccctaggcggcgagctgcagcaagaggaggacacagccaccaactcatcctcggaagaaggacctgggagtgggcctgattctagactgtcaacaggactggcaaaacatctgctaagtggcctgggagacaggctgtgcaggttgctgcgaagagagcgagaggctcttgcgtgggcgcagcgggagggtcaggggcctgccgtcactgaggacagccctgggatcccccggtgctgctctaggtgccaccatggcctttttaatacgcattggcgatgcccgcgatgttcccaccggctctgtgtggcttgcggcagggtggctggcacagggagagccagagaaaaggcagggttccaggaacagtcagctgaagaatgcacccaggaagccgggcacgctgcctgcagcttgatgctgacccagttcgttagcagtcaggccctggccgagctcagtactgcaatgcatcaagtgtgggtgaaattcgacattagggggcattgcccatgtcaggcggatgcaagagtttgggccccgggagatgctggccaacagaaggaatcaacgcaaaaaacgccacctactccacagccttcatgcaacggcgacactcacaggaccaaaagcattaaggaggagactcctgactccgctgagacccccgccgaggaccgagcggggaggggacccttaccatgtccatcactatgcgaactcttagcgtcgactgcggtcaaactgtgcctgggacatgaacggatccatatggcatttgcccccgtgacacctgctctaccttctgacgacagaatcactaatatcttagactctatcatagcccaagtcgtggagaggaagatccaagagaaggctttaggcccgggattaagagccggaccgggtctgcgcaagggcctgggcctgccattgtctcctgtccgccctcggctccctccccccggcgctctgctctggttgcaggaaccccagccatgccctaggcggggcttccacctgtttcaagagcactggcggcaaggccagcctgttctcgtgtctggcattcagaggacgctgcaggggaatctctggggcaccgaagctcttggcgccctcggggggcaggttcaggccctttctccattgggtcccccccagccgtcctcccttgggtctaccaccttctgggaaggatttagttggcccgagcttcggcccaagtcagacgaagggtccgtgttgctattacaccgggctctcggggacgaagatacttctcgcgtggaaaatctggctgccagccttcctcttcccgaatactgcgctttgcatggcaaattgaatctggccagctacctgccccccggactggcacttcggccactggaaccccagctctgggctgcctatggagtttccccccacaggggtcatctgggaactaagaacctgtgtgtcgaggtggccgacctcgtgtccatcctggtgcacgccgacaccccactgcccgcttggcaccgggcacagaaagatttcttgtcagggctggatggtgaggggctgtggtcccctggctcacaggttagtacagtctggcacgtgtttcgagcccaagacgcgcagcgtatccggcggttccttcagatggttcaaggacttgtctcaaccgtcagtgtcactcagcactttctcagcccggagacgtctgcactctccgcccagctgtgccatcagggcccctccctgccaccagattgtcacctgctctatgcccaaatggactgggcagtcttccaggctgttaaagtcgccgttggaaccctgcaggaagccaaatag

SEQ ID NO: 198318 - DNA, 3405 bp, Artificial Sequence
  derived and/or modified sequence
atggagtctactccaagttttctcaaaggaactcccacatgggagaaaaccgcgcctgagaatggcatcgtcagacaggagcccggtagtcctccgagggacggcctccatcacgggcctttgtgcctgggggaacctgctcccttttggagaggcgtgctttccacacccgactcttggttgccccctggatttccacaggggcctaaggacatgctgccgctcgttgaaggtgaagggcctcagaacggagaacgaaaagttaactggctaggatctaaggagggtctgaggtggaaggaagctatgttgacacacccgttagcgttttgcggcccagcgtgtcctccacgatgtggccctctgatgcctgagcactctggaggacatcttaagtctgatcccgtcgccttcagaccctggcactgtccattcttgctggaaactaagatcttggagcgggcaccattttgggttcctacgtgcctacctccatacctggtgtccggattacctcctgaacacccatgcgattggcccctgacacctcacccttgggtgtactctgggggacaaccaaaggtgcctagcgccttctcgctgggctcaaaaggtttctactataaagacccgtcgataccgagactggcaaaggagcccctagccgctgctgaaccaggcttgttcgggttgaattccggaggccacctgcagcgcgctggggaagccgagaggcctagcttgcaccagagggatggcgagatgggagctggaaggcaacaaaacccttgccccctctttctgggtcagcccgacacagtcccctggacatcctggcccgcttgtccacccggactcgtgcacacgctgggcaacgtgtgggccggaccaggagatggcaatttaggctaccagcttggtcctccggcaactcccagatgccccagtcctgaacctccagttactcaacgcggatgctgttcgtcttatccccctaccaaagggggtgggctgggcccttgcggcaaatgtcaggaaggcttggagggcggtgcaagcggtgcatctgaaccaagcgaagaggtcaataaggcatctggaccccgagcgtgtcctccctcccaccatacgaaacttaagaagacctggctgactagacattctgagcaatttgaatgcccgagaggctgtcctgaggtggaggaacgccctgtcgcgcgtctgagggccttaaaacgtgccggaagtcctgaggtccagggcgctatgggctctcctgccccaaaacgaccgccagatcctttccctgggactgccgaacagggtgcgggtggatggcaagaggtgcgcgacacttcgatcggaaataaggatgtggattcaggccagcacgatgagcaaaaaggcccacaggatggacaagccagcttgcaggatcccggactccaggatatcccttgcctggcccttcccgcaaagttggcccagtgtcagtcttgtgcacaggcagcaggagaaggtggcggtcacgcctgccattctcagcaggtgcggagatcccccctgggcggagaactgcagcaggaggaagataccgccactaattcttccagtgaagaaggtcctggatcaggacctgatagtaggctgagcaccgggctagctaagcatctgctgtccggtctgggagaccggctttgccggttgctccgacgcgagcgggaggcactggcctgggcacagagagaaggacagggcccagcagtgacggaggattctcccggaattcctcgctgttgttcgcgctgtcatcatggactttttaacacgcactggcgttgtccgcgttgctcacatagactatgtgttgcttgcggaagagtggcaggtacaggtcgcgcaagggaaaaggcgggatttcaggagcaaagcgctgaggaatgtacacaggaggctgggcacgctgcatgctcacttatgctcacacaattcgtttccagccaggcactggctgaactgtcaacggccatgcatcaggtctgggttaagtttgatatcagaggtcattgtccctgtcaggccgatgccagggtctgggctcctggggacgcaggccagcaaaaagaatccactcaaaagacaccaccaacaccacagccatcctgtaatggcgatacacacaggactaagtctattaaggaagaaacaccggactccgccgagaccccagcagaggatcgcgcaggacgcggtcccctgccctgcccgtctttatgcgagctcctggcatcaaccgcagttaaactctgcctggggcacgagcgcatacatatggcttttgccccagttacccctgctctcccgtcagacgacaggattacgaacattctggactctataattgcccaggtcgtagaaaggaagattcaagaaaaggcactgggacccggtcttagagccggtcctgggctcaggaagggtctgggactgcctctctctccggtcaggcctcgtctccctccccctggagcactcctgtggctgcaggagccacaaccatgccctaggagagggtttcacctctttcaagagcattggcggcagggacagcctgtactggtgagcggtattcagcgcacactgcaaggcaacttgtggggcactgaggcgttaggggcactgggagggcaggtgcaggccctgagcccgctgggaccgcctcaacctagctccctcggctctactacgttttgggaaggtttttcttggccagaacttaggccaaaatcagatgaaggaagtgtgctcctgctgcaccgcgctttaggtgatgaagacacaagcagagtcgaaaatctggccgcttcactgccactgcccgagtattgcgcactgcacggcaaattaaacttggccagttacctgcctcctgggctggctttgcggcctctcgaacctcagctgtgggcagcatatggggtttcccctcataggggccacctcgggacgaagaatctctgcgtggaagtggcagacctcgtctccatcctcgtgcatgctgatacgcccttgcctgcctggcacagggctcagaaagacttcctgtctgggctcgacggcgaggggttgtggtctcctggatcccaagtctccaccgtgtggcacgtctttagggcccaggatgctcagcggattcgacggtttctgcagatggtgcagggtctggtgtccaccgtgtctgtgacacagcatttcctcagccccgagaccagtgccctttctgctcagttgtgccaccaagggcctagcctgcctcccgattgtcacctgctctatgctcagatggattgggcagtgtttcaggctgtgaaagtggcagtaggcaccctgcaggaagccaagtag

SEQ ID NO: 198319 - DNA, 3405 bp, Artificial Sequence
  derived and/or modified sequence
atggagagcacccccagcttcctgaagggcacccccacctgggagaagaccgcccccgagaacggcatcgtgagacaggagcccggcagcccccccagagacggcctgcaccacggccccctgtgcctgggcgagcccgcccccttctggagaggcgtgctgagcacccccgacagctggctgccccccggcttcccccagggccccaaggacatgctgcccctggtggagggcgagggcccccagaacggcgagagaaaggtgaactggctgggcagcaaggagggcctgagatggaaggaggccatgctgacccaccccctggccttctgcggccccgcctgcccccccagatgcggccccctgatgcccgagcacagcggcggccacctgaagagcgaccccgtggccttcagaccctggcactgccccttcctgctggagaccaagatcctggagagagcccccttctgggtgcccacctgcctgcccccctacctggtgagcggcctgccccccgagcacccctgcgactggcccctgaccccccacccctgggtgtacagcggcggccagcccaaggtgcccagcgccttcagcctgggcagcaagggcttctactacaaggaccccagcatccccagactggccaaggagcccctggccgccgccgagcccggcctgttcggcctgaacagcggcggccacctgcagagagccggcgaggccgagagacccagcctgcaccagagagacggcgagatgggcgccggcagacagcagaacccctgccccctgttcctgggccagcccgacaccgtgccctggaccagctggcccgcctgcccccccggcctggtgcacaccctgggcaacgtgtgggccggccccggcgacggcaacctgggctaccagctgggcccccccgccacccccagatgccccagccccgagccccccgtgacccagagaggctgctgcagcagctacccccccaccaagggcggcggcctgggcccctgcggcaagtgccaggagggcctggagggcggcgccagcggcgccagcgagcccagcgaggaggtgaacaaggccagcggccccagagcctgcccccccagccaccacaccaagctgaagaagacctggctgaccagacacagcgagcagttcgagtgccccagaggctgccccgaggtggaggagagacccgtggccagactgagagccctgaagagagccggcagccccgaggtgcagggcgccatgggcagccccgcccccaagagaccccccgaccccttccccggcaccgccgagcagggcgccggcggctggcaggaggtgagagacaccagcatcggcaacaaggacgtggacagcggccagcacgacgagcagaagggcccccaggacggccaggccagcctgcaggaccccggcctgcaggacatcccctgcctggccctgcccgccaagctggcccagtgccagagctgcgcccaggccgccggcgagggcggcggccacgcctgccacagccagcaggtgagaagaagccccctgggcggcgagctgcagcaggaggaggacaccgccaccaacagcagcagcgaggagggccccggcagcggccccgacagcagactgagcaccggcctggccaagcacctgctgagcggcctgggcgacagactgtgcagactgctgagaagagagagagaggccctggcctgggcccagagagagggccagggccccgccgtgaccgaggacagccccggcatccccagatgctgcagcagatgccaccacggcctgttcaacacccactggagatgccccagatgcagccacagactgtgcgtggcctgcggcagagtggccggcaccggcagagccagagagaaggccggcttccaggagcagagcgccgaggagtgcacccaggaggccggccacgccgcctgcagcctgatgctgacccagttcgtgagcagccaggccctggccgagctgagcaccgccatgcaccaggtgtgggtgaagttcgacatcagaggccactgcccctgccaggccgacgccagagtgtgggcccccggcgacgccggccagcagaaggagagcacccagaagaccccccccaccccccagcccagctgcaacggcgacacccacagaaccaagagcatcaaggaggagacccccgacagcgccgagacccccgccgaggacagagccggcagaggccccctgccctgccccagcctgtgcgagctgctggccagcaccgccgtgaagctgtgcctgggccacgagagaatccacatggccttcgcccccgtgacccccgccctgcccagcgacgacagaatcaccaacatcctggacagcatcatcgcccaggtggtggagagaaagatccaggagaaggccctgggccccggcctgagagccggccccggcctgagaaagggcctgggcctgcccctgagccccgtgagacccagactgcccccccccggcgccctgctgtggctgcaggagccccagccctgccccagaagaggcttccacctgttccaggagcactggagacagggccagcccgtgctggtgagcggcatccagagaaccctgcagggcaacctgtggggcaccgaggccctgggcgccctgggcggccaggtgcaggccctgagccccctgggccccccccagcccagcagcctgggcagcaccaccttctgggagggcttcagctggcccgagctgagacccaagagcgacgagggcagcgtgctgctgctgcacagagccctgggcgacgaggacaccagcagagtggagaacctggccgccagcctgcccctgcccgagtactgcgccctgcacggcaagctgaacctggccagctacctgccccccggcctggccctgagacccctggagccccagctgtgggccgcctacggcgtgagcccccacagaggccacctgggcaccaagaacctgtgcgtggaggtggccgacctggtgagcatcctggtgcacgccgacacccccctgcccgcctggcacagagcccagaaggacttcctgagcggcctggacggcgagggcctgtggagccccggcagccaggtgagcaccgtgtggcacgtgttcagagcccaggacgcccagagaatcagaagattcctgcagatggtgcagggcctggtgagcaccgtgagcgtgacccagcacttcctgagccccgagaccagcgccctgagcgcccagctgtgccaccagggccccagcctgccccccgactgccacctgctgtacgcccagatggactgggccgtgttccaggccgtgaaggtggccgtgggcaccctgcaggaggccaagtag

SEQ ID NO: 198320 - protein, 499 aa, Artificial Sequence
  derived and/or modified sequence
MSMFLNTLTPKFYVALTGTSSLISGLILIFEWWYFRKYGTSFIEQVSVSHLRPLLGGVDNNSSNNSNSSNGDSDSNRQSVSECKVWRNPLNLFRGAEYNRYTWVTGREPLTYYDMNLSAQDHQTFFTCDSDHLRPADAIMQKAWRERNPQARISAAHEALEINECATAYILLAEEEATTIAEAEKLFKQALKAGDGCYRRSQQLQHHGSQYEAQHRRDTNVLVYIKRRLAMCARRLGRTREAVKMMRDLMKEFPLLSMFNIHENLLEALLELQAYADVQAVLAKYDDISLPKSATICYTAALLKARAVSDKFSPEAASRRGLSTAEMNAVEAIHRAVEFNPHVPKYLLEMKSLILPPEHILKRGDSEAIAYAFFHLAHWKRVEGALNLLHSFRMIPYPLEKGHLFYPYPICTETADRELLPSFHEVSVYPKKELPFFILFTAGLCSFTAMLALLTHQFPELMGVFAKAFLSTLFAPLNFVMEKVESILPSSLWHQLTRI

SEQ ID NO: 198321 - protein, 511 aa, Artificial Sequence
  derived and/or modified sequence
MFGTESSLSMFLNTLTPKFYVALTGTSSLISGLILIFEWWYFRKYGTSFIEQVSVSHLRPLLGGVDNNSSNNSNSSNGDSDSNRQSVSECKVWRNPLNLFRGAEYNRYTWVTGREPLTYYDMNLSAQDHQTFFTCDSDHLRPADAIMQKAWRERNPQARISAAHEALEINECATAYILLAEEEATTIAEAEKLFKQALKAGDGCYRRSQQLQHHGSQYEAQHRRDTNVLVYIKRRLAMCARRLGRTREAVKMMRDLMKEFPLLSMFNIHENLLEALLELQAYADVQAVLAKYDDISLPKSATICYTAALLKARAVSDKFSPEAASRRGLSTAEMNAVEAIHRAVEFNPHVPKYLLEMKSLILPPEHILKRGDSEAIAYAFFHLAHWKRVEGALNLLHCTWEGTFRMIPYPLEKGHLFYPYPICTETADRELLPSFHEVSVYPKKELPFFILFTAGLCSFTAMLALLTHQFPELMGVFAKAFLSTLFAPLNFVMEKVESILPSSLWHQLTRI

SEQ ID NO: 198322 - protein, 554 aa, Artificial Sequence
  derived and/or modified sequence
MAEAATGFLEQLKSCIVWSWTYLWTVWFFIVLFLVYILRVPLKINDNLSTVSMFLNTLTPKFYVALTGTSSLISGLILIFEWWYFRKYGTSFIEQVSVSHLRPLLGGVDNNSSNNSNSSNGDSDSNRQSVSECKVWRNPLNLFRGAEYNRYTWVTGREPLTYYDMNLSAQDHQTFFTCDSDHLRPADAIMQKAWRERNPQARISAAHEALEINECATAYILLAEEEATTIAEAEKLFKQALKAGDGCYRRSQQLQHHGSQYEAQHRRDTNVLVYIKRRLAMCARRLGRTREAVKMMRDLMKEFPLLSMFNIHENLLEALLELQAYADVQAVLAKYDDISLPKSATICYTAALLKARAVSDKFSPEAASRRGLSTAEMNAVEAIHRAVEFNPHVPKYLLEMKSLILPPEHILKRGDSEAIAYAFFHLAHWKRVEGALNLLHCTWEGTFRMIPYPLEKGHLFYPYPICTETADRELLPSFHEVSVYPKKELPFFILFTAGLCSFTAMLALLTHQFPELMGVFAKAFLSTLFAPLNFVMEKVESILPSSLWHQLTRI

SEQ ID NO: 198323 - DNA, 1500 bp, Artificial Sequence
  derived and/or modified sequence
atgagcatgttcctgaacaccctgacccccaagttctacgtggccctgaccggcaccagcagcctgatcagcggcctgatcctgatcttcgagtggtggtacttcagaaagtacggcaccagcttcatcgagcaggtgagcgtgagccacctgagacccctgctgggcggcgtggacaacaacagcagcaacaacagcaacagcagcaacggcgacagcgacagcaacagacagagcgtgagcgagtgcaaggtgtggagaaaccccctgaacctgttcagaggcgccgagtacaacagatacacctgggtgaccggcagagagcccctgacctactacgacatgaacctgagcgcccaggaccaccagaccttcttcacctgcgacagcgaccacctgagacccgccgacgccatcatgcagaaggcctggagagagagaaacccccaggccagaatcagcgccgcccacgaggccctggagatcaacgagtgcgccaccgcctacatcctgctggccgaggaggaggccaccaccatcgccgaggccgagaagctgttcaagcaggccctgaaggccggcgacggctgctacagaagaagccagcagctgcagcaccacggcagccagtacgaggcccagcacagaagagacaccaacgtgctggtgtacatcaagagaagactggccatgtgcgccagaagactgggcagaaccagagaggccgtgaagatgatgagagacctgatgaaggagttccccctgctgagcatgttcaacatccacgagaacctgctggaggccctgctggagctgcaggcctacgccgacgtgcaggccgtgctggccaagtacgacgacatcagcctgcccaagagcgccaccatctgctacaccgccgccctgctgaaggccagagccgtgagcgacaagttcagccccgaggccgccagcagaagaggcctgagcaccgccgagatgaacgccgtggaggccatccacagagccgtggagttcaacccccacgtgcccaagtacctgctggagatgaagagcctgatcctgccccccgagcacatcctgaagagaggcgacagcgaggccatcgcctacgccttcttccacctggcccactggaagagagtggagggcgccctgaacctgctgcacagcttcagaatgatcccctaccccctggagaagggccacctgttctacccctaccccatctgcaccgagaccgccgacagagagctgctgcccagcttccacgaggtgagcgtgtaccccaagaaggagctgcccttcttcatcctgttcaccgccggcctgtgcagcttcaccgccatgctggccctgctgacccaccagttccccgagctgatgggcgtgttcgccaaggccttcctgagcaccctgttcgcccccctgaacttcgtgatggagaaggtggagagcatcctgcccagcagcctgtggcaccagctgaccagaatctag

SEQ ID NO: 198324 - DNA, 1536 bp, Artificial Sequence
  derived and/or modified sequence
atgttcggcaccgagagcagcctgagcatgttcctgaacaccctgacccccaagttctacgtggccctgaccggcaccagcagcctgatcagcggcctgatcctgatcttcgagtggtggtacttcagaaagtacggcaccagcttcatcgagcaggtgagcgtgagccacctgagacccctgctgggcggcgtggacaacaacagcagcaacaacagcaacagcagcaacggcgacagcgacagcaacagacagagcgtgagcgagtgcaaggtgtggagaaaccccctgaacctgttcagaggcgccgagtacaacagatacacctgggtgaccggcagagagcccctgacctactacgacatgaacctgagcgcccaggaccaccagaccttcttcacctgcgacagcgaccacctgagacccgccgacgccatcatgcagaaggcctggagagagagaaacccccaggccagaatcagcgccgcccacgaggccctggagatcaacgagtgcgccaccgcctacatcctgctggccgaggaggaggccaccaccatcgccgaggccgagaagctgttcaagcaggccctgaaggccggcgacggctgctacagaagaagccagcagctgcagcaccacggcagccagtacgaggcccagcacagaagagacaccaacgtgctggtgtacatcaagagaagactggccatgtgcgccagaagactgggcagaaccagagaggccgtgaagatgatgagagacctgatgaaggagttccccctgctgagcatgttcaacatccacgagaacctgctggaggccctgctggagctgcaggcctacgccgacgtgcaggccgtgctggccaagtacgacgacatcagcctgcccaagagcgccaccatctgctacaccgccgccctgctgaaggccagagccgtgagcgacaagttcagccccgaggccgccagcagaagaggcctgagcaccgccgagatgaacgccgtggaggccatccacagagccgtggagttcaacccccacgtgcccaagtacctgctggagatgaagagcctgatcctgccccccgagcacatcctgaagagaggcgacagcgaggccatcgcctacgccttcttccacctggcccactggaagagagtggagggcgccctgaacctgctgcactgcacctgggagggcaccttcagaatgatcccctaccccctggagaagggccacctgttctacccctaccccatctgcaccgagaccgccgacagagagctgctgcccagcttccacgaggtgagcgtgtaccccaagaaggagctgcccttcttcatcctgttcaccgccggcctgtgcagcttcaccgccatgctggccctgctgacccaccagttccccgagctgatgggcgtgttcgccaaggccttcctgagcaccctgttcgcccccctgaacttcgtgatggagaaggtggagagcatcctgcccagcagcctgtggcaccagctgaccagaatctag

SEQ ID NO: 198325 - DNA, 1605 bp, Artificial Sequence
  derived and/or modified sequence
atgttcggcaccgagagcagcctgagcatgttcctgaacaccctgacccccaagttctacgtggccctgaccggcaccagcagcctgatcagcggcctgatcctgatcttcgagtggtggtacttcagaaagtacggcaccagcttcatcgagcaggtgagcgtgagccacctgagacccctgctgggcggcgtggacaacaacagcagcaacaacagcaacagcagcaacggcgacagcgacagcaacagacagagcgtgagcgagtgcaaggtgtggagaaaccccctgaacctgttcagaggcgccgagtacaacagatacacctgggtgaccggcagagagcccctgacctactacgacatgaacctgagcgcccaggaccaccagaccttcttcacctgcgacagcgaccacctgagacccgccgacgccatcatgcagaaggcctggagagagagaaacccccaggccagaatcagcgccgcccacgaggccctggagatcaacgagatcagaagcagagtggaggtgcccctgatcgccagcagcaccatctgggagatcaagctgctgcccaagtgcgccaccgcctacatcctgctggccgaggaggaggccaccaccatcgccgaggccgagaagctgttcaagcaggccctgaaggccggcgacggctgctacagaagaagccagcagctgcagcaccacggcagccagtacgaggcccagcacagaagagacaccaacgtgctggtgtacatcaagagaagactggccatgtgcgccagaagactgggcagaaccagagaggccgtgaagatgatgagagacctgatgaaggagttccccctgctgagcatgttcaacatccacgagaacctgctggaggccctgctggagctgcaggcctacgccgacgtgcaggccgtgctggccaagtacgacgacatcagcctgcccaagagcgccaccatctgctacaccgccgccctgctgaaggccagagccgtgagcgacaagttcagccccgaggccgccagcagaagaggcctgagcaccgccgagatgaacgccgtggaggccatccacagagccgtggagttcaacccccacgtgcccaagtacctgctggagatgaagagcctgatcctgccccccgagcacatcctgaagagaggcgacagcgaggccatcgcctacgccttcttccacctggcccactggaagagagtggagggcgccctgaacctgctgcactgcacctgggagggcaccttcagaatgatcccctaccccctggagaagggccacctgttctacccctaccccatctgcaccgagaccgccgacagagagctgctgcccagcttccacgaggtgagcgtgtaccccaagaaggagctgcccttcttcatcctgttcaccgccggcctgtgcagcttcaccgccatgctggccctgctgacccaccagttccccgagctgatgggcgtgttcgccaaggccttcctgagcaccctgttcgcccccctgaacttcgtgatggagaaggtggagagcatcctgcccagcagcctgtggcaccagctgaccagaatctag

SEQ ID NO: 198326 - DNA, 1665 bp, Artificial Sequence
  derived and/or modified sequence
atggccgaggccgccaccggcttcctggagcagctgaagagctgcatcgtgtggagctggacctacctgtggaccgtgtggttcttcatcgtgctgttcctggtgtacatcctgagagtgcccctgaagatcaacgacaacctgagcaccgtgagcatgttcctgaacaccctgacccccaagttctacgtggccctgaccggcaccagcagcctgatcagcggcctgatcctgatcttcgagtggtggtacttcagaaagtacggcaccagcttcatcgagcaggtgagcgtgagccacctgagacccctgctgggcggcgtggacaacaacagcagcaacaacagcaacagcagcaacggcgacagcgacagcaacagacagagcgtgagcgagtgcaaggtgtggagaaaccccctgaacctgttcagaggcgccgagtacaacagatacacctgggtgaccggcagagagcccctgacctactacgacatgaacctgagcgcccaggaccaccagaccttcttcacctgcgacagcgaccacctgagacccgccgacgccatcatgcagaaggcctggagagagagaaacccccaggccagaatcagcgccgcccacgaggccctggagatcaacgagtgcgccaccgcctacatcctgctggccgaggaggaggccaccaccatcgccgaggccgagaagctgttcaagcaggccctgaaggccggcgacggctgctacagaagaagccagcagctgcagcaccacggcagccagtacgaggcccagcacagaagagacaccaacgtgctggtgtacatcaagagaagactggccatgtgcgccagaagactgggcagaaccagagaggccgtgaagatgatgagagacctgatgaaggagttccccctgctgagcatgttcaacatccacgagaacctgctggaggccctgctggagctgcaggcctacgccgacgtgcaggccgtgctggccaagtacgacgacatcagcctgcccaagagcgccaccatctgctacaccgccgccctgctgaaggccagagccgtgagcgacaagttcagccccgaggccgccagcagaagaggcctgagcaccgccgagatgaacgccgtggaggccatccacagagccgtggagttcaacccccacgtgcccaagtacctgctggagatgaagagcctgatcctgccccccgagcacatcctgaagagaggcgacagcgaggccatcgcctacgccttcttccacctggcccactggaagagagtggagggcgccctgaacctgctgcactgcacctgggagggcaccttcagaatgatcccctaccccctggagaagggccacctgttctacccctaccccatctgcaccgagaccgccgacagagagctgctgcccagcttccacgaggtgagcgtgtaccccaagaaggagctgcccttcttcatcctgttcaccgccggcctgtgcagcttcaccgccatgctggccctgctgacccaccagttccccgagctgatgggcgtgttcgccaaggccttcctgagcaccctgttcgcccccctgaacttcgtgatggagaaggtggagagcatcctgcccagcagcctgtggcaccagctgaccagaatctag

SEQ ID NO: 198327 - DNA, 189 bp, Artificial Sequence
  derived and/or modified sequence
atgagcatgttcctgaacaccctgacccccaagttctacgtggccctgaccggcaccagcagcctgatcagcggcctgatcctgatcttcgagtggtggtacttcagaaagtacggcaccagcttcatcgagcaggtgagcgtgagccacctgagacccctgctgggcggcgtggacaacaacagctag

SEQ ID NO: 198328 - DNA, 264 bp, Artificial Sequence
  derived and/or modified sequence
atgagcatgttcctgaacaccctgacccccaagttctacgtggccctgaccggcaccagcagcctgatcagcggcctgatcctgatcttcgagtggtggtacttcagaaagtacggcaccagcttcatcgagcaggtgagcgtgagccacctgagacccctgctgggcggcgtggacaacaacagcagcaacaacagcaacagcagcaacggcgacagcgacagcaacagacagagcgtgagcgagtgcaaggtgtggagatag

SEQ ID NO: 198329 - DNA, 1500 bp, Artificial Sequence
  derived and/or modified sequence
atgagtatgtttcttaatacactgactcccaaattctacgtggctttaacgggaaccagttccctaatctcggggttaattcttattttcgaatggtggtacttcagaaaatatggaacatctttcattgagcaagtgtccgtgagccacctgcggccacttctgggcggagtggataataatagcagtaataatagtaattcatctaacggcgatagtgattccaatcgtcagtcagtctctgagtgtaaagtctggaggaatccacttaacctcttcagaggcgccgagtataaccgctacacctgggtgacgggacgcgagcctctgacctattatgatatgaacctatcagctcaggaccatcagacattcttcacgtgcgacagcgaccatctccgtcctgctgatgccataatgcagaaggcatggcgggaaaggaatcctcaggcccgaatctcagcagcacatgaggctctggagataaacgagtgtgctacagcatacatattgctggccgaggaagaggcaacgacgatagctgaagccgaaaaactgtttaagcaggcactgaaagcgggtgacggttgctaccgcagatcacaacagctgcaacaccacggatcacagtacgaagcacagcataggcgggacacgaacgttctcgtgtacataaaaaggaggctggccatgtgcgccaggagacttgggcggacaagggaggcagtcaagatgatgagggaccttatgaaggagtttccactactttccatgttcaatattcatgagaacctgctcgaggccttacttgagctgcaggcctatgccgacgtgcaggctgtgctggccaagtatgatgatatctctctacccaaaagtgcaaccatatgttacacggctgccttattgaaggctagggccgtcagcgataaattcagcccggaagctgcttcgaggcgcggcctttcaactgcagaaatgaacgccgttgaagccatccacagggccgttgagtttaatccccacgtgccaaagtatcttttggagatgaagagcctgatcttgccaccagaacacatattgaaacggggtgactctgaagctatcgcctacgcgttcttccacctcgctcattggaaaagagttgaaggcgccctgaaccttctgcactccttccgcatgattccctacccactcgaaaagggccatctattttacccttaccctatttgtacagaaacagctgaccgcgaattattacccagttttcacgaggtctccgtatatcctaagaaagagttgccttttttcatcctgtttaccgccgggctctgttctttcaccgccatgctcgctctattgacacaccagtttccggaactgatgggcgtgttcgctaaggccttcctcagcacactgttcgctcccctgaattttgtgatggagaaggtggagtctatcttgccatcttccctgtggcatcaactcaccagaatttag

SEQ ID NO: 198330 - DNA, 1536 bp, Artificial Sequence
  derived and/or modified sequence
atgttcggtacagaatcttcactgtccatgtttctgaacacgctgacaccaaagttctatgtggccctaacaggcacctcatcacttatatccggccttatcctgattttcgagtggtggtacttccgcaagtatggtactagcttcattgaacaggtgagcgtaagccaccttagacctctcctgggaggggtagacaataattcatcaaacaactcaaactcatcaaatggcgattctgactctaaccggcagagcgtgagtgaatgtaaagtatggaggaaccccctgaacttattccgcggggcagagtacaacagatatacatgggtaaccggaagagagcccctcacttactatgacatgaacttgtccgctcaggatcatcagacctttttcacctgcgactcagaccaccttaggcccgctgacgccatcatgcagaaggcctggcgggagaggaacccacaggctaggatttcggctgcgcacgaagcgctggagattaatgagtgtgcgaccgcctatattctactggccgaggaggaggctaccacaatcgccgaagccgagaagctgttcaaacaggccctgaaagccggtgatggatgctataggaggtctcagcagctgcagcaccacgggtcacaatatgaggcccaacatcggcgggacaccaacgtcctagtgtatatcaagaggaggttggctatgtgtgcccggaggttgggacgtacccgggaagccgtgaagatgatgagagatctgatgaaagagtttcctctgctatccatgtttaatattcacgagaatctgttggaggcactgttggagttgcaagcatacgcggacgtccaggccgtcctggccaagtatgacgacatatctctgcctaaaagcgctacaatctgctacacagctgcactcctaaaggcacgcgctgtgtcggacaagttcagccccgaggccgctagcagacgcggtttgtctacagccgagatgaatgcagttgaagccattcaccgagccgtagaatttaatccgcacgtccccaagtatcttctagagatgaagtctctcattctaccacccgagcatattcttaaaagaggggactctgaagccatagcatatgcattcttccatctggcccattggaaaagagttgagggagccttgaatcttctgcactgtacttgggaaggtaccttccggatgatcccttaccctctcgagaaaggccatctgttctatccataccccatctgcactgaaacggctgaccgcgaacttctgccctcttttcatgaggtcagtgtctacccaaagaaagagctgccatttttcatcctgtttactgccggtctgtgctccttcacagccatgctcgccctgctgactcaccaatttccagagctcatgggggtttttgccaaggccttcctaagtaccctgttcgctccattgaactttgtgatggagaaagttgagtccattctgccatcttccttgtggcaccaactgacacggatttag

SEQ ID NO: 198331 - DNA, 1605 bp, Artificial Sequence
  derived and/or modified sequence
atgttcggtaccgagagttctcttagcatgtttctgaacacactcacacccaagttctacgtcgcgctcactggtacctcttccctgataagcggcttaattctcatttttgagtggtggtacttcagaaagtatgggacttctttcattgagcaggtgtctgtcagtcacctccggccactgcttggtggggtggacaacaattcatctaacaacagcaactccagtaatggggacagcgactccaacaggcagtctgtcagtgagtgtaaagtgtggcgaaatcctcttaacctgttcagaggagcagagtacaatcggtatacctgggttactggacgggaacctctgacttactacgacatgaatctcagtgcccaagaccaccagactttctttacttgtgatagcgatcatctccgccccgccgacgctattatgcagaaggcttggcgtgagaggaatccccaggctcgaatatccgcagcccacgaagcactagagataaacgagatacgttctagagttgaagtgcctctgatcgcgtcctctactatttgggaaatcaaactattgccaaagtgcgcgacggcctatattctactcgccgaggaggaggcaacaactatcgccgaagccgaaaagctgtttaagcaggccttgaaggccggtgatgggtgttaccgcaggtctcagcagttgcagcaccatgggtcccagtatgaggcccagcacaggcgggacacaaacgtgctagtctatatcaagcggaggctggctatgtgtgccagaagactcggacgtacaagagaggctgtgaagatgatgagagacttgatgaaggagttcccactactgtcaatgtttaacatacacgaaaaccttctggaggccctgttggagctccaggcatatgctgacgtgcaggctgtgctggctaagtacgacgatatctcacttccaaagtcagcaacgatttgctacaccgcagccctgctgaaggcgagagccgtgtctgacaagttttcccctgaggcagcttctcgccgcggcctctccacagccgagatgaatgccgttgaggcgattcaccgtgcagtcgaattcaatccacatgtccctaagtatctactggaaatgaagtccctcattctgccacctgagcatattctgaaacgcggagattccgaagcaatagcctatgcatttttccatctcgcccactggaaaagggtggaaggcgcactgaatctgctgcattgtacttgggagggcacgttccgcatgattccctacccgctcgaaaaggggcacctgttctatccttatcctatatgcactgaaacagccgatagagagttgctgccgtcctttcatgaagtgagcgtatatcccaagaaagagctgccttttttcatcctcttcactgcagggctttgttccttcacagcaatgctggccttactgacgcatcagtttccggagctcatgggtgtgtttgccaaagccttcctcagcaccctctttgctcccctaaatttcgtgatggaaaaagtagaatcaattctgcccagttcattgtggcaccagctgaccaggatctag

SEQ ID NO: 198332 - DNA, 1665 bp, Artificial Sequence
  derived and/or modified sequence
atggcggaggctgccaccggcttcctggaacagcttaaatcatgcatcgtgtggtcttggacatatctttggaccgtctggttcttcatagtattgtttttggtgtacatactaagggttccgctgaaaattaacgacaatctatccactgtctcaatgtttctcaatacgttgacacctaagttttatgttgccctgacgggtacaagctcactaattagtggcctgattctgatcttcgagtggtggtatttcagaaaatatggaacttcctttatcgagcaggtgtcagtaagtcacctcagacccttactaggaggagtagataacaactcttccaataatagtaacagcagcaacggtgatagtgattcaaaccgacagtcagtcagcgagtgtaaggtgtggaggaaccctctaaacctattccgcggagcagaatataaccgctatacctgggttaccggacgtgagcctttaacttattacgatatgaacctctcagctcaggaccaccagacgttcttcacctgcgattccgatcatctaaggcctgcagatgctatcatgcaaaaggcctggcgggaacgtaacccccaggcccgtattagcgcagcacatgaagctctggagatcaatgagtgcgccactgcatatatcctgctggccgaagaggaagccaccacaattgctgaagccgaaaagctctttaagcaggcactgaaagctggcgacgggtgctatcgccgctcccagcagctgcaacaccatgggtcacaatacgaggcacaacatcgccgagacaccaatgttcttgtatacatcaagaggaggctcgctatgtgcgccaggaggctcggccgtaccagggaggccgtgaaaatgatgcgagatctcatgaaagagttcccattgcttagtatgtttaatatccatgagaacttactcgaggccctcctggagctccaggcttatgccgatgtacaggctgtgcttgcaaagtatgatgatatttcattacccaaatccgcgaccatttgttatacagctgccctgctgaaagctagagcggtatcagacaaattttcccccgaggcagcctcacgtcgtggcctcagcacagccgaaatgaacgccgtggaggccatccaccgcgcagtggagttcaatccacacgttcccaagtatctcctggaaatgaagtcactaatccttccccctgaacatatcctcaaaaggggcgacagcgaagcaattgcctatgcctttttccatctcgcccattggaaacgcgtcgagggtgcactgaacctgctgcattgcacgtgggaagggacttttcggatgattccttaccctcttgaaaagggccacttgttttatccctaccccatctgcactgagactgcagatcgggagctgttgcctagttttcacgaggtcagcgtctatccaaagaaagagttgccatttttcatactctttaccgctggactgtgctcttttacagccatgctagcattactaacacaccagttcccagagttgatgggtgtttttgcaaaagcttttctttcaacactgttcgcacccttaaacttcgtgatggaaaaggtggaatctatacttccttcctccctgtggcatcagctaaccagaatatag

SEQ ID NO: 198333 - DNA, 189 bp, Artificial Sequence
  derived and/or modified sequence
atgagtatgtttctgaacaccctgactccgaagttctatgtagcactgactggaacttcttccttgatttcaggcctgattttaatcttcgagtggtggtattttaggaagtatggcacctctttcattgaacaagtctcagtgtcccacctccggcctctcctgggcggtgttgacaataattcttag

SEQ ID NO: 198334 - DNA, 264 bp, Artificial Sequence
  derived and/or modified sequence
atgtccatgtttctcaacacactaactccaaaattttacgtcgccctgaccggaacgtcctccctgatttccggactgattttgatatttgaatggtggtactttcggaagtatggcacctcttttatagaacaggttagcgtgagccacctaagacccctactggggggtgtggacaataattccagcaataatagcaacagctcaaacggagatagtgacagcaaccgccagtctgtctccgagtgcaaagtctggaggtag

SEQ ID NO: 198335 - DNA, 1500 bp, Artificial Sequence
  derived and/or modified sequence
atgtccatgttcctgaacaccctgacccccaagttctacgtggccctgaccggcaccagcagcctcatcagcggcctcatcctgatctttgagtggtggtacttcagaaaatatggcaccagcttcatcgagcaggtgtctgtgagccacctgcggcccctgctgggcggcgtggacaacaacagcagcaacaacagcaacagcagcaatggagacagcgacagcaaccggcagagcgtgtctgagtgcaaggtgtggaggaaccccctgaacctcttcagaggagctgagtacaaccgctacacctgggtgacaggccgggagcccctgacctactatgacatgaacctgagcgcccaggaccaccagaccttcttcacctgtgacagcgaccacctgcggccagcagatgccatcatgcagaaggcctggagggagaggaacccccaggcccgcatctctgctgcccacgaggccctggagatcaatgaatgtgccacagcctacatcctgctggccgaggaggaggccaccaccatcgccgaggccgagaagctgttcaagcaggccctgaaggctggagatggctgctacagaagaagccagcagctgcagcaccacggcagccagtatgaggcccagcaccggcgggacaccaacgtgctggtgtacatcaagaggcggctggccatgtgtgcccggcggctgggccgcacccgggaggccgtgaagatgatgagggacctgatgaaggagttccccctgctgtccatgttcaacatccacgagaacctgctggaggccctgctggagctgcaggcctatgcagatgtgcaggccgtgctggccaagtatgatgacatcagcctgcccaagagcgccaccatctgctacacagctgccctgctgaaggcccgggctgtgtctgacaagttcagccctgaggccgccagcagaagaggcctgagcacagctgagatgaatgctgtggaggccatccacagagctgtggagttcaacccccacgtgcccaagtacctgctggagatgaagagcctcatcctgcccccagagcacatcctgaagagaggagacagcgaggccatcgcctatgccttcttccacctggcccactggaagagggtggagggcgccctgaacctgctgcacagcttcaggatgatcccctaccccctggagaagggccacctgttctacccctaccccatctgcacagaaacagctgaccgggagctgctgcccagcttccacgaggtgtctgtgtaccccaagaaggagctgcccttcttcatcctcttcaccgctggcctgtgcagcttcaccgccatgctggccctgctgacccaccagtttcctgagctgatgggcgtgtttgccaaggccttcctgagcaccctgtttgcccccctgaactttgtgatggagaaggtggagagcatcctgcccagcagcctgtggcaccagctgacccgcatctag

SEQ ID NO: 198336 - DNA, 1536 bp, Artificial Sequence
  derived and/or modified sequence
atgtttggaacagagagcagcctgtccatgttcctgaacaccctgacccccaagttctacgtggccctgaccggcaccagcagcctcatcagcggcctcatcctgatctttgagtggtggtacttcagaaaatatggcaccagcttcatcgagcaggtgtctgtgagccacctgcggcccctgctgggcggcgtggacaacaacagcagcaacaacagcaacagcagcaatggagacagcgacagcaaccggcagagcgtgtctgagtgcaaggtgtggaggaaccccctgaacctcttcagaggagctgagtacaaccgctacacctgggtgacaggccgggagcccctgacctactatgacatgaacctgagcgcccaggaccaccagaccttcttcacctgtgacagcgaccacctgcggccagcagatgccatcatgcagaaggcctggagggagaggaacccccaggcccgcatctctgctgcccacgaggccctggagatcaatgaatgtgccacagcctacatcctgctggccgaggaggaggccaccaccatcgccgaggccgagaagctgttcaagcaggccctgaaggctggagatggctgctaccgccgcagccagcagctgcagcaccacggcagccagtatgaggcccagcacagaagagacaccaacgtgctggtgtacatcaagaggcggctggccatgtgtgcccggcggctgggccgcacccgggaggccgtgaagatgatgagggacctgatgaaggagttccccctgctgtccatgttcaacatccacgagaacctgctggaggccctgctggagctgcaggcctatgcagatgtgcaggccgtgctggccaagtatgatgacatcagcctgcccaagagcgccaccatctgctacacagctgccctgctgaaggcccgggctgtgtctgacaagttcagccctgaggccgccagccggcggggcctgagcacagctgagatgaatgctgtggaggccatccacagagctgtggagttcaacccccacgtgcccaagtacctgctggagatgaagagcctcatcctgcccccagagcacatcctgaagagaggagacagcgaggccatcgcctatgccttcttccacctggcccactggaagagggtggagggcgccctgaacctgctgcactgcacctgggagggcaccttcaggatgatcccctaccccctggagaagggccacctgttctacccctaccccatctgcacagaaacagctgaccgggagctgctgcccagcttccacgaggtgtctgtgtaccccaagaaggagctgcccttcttcatcctcttcaccgctggcctgtgcagcttcaccgccatgctggccctgctgacccaccagtttcctgagctgatgggcgtgtttgccaaggccttcctgagcaccctgtttgcccccctgaactttgtgatggagaaggtggagagcatcctgcccagcagcctgtggcaccagctgacccgcatctag

SEQ ID NO: 198337 - DNA, 1605 bp, Artificial Sequence
  derived and/or modified sequence
atgtttggaacagagagcagcctgtccatgttcctgaacaccctgacccccaagttctacgtggccctgaccggcaccagcagcctcatcagcggcctcatcctgatctttgagtggtggtacttcagaaaatatggcaccagcttcatcgagcaggtgtctgtgagccacctgcggcccctgctgggcggcgtggacaacaacagcagcaacaacagcaacagcagcaatggagacagcgacagcaaccggcagagcgtgtctgagtgcaaggtgtggaggaaccccctgaacctcttcagaggagctgagtacaaccgctacacctgggtgacaggccgggagcccctgacctactatgacatgaacctgagcgcccaggaccaccagaccttcttcacctgtgacagcgaccacctgcggccagcagatgccatcatgcagaaggcctggagggagaggaacccccaggcccgcatctctgctgcccacgaggccctggagatcaatgagatccgcagccgggtggaggtgcccctgattgccagcagcaccatctgggagatcaagctgctgcccaagtgtgccacagcctacatcctgctggccgaggaggaggccaccaccatcgccgaggccgagaagctgttcaagcaggccctgaaggctggagatggctgctacagaagaagccagcagctgcagcaccacggcagccagtatgaggcccagcaccggcgggacaccaacgtgctggtgtacatcaagaggcggctggccatgtgtgcccggcggctgggccgcacccgggaggccgtgaagatgatgagggacctgatgaaggagttccccctgctgtccatgttcaacatccacgagaacctgctggaggccctgctggagctgcaggcctatgcagatgtgcaggccgtgctggccaagtatgatgacatcagcctgcccaagagcgccaccatctgctacacagctgccctgctgaaggcccgggctgtgtctgacaagttcagccctgaggccgccagcagaagaggcctgagcacagctgagatgaatgctgtggaggccatccacagagctgtggagttcaacccccacgtgcccaagtacctgctggagatgaagagcctcatcctgcccccagagcacatcctgaagagaggagacagcgaggccatcgcctatgccttcttccacctggcccactggaagagggtggagggcgccctgaacctgctgcactgcacctgggagggcaccttcaggatgatcccctaccccctggagaagggccacctgttctacccctaccccatctgcacagaaacagctgaccgggagctgctgcccagcttccacgaggtgtctgtgtaccccaagaaggagctgcccttcttcatcctcttcaccgctggcctgtgcagcttcaccgccatgctggccctgctgacccaccagtttcctgagctgatgggcgtgtttgccaaggccttcctgagcaccctgtttgcccccctgaactttgtgatggagaaggtggagagcatcctgcccagcagcctgtggcaccagctgacccgcatctag

SEQ ID NO: 198338 - DNA, 1665 bp, Artificial Sequence
  derived and/or modified sequence
atggccgaggccgccaccggcttcctggagcagctgaagagctgcatcgtgtggagctggacctacctgtggacagtgtggttcttcatcgtgctcttcctggtgtacatcctgcgggtgcccctgaagatcaatgacaacctgagcacagtgtccatgttcctgaacaccctgacccccaagttctacgtggccctgaccggcaccagcagcctcatcagcggcctcatcctgatctttgagtggtggtacttcagaaaatatggcaccagcttcatcgagcaggtgtctgtgagccacctgcggcccctgctgggcggcgtggacaacaacagcagcaacaacagcaacagcagcaatggagacagcgacagcaaccggcagagcgtgtctgagtgcaaggtgtggaggaaccccctgaacctcttcagaggagctgagtacaaccgctacacctgggtgacaggccgggagcccctgacctactatgacatgaacctgagcgcccaggaccaccagaccttcttcacctgtgacagcgaccacctgcggccagcagatgccatcatgcagaaggcctggagggagaggaacccccaggcccgcatctctgctgcccacgaggccctggagatcaatgaatgtgccacagcctacatcctgctggccgaggaggaggccaccaccatcgccgaggccgagaagctgttcaagcaggccctgaaggctggagatggctgctacagaagaagccagcagctgcagcaccacggcagccagtatgaggcccagcaccggcgggacaccaacgtgctggtgtacatcaagaggcggctggccatgtgtgcccggcggctgggccgcacccgggaggccgtgaagatgatgagggacctgatgaaggagttccccctgctgtccatgttcaacatccacgagaacctgctggaggccctgctggagctgcaggcctatgcagatgtgcaggccgtgctggccaagtatgatgacatcagcctgcccaagagcgccaccatctgctacacagctgccctgctgaaggcccgggctgtgtctgacaagttcagccctgaggccgccagcagaagaggcctgagcacagctgagatgaatgctgtggaggccatccacagagctgtggagttcaacccccacgtgcccaagtacctgctggagatgaagagcctcatcctgcccccagagcacatcctgaagagaggagacagcgaggccatcgcctatgccttcttccacctggcccactggaagagggtggagggcgccctgaacctgctgcactgcacctgggagggcaccttcaggatgatcccctaccccctggagaagggccacctgttctacccctaccccatctgcacagaaacagctgaccgggagctgctgcccagcttccacgaggtgtctgtgtaccccaagaaggagctgcccttcttcatcctcttcaccgctggcctgtgcagcttcaccgccatgctggccctgctgacccaccagtttcctgagctgatgggcgtgtttgccaaggccttcctgagcaccctgtttgcccccctgaactttgtgatggagaaggtggagagcatcctgcccagcagcctgtggcaccagctgacccgcatctag

SEQ ID NO: 198339 - DNA, 189 bp, Artificial Sequence
  derived and/or modified sequence
atgtccatgttcctgaacaccctgacccccaagttctacgtggccctgaccggcaccagcagcctcatcagcggcctcatcctgatctttgagtggtggtacttcagaaaatatggcaccagcttcatcgagcaggtgtctgtgagccacctgcggcccctgctgggcggcgtggacaacaacagctag

SEQ ID NO: 198340 - DNA, 264 bp, Artificial Sequence
  derived and/or modified sequence
atgtccatgttcctgaacaccctgacccccaagttctacgtggccctgaccggcaccagcagcctcatcagcggcctcatcctgatctttgagtggtggtacttcagaaaatatggcaccagcttcatcgagcaggtgtctgtgagccacctgcggcccctgctgggcggcgtggacaacaacagcagcaacaacagcaacagcagcaatggagacagcgacagcaaccggcagagcgtgtctgagtgcaaggtgtggaggtag

SEQ ID NO: 198341 - DNA, 1500 bp, Artificial Sequence
  derived and/or modified sequence
atgagcatgttcctgaacaccctgacccccaagttctacgtggccctcactgggacctcatctctgatctccggcctcatccttatctttgaatggtggtattttcgcaaatacggcactagctttattgagcaggtgtctgtctcacacctaagacctctactgggtggtgttgacaacaactcatccaacaatagcaacagctctaatggtgatagtgattctaacaggcaaagtgtgtctgaatgcaaggtgtggcgaaatcccctgaacttatttcgaggcgccgaatataaccgatacacgtgggttacaggccgggagcctctgacgtactacgacatgaatctcagcgcacaagatcatcaaaccttctttacatgcgactctgatcatctccgccctgcagatgcaattatgcagaaggcttggcgtgaacggaacccccaggctcggatctcagcggcccacgaagccctggagataaatgagtgtgcgactgcttacattcttctggccgaggaggaggcaacaaccatagcagaggcagaaaagctctttaaacaggccctcaaggctggagacgggtgctacaggcgctcccagcagcttcagcaccatggctcccaatacgaggcacagcatcgccgtgacacgaacgtactcgtgtacataaaaagacggctggccatgtgcgccagacgcttgggccgcactagggaggccgtgaagatgatgagagacctcatgaaagaattcccactcttgtccatgtttaacatccacgaaaacctgctagaggcactgctagaactccaggcctatgccgatgttcaagccgtgctggccaagtacgacgatatcagtctccctaagagcgccaccatctgttacacagcagccctgctcaaggcgagggctgtctcagataaatttagtcccgaagccgcctctcgacgcggcctcagcaccgccgaaatgaacgccgttgaggctatccatagagcggtggaattcaatccgcacgtgccaaaatacctgctggaaatgaaaagtctgatcctaccacctgaacatatacttaaacgcggggactctgaagctatcgcgtacgcgttttttcaccttgcccactggaaaagggtggagggcgccctgaacctgctccactctttcaggatgatcccgtacccccttgaaaagggacaccttttctacccctaccccatttgcaccgaaacggctgacagagagctgttaccttctttccacgaagtgagcgtttatcccaaaaaagaactgcctttctttattctgttcaccgcgggactgtgctcctttactgccatgctggctcttctgacacatcagtttccagaactcatgggggtctttgcaaaagcatttctaagtacgctgttcgcccctctgaacttcgtcatggaaaaggttgagtctattctaccgagctctctttggcatcagctgaccaggatctag

SEQ ID NO: 198342 - DNA, 1536 bp, Artificial Sequence
  derived and/or modified sequence
atgttcggcaccgagagcagcctgagcatgttcctgaacaccctgacaccaaagttctatgtggctctgaccgggacttcctccctgatcagcgggctcatcctaatctttgagtggtggtatttccgaaagtatggaacgtcgtttattgaacaagtctccgtctcccaccttaggccgctgctaggtggggtggacaataacagcagcaataattcgaatagcagcaacggcgactctgatagcaaccggcaatctgtctcagagtgtaaggtctggcggaatccgttgaatctctttagaggggctgagtataaccgctacacctgggtgaccggtcgcgagccccttacctattatgacatgaaccttagcgctcaggaccaccaaacattcttcacctgcgactcagaccacctccgccccgcggatgcaattatgcaaaaggcttggcgcgagcggaacccacaggcccggatctcagctgcccacgaggccctggagatcaatgaatgtgcaaccgcttatattctcttagcagaggaggaggctaccaccattgccgaggctgagaaactatttaaacaggcactcaaggctggggatggttgctatagacgcagtcagcagctccagcaccatggaagccagtatgaagcccaacacagacgggacacgaatgtactcgtatacatcaaacgccgtctggccatgtgtgctcggcggttgggtagaacacgcgaggcggtcaagatgatgagagacctcatgaaggaatttcctctcctgtcaatgtttaacattcatgagaacctgttggaggccttgctggagttgcaagcttacgccgacgtccaggcggtgctggctaaatatgacgatataagcctaccgaagtccgccacaatttgttacactgctgccctgctcaaggcccgtgccgtgagcgataagtttagtcccgaggctgcgtctaggagagggttgtcaacagcagaaatgaacgccgtagaagcaatccatcgcgctgtggaattcaatccccacgttcctaagtatcttctagaaatgaaatcactgattctccctccagagcacatcctgaagcgcggcgacagtgaggcgatcgcctacgcatttttccaccttgcacactggaagagggtggagggtgctctcaacctactgcattgcacttgggaaggtacctttaggatgattccttatcctctagagaaaggccacctgttctacccatatccaatttgcaccgaaaccgccgaccgggaacttctgccctcgttccacgaagtgagtgtgtatcctaagaaagaactgcctttttttatactgttcactgcagggctgtgcagttttaccgccatgctcgcgttactcactcatcaatttccagaattgatgggagtgtttgccaaggctttcctgtccactctgttcgcccccttaaactttgtgatggagaaggtagagtccatacttcccagcagtctgtggcaccagttgacgagaatttag

SEQ ID NO: 198343 - DNA, 1605 bp, Artificial Sequence
  derived and/or modified sequence
atgttcggcaccgagagcagcctgagcatgttcctgaacaccctgactcccaaattctacgttgccttgacaggcacctcttccttaatctccggtcttattcttatcttcgaatggtggtatttccgcaagtacggcacatctttcattgagcaggtgtcagtgtcacatttacgccctttgctggggggagtcgacaataactcctccaacaactcaaacagcagtaatggagattctgatagcaataggcagtctgtttcagagtgcaaggtctggagaaatccacttaacttgtttcggggcgccgaatataacaggtatacctgggtcaccggcagggaaccgttaacctactacgacatgaacctctctgcccaggaccatcagacatttttcacatgcgactcggaccacctgagaccagcagatgcaatcatgcagaaggcgtggagagagcgtaacccgcaggcccgcatatcagcggcccacgaggccttggaaattaacgagatccgcagccgagtggaggtacccctcatcgccagcagcacaatttgggagattaagcttctgcctaagtgcgcaaccgcctacatcttgttagccgaagaggaggcgactaccatagctgaagcagagaagctgtttaagcaagctctcaaagctggtgatggatgctacaggcgctcacagcaactgcaacatcacggctcccagtacgaggctcagcatagaagagacacgaacgtgctggtgtatatcaaacgccgcctagctatgtgtgcccggagactgggccgaactagggaagcagtgaagatgatgcgggatctcatgaaagagtttcctctgctgtctatgttcaacatccacgagaatctacttgaagccctgctagaacttcaggcttacgctgatgtgcaggcggtcctggctaaatacgacgacatatccctgccaaagagcgccacaatctgctacacggccgccctgctgaaagctcgcgcagtttccgacaagttctcacctgaagcggcctctcggagaggcctctctactgccgagatgaatgccgtggaggccattcaccgcgccgttgagtttaacccccacgttccgaaatacttgctggagatgaaatccctgatcctgcctccagagcatattctcaagagaggcgactccgaggcgatcgcatacgcattcttccacttagctcattggaagcgagttgaaggcgcccttaacttgctccactgtacctgggaagggacgtttaggatgatcccctaccccctggagaaagggcatttgttttacccgtatccaatctgcacagaaacagccgatagggaactattaccctcattccatgaagtctcagtatatcccaagaaagaactacctttcttcattttattcaccgccgggctgtgcagtttcacggcaatgctcgccctgttaacacatcagttccctgaactgatgggcgtgttcgctaaggcattcctgtcaaccctgttcgcaccactgaatttcgtgatggagaaagtagagagcatcctgccatccagtctgtggcaccagctgacgcgtatttag

SEQ ID NO: 198344 - DNA, 1665 bp, Artificial Sequence
  derived and/or modified sequence
atggccgaggccgccaccggcttcctggagcagctgaagagctgcatcgtctggagctggacttacctctggactgtttggttctttatcgtcttatttctcgtgtatatcctccgcgtgccactcaaaatcaacgacaacctaagcacagtttctatgtttctgaacactctgacacccaagttttacgtggcgctgacaggaaccagctcactcatctctggcctgatacttatctttgaatggtggtacttccggaaatatggcacaagtttcatcgagcaagtctccgtgtcgcatcttcgtcctttgctcggaggggtggacaacaactcttcaaacaactccaattcaagtaacggtgattccgactcaaatagacagtctgtgtcagaatgcaaggtctggcgtaaccccctgaacctttttaggggcgccgaatataatcgctacacatgggtcacaggacgagagccccttacatactacgatatgaacctgtctgcacaagaccaccaaacattctttacgtgtgatagcgatcaccttcggccagccgacgccattatgcaaaaggcctggagagagcggaatccccaggctcgcatctccgctgctcacgaggctctggagattaatgaatgcgctactgcctacatcctacttgccgaggaggaagccactacgatcgccgaggctgagaaactgttcaaacaggcgctgaaagctggcgatgggtgttaccgacgctcgcaacaactacagcatcatggttctcagtacgaggcacagcaccgtcgcgataccaatgtgctcgtttatataaagaggcgcctcgccatgtgtgcaagacgcttaggaagaacacgcgaggccgttaaaatgatgcgtgatctcatgaaagaatttcctcttcttagcatgtttaatatccatgagaatctgctcgaggcattgctagagctacaggcctacgctgatgttcaggcggttctcgccaaatacgacgacattagtttacctaagagcgcaacaatttgctacaccgccgccctgctaaaggcccgtgccgtgtcagataagttctctccagaagccgcatccaggaggggtttaagcaccgccgagatgaatgcagtcgaagcgatccaccgggctgtggagtttaacccacacgtccccaagtaccttctggagatgaagagcctcatcttgccccccgagcacatcttgaagaggggtgactccgaagcaatcgcctacgcttttttccatctagcccactggaagagagtggaaggcgccttgaatcttctgcactgtacctgggagggtactttccggatgatcccctacccgctcgaaaaagggcaccttttctatccctaccccatctgcactgaaacggctgatagagagcttcttccatccttccacgaagtttctgtgtatccaaaaaaggagctgcctttttttatcctttttaccgccggcctgtgttctttcacagccatgctggccttactgacacaccagtttccagagctgatgggggtgttcgctaaggctttcctcagtaccctgttcgcccctctgaattttgtcatggaaaaagttgaatcaatcctaccttctagcctctggcaccagctgacccggatctag

SEQ ID NO: 198345 - DNA, 189 bp, Artificial Sequence
  derived and/or modified sequence
atgagcatgttcctgaacaccctgacccccaagttctacgtggcccttacaggcacttcaagtttaatttccgggcttattcttatctttgagtggtggtactttagaaaatacggtactagttttatcgagcaggtgagcgtatcacacctcaggcccctcctggggggagtggacaataattcttag

SEQ ID NO: 198346 - DNA, 264 bp, Artificial Sequence
  derived and/or modified sequence
atgagcatgttcctgaacaccctgacccccaagttctacgtggccttgacaggtacctcatctctcatcagcggactgattctgatctttgaatggtggtattttcgaaagtatggcacaagttttatcgagcaggtcagtgtgtcccatcttcggcctctactgggaggggtagataataactctagtaataactccaattcatccaatggagattcagattccaaccggcagtccgtgtcggagtgtaaagtgtggcgatag

SEQ ID NO: 198347 - DNA, 1500 bp, Artificial Sequence
  derived and/or modified sequence
atgagtatgtttctgaatacgctaaccccaaaattctacgtagcgctcaccggaacctccagtctgatttcaggtcttatcctgattttcgaatggtggtatttcagaaagtatgggaccagctttattgagcaggtatccgtgagccacctccgacctttgctgggtggcgttgacaacaatagtagcaacaacagcaactcatcgaatggggattcggattcaaaccgccaatccgtgagcgaatgcaaagtgtggcgaaaccctctcaatctgttcaggggggcagaatataaccgttacacatgggtcaccggcagagagccactgacttattatgatatgaacttatccgcccaggatcaccagactttttttacctgcgactctgatcatctgcggcctgctgatgccattatgcagaaggcctggcgcgaaagaaatccacaggccagaatttctgcagcccacgaagcactggagataaacgagtgcgcaacggcttacatcttgttagccgaggaggaggcaactacgatagctgaggctgagaaactatttaaacaggcactcaaggcgggagatgggtgttatcggagaagccagcagttacagcaccacggctcacagtatgaggcacaacacaggcgggataccaatgtgttagtatatataaaacgtaggctagcaatgtgtgcacgaagattaggcaggaccagagaagcggtcaaaatgatgcgagatctgatgaaggagttccctctattgtctatgttcaacatccatgaaaaccttttggaggccctattggagcttcaagcatatgcagatgtacaggccgtactggccaagtacgacgatatctctctacccaagtcagccaccatttgctacactgcagcactccttaaagctcgggcagtttctgataaattcagcccagaggctgcttctagaaggggcctgtccacggccgaaatgaatgctgttgaagccattcacagggctgttgaattcaacccacacgttccaaaataccttctcgaaatgaagtctctgattctgccacctgagcacattttaaagcggggagactccgaggccatagcttatgccttttttcacttagcccactggaaaagggtggaaggcgcactgaatctcctgcattcatttcgcatgataccgtatcctctggaaaagggacacctcttctacccatacccaatctgtaccgagaccgctgatagggagctattaccaagctttcacgaagtgagtgtgtaccccaagaaagagctcccctttttcatcctgttcactgctggactttgtagttttaccgctatgctcgccctactaacacatcagttccccgagctcatgggcgtgttcgctaaagctttcttatctacactcttcgctcctctgaatttcgtcatggagaaggttgaaagtattcttccgtctagcctgtggcatcagctgactcgcatatag

SEQ ID NO: 198348 - DNA, 1536 bp, Artificial Sequence
  derived and/or modified sequence
atgttcggaactgaatcctccctctcaatgtttcttaataccctgacacctaagttctacgttgcactgacgggaacttctagtttaatctctggcctgattttgattttcgagtggtggtactttcggaaatatggcacttcatttatcgagcaggtgtctgtgtcccacctgagacccctgctcgggggagtggataacaactcatccaataattcgaattctagcaacggtgattctgactctaatcggcaatctgtgtccgagtgtaaggtttggaggaatcccctgaacctgttccggggagcagagtataatcggtacacctgggtgacaggtagagaaccattaacatactatgacatgaatctgagtgcgcaggatcatcagacttttttcacatgcgacagcgaccacttacgacccgcagacgccattatgcagaaagcctggcgagagaggaaccctcaggccagaatatctgcagcccatgaagccctggagattaacgagtgcgcgaccgcttacatactactcgctgaggaagaggcaacaaccatagccgaggccgaaaagttgttcaagcaagccctgaaagcaggagacggatgctatcgccgtagccaacaattacagcatcatgggtcacagtacgaggctcagcatcggagagatacgaacgttttggtgtatatcaagaggcgcctggccatgtgcgccaggcgcttgggacggacgagagaagccgtgaagatgatgcgagatttgatgaaagaatttcccctcctgagtatgttcaatattcacgaaaacctgttggaggcgttgctggaactccaagcctatgcggatgtgcaagccgtcctggctaagtatgatgatattagtcttcctaagtccgctaccatctgttacaccgctgccctcctaaaggccagggccgtgagtgacaagttttcgcctgaggccgcatctaggagaggtctgtccactgctgagatgaacgcagtcgaggccatccatcgtgctgtggagttcaatccacacgtacctaaatatctgctggagatgaagagtctcattttaccccctgagcatatccttaaacgtggggattcagaggccatcgcgtacgcatttttccacctggcgcactggaaacgagtagagggagccctgaacctccttcattgcacatgggagggcacgttcaggatgattccttaccctcttgaaaagggacatctgttctacccttatcctatctgtacagagacggccgaccgtgaactcctcccaagtttccacgaggtgtccgtttatccgaaaaaagaacttccctttttcatcttgtttacagctggtttgtgttcattcacagctatgctcgccctgctgacccaccagttcccagagcttatgggagtgtttgcaaaggcctttctgtccactttatttgctccactgaattttgtaatggagaaagtggagtctatcctgcccagcagtctgtggcaccagctgacacggatctag

SEQ ID NO: 198349 - DNA, 1605 bp, Artificial Sequence
  derived and/or modified sequence
atgttcggtaccgaaagcagcctaagtatgttcctaaacactctcacccccaaattctatgtagcactgactggcacgagttcacttatctctggtctgattctcatctttgaatggtggtacttccgaaagtatggtacatcttttattgagcaggtttccgtcagccacctgagacctctcctgggaggcgtggacaataattcttctaataattccaattcatcaaacggcgattctgactccaatcggcagtccgtgtctgaatgcaaggtttggaggaacccattgaatctctttcggggagcggagtataatcgttacacctgggtcactgggcgagaaccacttacttattatgatatgaatcttagcgcccaggatcatcagaccttcttcacatgcgatagcgatcatctgaggcccgctgatgcaatcatgcagaaggcctggcgagaacggaacccgcaggccagaattagtgcagcccacgaggctctcgaaatcaacgaaatccggtcccgtgtggaagtacccctgatcgccagcagcaccatttgggagatcaaactacttccaaaatgcgctacggcttatattctgttggctgaggaagaggcaaccacaattgctgaggccgaaaagctgttcaagcaagcgttgaaagctggcgatggatgttatagacggagtcaacaacttcagcaccatggttcgcagtacgaggcccagcacagaagagacacaaatgttctcgtatatatcaagaggcggctggccatgtgtgcacgcaggcttggacgaacccgggaggcagtgaaaatgatgcgggatctcatgaaggagttcccactgctgagcatgttcaacatccacgagaatctactggaggcccttctggaactgcaggcatacgccgatgtgcaggccgtgttagcgaagtacgatgacatcagtctgcctaagagcgctaccatttgctacacagctgcattactcaaggccagggccgtaagcgacaagttttccccagaggcagcgtccagacgcggactgagtactgccgagatgaacgctgtcgaggccatccatcgcgcagttgagtttaacccacacgtacccaagtatctgctcgagatgaaatccctcatcctgcctccagagcatattctcaagcgtggggattctgaagccattgcatatgcttttttccatctcgctcattggaaaagggttgagggggcactcaacctccttcactgtacctgggagggaaccttccgaatgataccctatccattggagaagggacatttgttctacccatatcctatctgcactgagaccgcagaccgggagctccttccctcttttcatgaagtctccgtctatcctaaaaaggagttgcctttcttcattttgttcaccgctggactgtgcagtttcactgcaatgctggcacttttgactcaccagttcccggaactaatgggggtcttcgctaaagcttttctctctacgctgttcgctcctctcaatttcgtgatggagaaggtagagtcgatactgccctctagcctctggcaccagcttactcgaatctag

SEQ ID NO: 198350 - DNA, 1665 bp, Artificial Sequence
  derived and/or modified sequence
atggctgaggctgctaccgggttcctggagcagttgaagagctgtatcgtctggtcgtggacatatttatggacggtctggttctttatcgtcctgtttctagtctacatcctacgcgtacctctgaagataaacgacaaccttagtaccgtttccatgtttctgaataccctgacccctaagttttacgtcgcattgaccggaacatcctctctcataagtggactgatacttatcttcgagtggtggtacttccgcaaatatggaacctcatttatcgaacaggtgtcagtcagtcacttgcgcccacttctgggcggagttgataataacagctcgaacaacagcaatagctctaacggtgattctgactcaaaccgacagtcagtatccgaatgtaaagtgtggcgcaaccccctgaacctgtttcgcggagctgagtataacaggtacacctgggttacaggccgagagccactgacatactatgacatgaatctgagcgcacaagatcaccagacattttttacttgtgattccgaccacctccgtccggcagacgccatcatgcagaaggcctggagagaaaggaacccacaggccagaattagtgctgcgcacgaggcactggaaatcaacgagtgtgcaaccgcctacattctcctggctgaggaggaagccaccactatcgcggaagctgagaagctctttaagcaggccctgaaagccggagatggctgttatagacgttcgcagcagcttcagcaccatggcagccagtacgaagcccagcatcggcgagacacaaatgtcctggtctacataaaaagacggttggctatgtgcgccaggagactaggacgcaccagagaggccgtgaaaatgatgcgcgacttaatgaaggagttccccctgttatcgatgtttaacatccacgaaaacctcctggaggccctacttgagctccaggcctatgcggacgtacaagcagttttggccaaatatgatgacatctccctgccaaaatctgctacaatttgctacactgcggctctattgaaggcccgtgcagttagtgataaattttcccccgaggcggctagccggaggggcctcagcacagcagagatgaatgccgttgaagcaatacatagggctgtcgagttcaatcctcacgtccctaagtatcttcttgaaatgaagagtctcattctaccacccgaacatatcctgaaacgaggggactctgaagccatagcctacgccttcttccatcttgcccactggaagcgcgtggaaggagcgttgaacctgttgcattgcacatgggagggaacctttcgcatgataccctaccctctggagaaggggcatttgttttacccctatcccatctgcactgagaccgccgatcgcgaactgctgccctcgttccatgaagtctcagtttatccgaaaaaggagctcccattctttatcctgttcacagccggattatgtagttttactgccatgctggcactccttacacatcagttccctgaactaatgggggtttttgctaaagctttcttatccactctcttcgcccctttgaactttgtgatggagaaggtggaaagtatcctgcccagttccttgtggcaccagttgacacgcatctag

SEQ ID NO: 198351 - DNA, 189 bp, Artificial Sequence
  derived and/or modified sequence
atgtctatgtttctgaacacacttacccccaaattctatgtcgcactgacaggaacgtcatctttaattagcggcctgattctgatttttgagtggtggtacttcaggaagtacggcacttcgtttattgagcaggtctcagtgtctcacctgaggccgcttctaggcggagtcgataacaattcatag

SEQ ID NO: 198352 - DNA, 264 bp, Artificial Sequence
  derived and/or modified sequence
atgagtatgtttctcaatactctcacgcctaaattctatgtcgctctcactggcacaagctcacttatcagtggtctgatactgatcttcgagtggtggtatttcaggaagtatggcaccagctttattgaacaggtctcagtttctcatctccggcctctcctcggaggcgtcgataacaattcaagcaacaactccaacagcagcaatggagatagtgatagtaatcgtcagtcagtgtctgaatgcaaggtttggaggtag

SEQ ID NO: 198353 - DNA, 2360 bp, Artificial Sequence
  derived and/or modified sequence
gtcttactgctacagcagggctggggattgcagtatccgctgttgctgctgctcccagtcctgcccctgctgctacctagtccagcctcaccgcatcccagaagaggcacgtcggccttcatttgcctagtggattttcaaaagcagctcttcggtttttggtgctgttaagagaccttgcatttcaatcacaccgggagaaaactgaagctcgtaacaggagaatctggcagctggacacagcttggactgcattgtctggcttcatgacccctgctgtgtagccggctcatctcttcactctcacatgtacactctcctcgcttttctttcttttttttttcccttttctttcttctaatttttaaaaagcagcctctggagccagccatgtttggcactgaatcttcatagaaaaatatttgttgaatgagtgaacgtgggatctctgttcattttggtatattactttgctttctgggctgagctcaggacagatgccaaagcctttccctctaatgacatcaaagccctacttctaaaaccagactggatgtgattcccttctacaaacagattcagtaaagaaatgtgaatactcccacaaaaagcccatgagcatgtttttgaacacattaacaccgaagttctacgtggccctaacaggcacttcctcactaatatcagggcttattttgatatttgaatggtggtattttcgcaaatacggaacttcattcattgaacaagtctcagtaagccacttgcgcccccttctgggaggggttgacaacaactcttccaacaattctaattccagtaacggggactcagattccaataggcaaagtgtctcagaatgcaaagtatggcgaaatccactaaatttatttaggggtgctgaatacaatcggtatacttgggtgacaggacgagagcctcttacttactatgacatgaatctctctgcccaagaccaccagacattctttacttgtgactcggaccatctgcgtcccgcagatgcaataatgcagaaagcctggagagagagaaacccccaagctaggatttctgcagctcatgaagccttggagataaatgagtgtgcaactgcttatattctcttggctgaagaggaagcaacaaccattgctgaagcagaaaaattatttaagcaggccctgaaggctggagatggctgttaccgacgctctcagcagctacaacatcatggatcccagtatgaagcccaacatagacgagacaccaatgtcttggtgtacatcaaaagaaggctagcaatgtgtgccagaagactcgggaggaccagggaagcagtgaaaatgatgagagatttaatgaaggagttcccccttctgagtatgttcaatatccatgaaaaccttttagaagcccttctggaactacaagcatatgctgatgttcaggcagtcttagcaaagtatgatgatataagcttaccaaagtcagcaacaatatgctacacagctgctttgctcaaagcaagagctgtctctgacaaattctctcctgaggctgcatctcggcgggggctgagcacagcagagatgaatgcagtagaggccattcatagagctgtggaattcaatcctcatgtgccaaaatacctactagaaatgaaaagcttaatcctacccccagaacatatcctgaagagaggagacagtgaagcaatagcatatgcattctttcatcttgcacactggaagagagtggaaggggctttgaatcttttgcattcttttcggatgatcccttatcccttggaaaaggggcacctattttatccttacccaatctgtacagaaacagcagaccgagagctgcttccatctttccatgaagtctcagtttacccaaagaaggagcttcccttctttattctctttactgctggattatgttccttcacagccatgctggccctcctgacacatcagttcccggaacttatgggggtcttcgcaaaagctttcctcagcactttgtttgcccccttaaactttgtcatggagaaagtggagagcatcctcccatccagtctgtggcaccagctaacacggatctgagagaagccctgtcctccactcacctcacccgccgctgccaccatctcctctgtgccaactccttgtggaccgcaagaaagcatgactttgaaaaagggaagccattccgagattttaaaatgttcatggactattccatattaaaagctgtttttgttgtacaaaattcactgatgttcagttctattttattttgccttcagaaaagaagaaagtcaaaaataaaacttttgtgtattacagcaa

SEQ ID NO: 198354 - DNA, 2113 bp, Artificial Sequence
  derived and/or modified sequence
cctgcccctgctgctacctagtccagcctcaccgcatcccagaagaggcacgtcggccttcatttgcctagtggattttcaaaagcagctcttcggtttttggtgctgttaagagaccttgcatttcaatcacaccgggagaaaactgaagctcgtaacaggagaatctggcagctggacacagcttggactgcattgtctggcttcatgacccctgctgtgtagccggctcatctcttcactctcacatgtacactctcctcgcttttctttcttttttttttcccttttctttcttctaatttttaaaaagcagcctctggagccagccatgtttggcactgaatcttcattgagcatgtttttgaacacattaacaccgaagttctacgtggccctaacaggcacttcctcactaatatcagggcttattttgatatttgaatggtggtattttcgcaaatacggaacttcattcattgaacaagtctcagtaagccacttgcgcccccttctgggaggggttgacaacaactcttccaacaattctaattccagtaacggggactcagattccaataggcaaagtgtctcagaatgcaaagtatggcgaaatccactaaatttatttaggggtgctgaatacaatcggtatacttgggtgacaggacgagagcctcttacttactatgacatgaatctctctgcccaagaccaccagacattctttacttgtgactcggaccatctgcgtcccgcagatgcaataatgcagaaagcctggagagagagaaacccccaagctaggatttctgcagctcatgaagccttggagataaatgagtgtgcaactgcttatattctcttggctgaagaggaagcaacaaccattgctgaagcagaaaaattatttaagcaggccctgaaggctggagatggctgttaccgacgctctcagcagctacaacatcatggatcccagtatgaagcccaacatagacgagacaccaatgtcttggtgtacatcaaaagaaggctagcaatgtgtgccagaagactcgggaggaccagggaagcagtgaaaatgatgagagatttaatgaaggagttcccccttctgagtatgttcaatatccatgaaaaccttttagaagcccttctggaactacaagcatatgctgatgttcaggcagtcttagcaaagtatgatgatataagcttaccaaagtcagcaacaatatgctacacagctgctttgctcaaagcaagagctgtctctgacaaattctctcctgaggctgcatctcggcgggggctgagcacagcagagatgaatgcagtagaggccattcatagagctgtggaattcaatcctcatgtgccaaaatacctactagaaatgaaaagcttaatcctacccccagaacatatcctgaagagaggagacagtgaagcaatagcatatgcattctttcatcttgcacactggaagagagtggaaggggctttgaatcttttgcattgtacgtgggaaggcacttttcggatgatcccttatcccttggaaaaggggcacctattttatccttacccaatctgtacagaaacagcagaccgagagctgcttccatctttccatgaagtctcagtttacccaaagaaggagcttcccttctttattctctttactgctggattatgttccttcacagccatgctggccctcctgacacatcagttcccggaacttatgggggtcttcgcaaaagctttcctcagcactttgtttgcccccttaaactttgtcatggagaaagtggagagcatcctcccatccagtctgtggcaccagctaacacggatctgagagaagccctgtcctccactcacctcacccgccgctgccaccatctcctctgtgccaactccttgtggaccgcaagaaagcatgactttgaaaaagggaagccattccgagattttaaaatgttcatggactattccatattaaaagctgtttttgttgtacaaaattcactgatgttcagttctattttattttgccttcagaaaagaagaaagtcaaaaataaaacttttgtgtattacagcaa

SEQ ID NO: 198355 - DNA, 2182 bp, Artificial Sequence
  derived and/or modified sequence
cctgcccctgctgctacctagtccagcctcaccgcatcccagaagaggcacgtcggccttcatttgcctagtggattttcaaaagcagctcttcggtttttggtgctgttaagagaccttgcatttcaatcacaccgggagaaaactgaagctcgtaacaggagaatctggcagctggacacagcttggactgcattgtctggcttcatgacccctgctgtgtagccggctcatctcttcactctcacatgtacactctcctcgcttttctttcttttttttttcccttttctttcttctaatttttaaaaagcagcctctggagccagccatgtttggcactgaatcttcattgagcatgtttttgaacacattaacaccgaagttctacgtggccctaacaggcacttcctcactaatatcagggcttattttgatatttgaatggtggtattttcgcaaatacggaacttcattcattgaacaagtctcagtaagccacttgcgcccccttctgggaggggttgacaacaactcttccaacaattctaattccagtaacggggactcagattccaataggcaaagtgtctcagaatgcaaagtatggcgaaatccactaaatttatttaggggtgctgaatacaatcggtatacttgggtgacaggacgagagcctcttacttactatgacatgaatctctctgcccaagaccaccagacattctttacttgtgactcggaccatctgcgtcccgcagatgcaataatgcagaaagcctggagagagagaaacccccaagctaggatttctgcagctcatgaagccttggagataaatgaaattaggtccagagttgaagttcccctaattgcttcctctaccatctgggagataaaattgttaccaaagtgtgcaactgcttatattctcttggctgaagaggaagcaacaaccattgctgaagcagaaaaattatttaagcaggccctgaaggctggagatggctgttaccgacgctctcagcagctacaacatcatggatcccagtatgaagcccaacatagacgagacaccaatgtcttggtgtacatcaaaagaaggctagcaatgtgtgccagaagactcgggaggaccagggaagcagtgaaaatgatgagagatttaatgaaggagttcccccttctgagtatgttcaatatccatgaaaaccttttagaagcccttctggaactacaagcatatgctgatgttcaggcagtcttagcaaagtatgatgatataagcttaccaaagtcagcaacaatatgctacacagctgctttgctcaaagcaagagctgtctctgacaaattctctcctgaggctgcatctcggcgggggctgagcacagcagagatgaatgcagtagaggccattcatagagctgtggaattcaatcctcatgtgccaaaatacctactagaaatgaaaagcttaatcctacccccagaacatatcctgaagagaggagacagtgaagcaatagcatatgcattctttcatcttgcacactggaagagagtggaaggggctttgaatcttttgcattgtacgtgggaaggcacttttcggatgatcccttatcccttggaaaaggggcacctattttatccttacccaatctgtacagaaacagcagaccgagagctgcttccatctttccatgaagtctcagtttacccaaagaaggagcttcccttctttattctctttactgctggattatgttccttcacagccatgctggccctcctgacacatcagttcccggaacttatgggggtcttcgcaaaagctttcctcagcactttgtttgcccccttaaactttgtcatggagaaagtggagagcatcctcccatccagtctgtggcaccagctaacacggatctgagagaagccctgtcctccactcacctcacccgccgctgccaccatctcctctgtgccaactccttgtggaccgcaagaaagcatgactttgaaaaagggaagccattccgagattttaaaatgttcatggactattccatattaaaagctgtttttgttgtacaaaattcactgatgttcagttctattttattttgccttcagaaaagaagaaagtcaaaaataaaacttttgtgtattacagcaa

SEQ ID NO: 198356 - DNA, 2110 bp, Artificial Sequence
  derived and/or modified sequence
ttagcaataaggctggagaaggaaaagccggcgcgcccgcggcccgcgcgatttcccgccgagcccgcgtccccggcggcgggcgggctccgggggcgcccgggccgcggcggcggcggcggcgcgagctgcgcctccgggccggtgaatcatcccggcagacaccaagagccgcggcagcagagaggagcgctgaaacatggctgaagcggccacgggctttctggagcagctcaagtcctgcatagtttggtcttggacgtatctgtggaccgtgtggttcttcatcgtgctattcctggtctacatcctgcgggtgcctttgaaaatcaacgacaacttgagcacagtgagcatgtttttgaacacattaacaccgaagttctacgtggccctaacaggcacttcctcactaatatcagggcttattttgatatttgaatggtggtattttcgcaaatacggaacttcattcattgaacaagtctcagtaagccacttgcgcccccttctgggaggggttgacaacaactcttccaacaattctaattccagtaacggggactcagattccaataggcaaagtgtctcagaatgcaaagtatggcgaaatccactaaatttatttaggggtgctgaatacaatcggtatacttgggtgacaggacgagagcctcttacttactatgacatgaatctctctgcccaagaccaccagacattctttacttgtgactcggaccatctgcgtcccgcagatgcaataatgcagaaagcctggagagagagaaacccccaagctaggatttctgcagctcatgaagccttggagataaatgagtgtgcaactgcttatattctcttggctgaagaggaagcaacaaccattgctgaagcagaaaaattatttaagcaggccctgaaggctggagatggctgttaccgacgctctcagcagctacaacatcatggatcccagtatgaagcccaacatagacgagacaccaatgtcttggtgtacatcaaaagaaggctagcaatgtgtgccagaagactcgggaggaccagggaagcagtgaaaatgatgagagatttaatgaaggagttcccccttctgagtatgttcaatatccatgaaaaccttttagaagcccttctggaactacaagcatatgctgatgttcaggcagtcttagcaaagtatgatgatataagcttaccaaagtcagcaacaatatgctacacagctgctttgctcaaagcaagagctgtctctgacaaattctctcctgaggctgcatctcggcgggggctgagcacagcagagatgaatgcagtagaggccattcatagagctgtggaattcaatcctcatgtgccaaaatacctactagaaatgaaaagcttaatcctacccccagaacatatcctgaagagaggagacagtgaagcaatagcatatgcattctttcatcttgcacactggaagagagtggaaggggctttgaatcttttgcattgtacgtgggaaggcacttttcggatgatcccttatcccttggaaaaggggcacctattttatccttacccaatctgtacagaaacagcagaccgagagctgcttccatctttccatgaagtctcagtttacccaaagaaggagcttcccttctttattctctttactgctggattatgttccttcacagccatgctggccctcctgacacatcagttcccggaacttatgggggtcttcgcaaaagctttcctcagcactttgtttgcccccttaaactttgtcatggagaaagtggagagcatcctcccatccagtctgtggcaccagctaacacggatctgagagaagccctgtcctccactcacctcacccgccgctgccaccatctcctctgtgccaactccttgtggaccgcaagaaagcatgactttgaaaaagggaagccattccgagattttaaaatgttcatggactattccatattaaaagctgtttttgttgtacaaaattcactgatgttcagttctattttattttgccttcagaaaagaagaaagtcaaaaataaaacttttgtgtattacagcaa

SEQ ID NO: 198357 - DNA, 577 bp, Artificial Sequence
  derived and/or modified sequence
acaccaagagccgcggcagcagagaggagcgctgaaacatggctgaagcggccacgggctttctggagcagctcaagtcctgcatagtttggtcttggacgtatctgtggaccgtgtggttcttcatcgtgctattcctggtctacatcctgcgggtgcctttgaaaatcaacgacaacttgagcacagagaaaaatatttgttgaatgagtgaacgtgggatctctgttcattttggtatattactttgctttctgggctgagctcaggacagatgccaaagcctttccctctaatgacatcaaagccctacttctaaaaccagactggatgtgattcccttctacaaacagattcagtaaagaaatgtgaatactcccacaaaaagcccatgagcatgtttttgaacacattaacaccgaagttctacgtggccctaacaggcacttcctcactaatatcagggcttattttgatatttgaatggtggtattttcgcaaatacggaacttcattcattgaacaagtctcagtaagccacttgcgcccccttctgggaggggttgacaacaactct

SEQ ID NO: 198358 - DNA, 542 bp, Artificial Sequence
  derived and/or modified sequence
cgtttcattttctggctgatagagttgtacttggaaaatactcagtttcctgcttactgcttcattatggattatacagagaaaaatatttgttgaatgagtgaacgtgggatctctgttcattttggtatattactttgctttctgggctgagctcaggacagatgccaaagcctttccctctaatgacatcaaagccctacttctaaaaccagactggatgtgattcccttctacaaacagattcagtaaagaaatgtgaatactcccacaaaaagcccatgagcatgtttttgaacacattaacaccgaagttctacgtggccctaacaggcacttcctcactaatatcagggcttattttgatatttgaatggtggtattttcgcaaatacggaacttcattcattgaacaagtctcagtaagccacttgcgcccccttctgggaggggttgacaacaactcttccaacaattctaattccagtaacggggactcagattccaataggcaaagtgtctcagaatgcaaagtatggcga

SEQ ID NO: 198359 - protein, 352 aa, Artificial Sequence
  derived and/or modified sequence
MKPALLEVMRMNRICRMVLATCLGSFILVIFYFQSMLHPVMRRNPFGVDICCRKGSRSPLQELYNPIQLELSNTAVLHQMRRDQVTDTCRANSATSRKRRVLTPNDLKHLVVDEDHELIYCYVPKVACTNWKRLMMVLTGRGKYSDPMEIPANEAHVSANLKTLNQYSIPEINHRLKSYMKFLFVREPFERLVSAYRNKFTQKYNISFHKRYGTKIIKRQRKNATQEALRKGDDVKFEEFVAYLIDPHTQREEPFNEHWQTVYSLCHPCHIHYDLVGKYETLEEDSNYVLQLAGVGSYLKFPTYAKSTRTTDEMTTEFFQNISSEHQTQLYEVYKLDFLMFNYSVPSYLKLE

SEQ ID NO: 198360 - DNA, 1059 bp, Artificial Sequence
  derived and/or modified sequence
atgaagcccgccctgctggaggtgatgagaatgaacagaatctgcagaatggtgctggccacctgcctgggcagcttcatcctggtgatcttctacttccagagcatgctgcaccccgtgatgagaagaaaccccttcggcgtggacatctgctgcagaaagggcagcagaagccccctgcaggagctgtacaaccccatccagctggagctgagcaacaccgccgtgctgcaccagatgagaagagaccaggtgaccgacacctgcagagccaacagcgccaccagcagaaagagaagagtgctgacccccaacgacctgaagcacctggtggtggacgaggaccacgagctgatctactgctacgtgcccaaggtggcctgcaccaactggaagagactgatgatggtgctgaccggcagaggcaagtacagcgaccccatggagatccccgccaacgaggcccacgtgagcgccaacctgaagaccctgaaccagtacagcatccccgagatcaaccacagactgaagagctacatgaagttcctgttcgtgagagagcccttcgagagactggtgagcgcctacagaaacaagttcacccagaagtacaacatcagcttccacaagagatacggcaccaagatcatcaagagacagagaaagaacgccacccaggaggccctgagaaagggcgacgacgtgaagttcgaggagttcgtggcctacctgatcgacccccacacccagagagaggagcccttcaacgagcactggcagaccgtgtacagcctgtgccacccctgccacatccactacgacctggtgggcaagtacgagaccctggaggaggacagcaactacgtgctgcagctggccggcgtgggcagctacctgaagttccccacctacgccaagagcaccagaaccaccgacgagatgaccaccgagttcttccagaacatcagcagcgagcaccagacccagctgtacgaggtgtacaagctggacttcctgatgttcaactacagcgtgcccagctacctgaagctggagtag

SEQ ID NO: 198361 - DNA, 1059 bp, Artificial Sequence
  derived and/or modified sequence
atgaaaccagctcttcttgaagtgatgcggatgaatcgaatttgtcgcatggtgcttgctacttgcctaggaagcttcattctcgtgatcttttactttcagtctatgctacaccccgtcatgcggcgcaacccctttggggtggacatctgctgcaggaaaggttctcggtcccctcttcaggagctgtacaaccccatacagctcgagttaagcaacaccgccgtgctgcaccagatgaggcgggaccaggtgactgacacttgccgtgcaaattccgcaaccagcaggaaacggcgagtccttacccctaatgaccttaaacacttagtggtcgacgaggaccatgagcttatatattgctatgttcctaaagtcgcttgcaccaattggaaacgccttatgatggtgcttactggacgcggcaagtactctgaccccatggagattcccgcaaatgaggctcacgtgtcggctaacttaaagacactgaatcagtacagcatcccagagattaaccacagactgaagagttacatgaaattcctgttcgtacgcgagccattcgaacgcctggtatctgcctacaggaacaagttcacccaaaagtacaatatctcctttcacaaaagatacggaactaaaatcattaagcgccagcgcaaaaatgctactcaggaagctttacgaaagggcgacgacgttaagtttgaagagttcgtggcatacctcattgatccgcacacgcaacgggaggaacccttcaacgaacattggcagactgtatattccctgtgtcatccgtgccatatccattatgatttggtgggcaaatacgagacactggaggaagactctaactatgttctccagttggcgggggtaggatcttacctgaagtttcccacgtatgcaaaatccacgcgcacgacggatgaaatgaccaccgagttctttcagaacatctccagcgaacatcagacacagctctacgaagtgtacaaactcgacttccttatgttcaactactctgtacccagttacctgaaattagagtag

SEQ ID NO: 198362 - DNA, 1059 bp, Artificial Sequence
  derived and/or modified sequence
atgaagccagccctgctggaggtgatgaggatgaaccgcatctgcaggatggtgctggccacctgcctgggcagcttcatcctggtgatcttctacttccagagcatgctgcaccctgtgatgagaagaaaccccttcggcgtggacatctgctgcaggaagggcagccgcagccccctgcaggagctgtacaaccccatccagctggagctgagcaacacagctgtgctgcaccagatgagaagagaccaggtgacagacacctgccgggccaacagcgccaccagcaggaagagaagagtgctgaccccaaatgacctgaagcacctggtggtggatgaggaccacgagctgatctactgctacgtgcccaaggtggcctgcaccaactggaagaggctgatgatggtgctgaccggccggggcaagtacagcgaccccatggagatcccagccaatgaggcccacgtgtctgccaacctgaagaccctgaaccagtacagcatccctgagatcaaccaccggctgaagagctacatgaagttcctgtttgtgcgggagccctttgagcggctggtgtctgcctacagaaacaagttcacccagaagtacaacatctccttccacaagagatatggcaccaagatcatcaagaggcagaggaagaatgccacccaggaggccctgaggaaaggagatgatgtgaagtttgaggagtttgtggcctacctgattgacccccacacccagcgggaggagcccttcaatgagcactggcagacagtgtacagcctgtgccacccctgccacatccactatgacctggtgggcaagtatgagaccctggaggaggacagcaactacgtgctgcagctggccggcgtgggcagctacctgaagttccccacctacgccaagagcaccaggaccacagatgagatgaccacagagttcttccagaacatcagcagcgagcaccagacccagctgtatgaggtgtacaagctggacttcctgatgttcaactacagcgtgcccagctacctgaagctggagtag

SEQ ID NO: 198363 - DNA, 1059 bp, Artificial Sequence
  derived and/or modified sequence
atgaagcccgccctgctggaggtgatgcggatgaaccggatctgccggatggttctggccacatgtcttggatctttcattctggtgattttctactttcagtctatgcttcaccccgtgatgcgaagaaaccctttcggggtggatatctgctgtcgtaaagggagcaggtccccactgcaggagctctacaacccgattcagcttgagctctccaacacagctgtgctacatcagatgcggagggatcaagtgacagacacctgtagggctaactccgctacctcgaggaagagaagagtgctgactccgaatgacctcaagcacctagtggtggatgaggatcacgagctcatttactgttacgttccgaaagtcgcttgtactaattggaagcgcctgatgatggtgctgactgggagaggtaaatacagcgatcccatggagattccggccaacgaagcccacgtcagcgctaatctgaagaccctaaatcaatatagtattcccgagattaaccatcgtctgaagagttatatgaagttcttgtttgtcagggagccttttgagcggctggtcagcgcctaccgtaataagttcacgcagaagtataatatctcatttcataagagatacggcacaaagatcataaagcggcagcgaaagaatgccacgcaggaggccctccgaaaaggggatgatgttaagttcgaggagtttgttgcctatctcatcgacccacacacacagcgtgaggagcctttcaacgagcactggcagacggtttacagcctgtgccacccatgccacatccactatgatttagttggtaaatatgaaaccctggaggaggattccaattacgtcctgcagctggcaggggtcggctcctacctgaaatttcctacttacgccaaaagcacccggacgacggacgagatgacaacagaattttttcagaatatttcgtctgagcatcagacccagttgtatgaagtgtacaagctcgatttcctgatgttcaactacagtgtgcctagttatttgaaactcgaatag

SEQ ID NO: 198364 - DNA, 1059 bp, Artificial Sequence
  derived and/or modified sequence
atgaagccagctcttttagaagtgatgcgcatgaatcgcatatgtcggatggtgcttgccacttgcttgggttcttttattttggtgatcttctacttccagagcatgttgcaccccgtgatgagaaggaacccattcggtgttgacatttgttgtcgcaaaggaagtcgtagtcctttacaggagctgtacaatccaattcaacttgaactttctaatactgcggttctccatcagatgcgccgtgatcaagtgacggatacctgtcgtgccaactctgccacctctagaaagagacgcgtgttgacccctaacgatctgaaacacctggtcgtggatgaggatcacgagctcatttattgttatgttcctaaggtagcttgtactaactggaagcggctcatgatggtactaacgggcagaggcaagtactcggatcctatggagatccctgcaaacgaggcacacgtgtcggcgaatctcaaaactcttaatcaatattccatacctgagatcaatcaccggctcaaatcttatatgaaatttcttttcgtgagagagccatttgaaagattggtttccgcatacaggaacaaattcacccagaaatataacatctctttccacaaacggtatggtaccaaaatcattaagaggcaaaggaagaatgcaacccaggaggcattaaggaaaggtgatgacgtgaagtttgaggaattcgtcgcttatttgattgaccctcacactcagcgcgaggagccttttaatgaacactggcagaccgtgtactcactgtgccatccctgtcacatccactatgacttggtaggaaaatatgagactttggaggaggactccaactatgtcctgcaactggctggagtggggagctatctgaaatttcctacttatgcgaaaagcacccggacgacagacgagatgacaacggagttttttcagaatattagttcagagcatcagactcagctgtatgaggtttacaagctcgacttcctgatgtttaactactcagtgcccagttatctaaagctcgaatag

SEQ ID NO: 198365 - DNA, 5709 bp, Artificial Sequence
  derived and/or modified sequence
atatagatcgttggagcgcaatgaagtagcctttggagagaagggagagggcccgtcggacagccacagcggccagcgcagcggcagcggcggcggcaccaccatcaccgctcgcaccccagccgcccggcccgcgaccaggcagcggcggccgccggcgggatcggaggaggcggcggagcggcgaggaggaggagcaggagcgcgcagccagcgggtccacgcatctcagcacttccagaccaactccggcaccttccacacccctgcccgggctgggggctccgagagcggccgcgaagcgactccgatcctccctctgagccttgctcagctctgccccgcgcctcccgggctccggtccgcgcggcggggtccctgctcctgcgccccgggcgcgcttcccggacaccccggtccccgcagccaggacaaagccatgaagccagcgctgctggaagtgatgaggatgaacagaatctgccggatggtgctggccacttgcttgggatcctttatcctggtcatcttctatttccaaagtatgttgcacccagtcatgcggaggaatccctttggtgtggacatctgctgccggaaggggtcccgaagccccctgcaggaactctacaacccaatccagctggagctctcaaacactgctgtcctgcaccagatgcggcgggaccaggtgacagacacgtgccgagccaacagcgccacaagccgtaagcggagggtgctgacccccaacgacctgaagcacttggtggtggatgaggaccacgagctcatctactgctacgtgcccaaggtggcctgcaccaactggaagcggctcatgatggtcctgaccgggcgggggaagtacagcgaccccatggagatcccggccaacgaggcacacgtctccgccaacctgaagaccctgaaccagtacagcatcccagaaatcaaccaccgcttgaaaagctacatgaagttcctgtttgtccgggagcccttcgagaggctagtgtccgcctaccgcaacaagttcacccagaagtacaacatctccttccacaagcggtacggcaccaagatcatcaaacgccagcggaagaacgccacccaggaggccctgcgcaaaggggacgatgtcaaattcgaggagtttgtggcctatctcatcgacccacacacccagcgggaggagcctttcaacgaacactggcaaaccgtctactcactctgccatccctgccacatccactatgacctcgtgggcaagtacgagacactggaagaggattctaattacgtcctgcagctggcaggagtgggcagctacctgaagttccccacctatgcaaagtctacgagaactactgatgaaatgaccacagaattcttccagaacatcagctcagagcaccaaacgcagctgtacgaagtctacaaactcgattttttaatgttcaattactcagtgccaagctacctgaaattggaataaagggggtggggagagggagagaatcatgctttttaatttaagatttttatttgtcaaaagaattatatggatattgggttattttgtaaattaatatttctttggggatgatgctgcgagcagcatagtgagaattatttaaaatccttcgtagggaaggacagctgtctttgcaggggaaataggatgggtcgtccttgtctgtagaagtgaatactgcaacactgtctcaaaggtttcttgtgttctggtgaattccatgaattgtgcattccataaattctaattaatattatttatagttatttaaacatggtctcattatttctttttgtggcagcaaaattctaacatctttccagaagaaatctatgattcctgctttgcttgctacagctcatttgggggcatgaatgttctccttactaacctctcatggagtcatgtgataacagccattgtcatgtgtatggatgccaccattcttgaatttctgctagaaataagtaggttgctattgcacttagagtcatctttgcaagggactcattccaaaccaattccaatcgacctgaaagtcccttgcactaaagaaatgtgatttttttttaacccaaggagaaagttggttgtaacaatttttcaccagaattagcaatctgatagaataggcttttttaacaggaattttaaactggcggtgccagttgcagtgaaggtgaagtggctattgctttatattcgacaaatatttattgagcatctactatatactaggccctgaagatagagcgttgaacaaacccaatagtcttggccctcaaaaagctttatgtgacatagagcatccagctcgacaattagcaaacccctgatattattcatggacttgacatgaggtttggactattcatgagcaacagcagaaggtccatgacccctacaaatttacatttttctatggcccatatttgaaaacctcacattcggagcaggccactttatattcgtgagtgatcccaagctcactgaccaacagaaaagatgctaaaaaaatgtgtcctatcatgtgcctgctccaactgatgggtaatgtctgcctttaagccccagaatggattctccaggcacagtgtggaagagtgctgtggttgattagcaatgtctgccttgggtgaggaaaggggaacactcctcaagtgcctcctactgtcatctccattcagcctagcaccacatccccatgtagaagtgttgtcttctactgcttgccacgtacaagtgtgaaatgccaaggtgagactcgtacacttggggatttgcaatggtttttacccctcatgaaggtcagaggtggactatttgtacacatacacacatgcacaccctctcacgtcctccagaggctgaaagactatcagcatcttggtaactgccatgcatgagcagcaaggacagccttccataatccatgccccatttcctctggaagcctggaaacttttcatttcctgttccttgctaattaacatctaaacatgcttctcatttccagccattgctgatgcttctcagttgaagtttgagccacatccctcttacagctagtgaatgagttggtagcagctactgtatataataataataatagttttaataataggggagggtgggatggggtgtgggtaagttttgccttttgttttgtttttgatgccgtatatagtgaaggggtgaggatattctaaacaaacaaaaattgaataatttattcacagaaactattaagattgtattgtaaagctcacagcaagctcagtgggcagcagctgcaacatctcaccggggaaattattttatttaacgtgagtgagatgtgggccggagaaggtagctgaagctatttataaaacgttgtgtaccttcttccgagctctctcccctttgtgaagggcgcagcaactatacccttgatggatggagatttacgcaatgtgttttactgggtagagtgacagaccttggctgtccctggaattgagaatctggaccttatttccaggcagagaacactgtcctcagaaatgggacttctgataatgaaacaggttgtccaacattttctaatacgcattctacagaacacaggttccaggaggcatcaggttggtgtgatgcagactaagggttttgtggtcaaatatccttaagaaacaaagttaagtcagtttcctttctgcaaggacttttcagccttcaatgtgtgctgtgcatggtgaatccccaaaaataatccttgagtctgtagcatttcctgaacttacatgaccaggatactctattttgcagatcaccccacagagctagggttccaccgagtatactttgcttaggttgacttagcatatctgaggtcttcaaggataaaaactgccaccccaacacccttccattaaaaaaaaaatacaaaatagcaccacagtctccatctggtttatagcaacagaggtactttatttaatgaagcaatggttctaatcctggatactgccacggactacaattctatccctcccagagggagtggaggaagtcttgggtggtgtggacagaaggaagagaggagagggtgagtggggtatagggcccagggtggctccctactcctcaggctcaaaaggatgctcagtgggaacagatgatctcttgatgagtgcttcttcagtttcatagtttggaatcgttcactgtgtgctttttggggggttttcaatggaaattcacgttgctttgcatttctgtgtccgtctttggtcagttgtgcaagcctgctcactgtcatgtgaagatggcctttcatctggcttctctctcttaagtgagaaagattgtccttcaggggacatgacatcaataggtttctggaatgagggactctttctccccgtgttttgctttgtgttcacattttcttttctaatggcattgaaactttaaaaaaaatggattcaactgtttttgcagaatgtagaaagtattctgtgtccttggttaaagaaatccacttgtgaagtgtgcctggaaaatgaaagtttgtgttttttaaagaggaatatttgaaactgctttctatgcatgcttagctggagaaaagtacaggcaggcgtcccatctcccagccacttctcaaaggtgctgctgtgttttaaagaccaggtacagccagggcagtatttgcaaggacattcctgcttactttatccctttggttggaaagctctagatgattcccgcagctcctccagaccccgcctccctgccctccccagctggtctgggaagaggtggtctgctgacctgtggtatctcagaggggacgttcctcctcctccctgtgcaccaggtgggctgcaccctcctgcctattcaggatgtggatgccacaggagagcagcaggcagtggaaacttcagttgcactggttctcctggtggcaaaggcatgaagcacaggggtcgattaatccaggctactagaaagctccagagcaaagtgtgcgggtcccacaaatgcttggctggtggggtctggatcagtgctgagatagagttggcagaagaagcagaggcactctgcttgctttcctagccagtcctcccctacacacacacacacacacacacacacacacacacacaatctcagctgcgccattctgtgcaatcccagtgaccaaatcccttccttgcccacctctatgtcagcaggactgaccacatcactcccccgagttcccaccaccagcatttcctccaacctttttccatcacaaccagttagaaccctacaggcaacaaggccttctagaatccgcttaacccttggctgataacaggcaaatttcagtctgctacactttgttaggtccagaaggagctgcccatactactttcttatgagcatgctcagtatggcatatggacatgtaatgtcacatctttgtggagtgtgattttcttttttcacatatttgtatgcagtagagagcctgttgtagaaaacgctccctgtatcttgctgtactgttaaagaaagctgaattccacattgccaacaaaagcgtgaaaatgttcatgaaccttcctccaggaaaagccattcaagcctgattatttttctaagtaacttcaattaaattgaagaaaaaagaa

SEQ ID NO: 198366 - protein, 600 aa, Artificial Sequence
  derived and/or modified sequence
MRSCLWRCRHLSQGVQWSLLLAVLVFFLFALPSFIKEPQTKPSRHQRTENIKERSLQSLAKPKSQAPTRARRTTIYAEPVPENNALNTQTQPKAHTTGDRGKEANQAPPEEQDKVPHTAQRAAWKSPEKEKTMVNTLSPRGQDAGMASGRTEAQSWKSQDTKTTQGNGGQTRKLTASRTVSEKHQGKAATTAKTLIPKSQHRMLAPTGAVSTRTRQKGVTTAVIPPKEKKPQATPPPAPFQSPTTQRNQRLKAANFKSEPRWDFEEKYSFEIGGLQTTCPDSVKIKASKSLWLQKLFLPNLTLFLDSRHFNQSEWDRLEHFAPPFGFMELNYSLVQKVVTRFPPVPQQQLLLASLPAGSLRCITCAVVGNGGILNNSHMGQEIDSHDYVFRLSGALIKGYEQDVGTRTSFYGFTAFSLTQSLLILGNRGFKNVPLGKDVRYLHFLEGTRDYEWLEALLMNQTVMSKNLFWFRHRPQEAFREALHMDRYLLLHPDFLRYMKNRFLRSKTLDGAHWRIYRPTTGALLLLTALQLCDQVSAYGFITEGHERFSDHYYDTSWKRLIFYINHDFKLEREVWKRLHDEGIIRLYQRPGPGTAKAKN

SEQ ID NO: 198367 - DNA, 1803 bp, Artificial Sequence
  derived and/or modified sequence
atgagaagctgcctgtggagatgcagacacctgagccagggcgtgcagtggagcctgctgctggccgtgctggtgttcttcctgttcgccctgcccagcttcatcaaggagccccagaccaagcccagcagacaccagagaaccgagaacatcaaggagagaagcctgcagagcctggccaagcccaagagccaggcccccaccagagccagaagaaccaccatctacgccgagcccgtgcccgagaacaacgccctgaacacccagacccagcccaaggcccacaccaccggcgacagaggcaaggaggccaaccaggccccccccgaggagcaggacaaggtgccccacaccgcccagagagccgcctggaagagccccgagaaggagaagaccatggtgaacaccctgagccccagaggccaggacgccggcatggccagcggcagaaccgaggcccagagctggaagagccaggacaccaagaccacccagggcaacggcggccagaccagaaagctgaccgccagcagaaccgtgagcgagaagcaccagggcaaggccgccaccaccgccaagaccctgatccccaagagccagcacagaatgctggcccccaccggcgccgtgagcaccagaaccagacagaagggcgtgaccaccgccgtgatcccccccaaggagaagaagccccaggccacccccccccccgcccccttccagagccccaccacccagagaaaccagagactgaaggccgccaacttcaagagcgagcccagatgggacttcgaggagaagtacagcttcgagatcggcggcctgcagaccacctgccccgacagcgtgaagatcaaggccagcaagagcctgtggctgcagaagctgttcctgcccaacctgaccctgttcctggacagcagacacttcaaccagagcgagtgggacagactggagcacttcgccccccccttcggcttcatggagctgaactacagcctggtgcagaaggtggtgaccagattcccccccgtgccccagcagcagctgctgctggccagcctgcccgccggcagcctgagatgcatcacctgcgccgtggtgggcaacggcggcatcctgaacaacagccacatgggccaggagatcgacagccacgactacgtgttcagactgagcggcgccctgatcaagggctacgagcaggacgtgggcaccagaaccagcttctacggcttcaccgccttcagcctgacccagagcctgctgatcctgggcaacagaggcttcaagaacgtgcccctgggcaaggacgtgagatacctgcacttcctggagggcaccagagactacgagtggctggaggccctgctgatgaaccagaccgtgatgagcaagaacctgttctggttcagacacagaccccaggaggccttcagagaggccctgcacatggacagatacctgctgctgcaccccgacttcctgagatacatgaagaacagattcctgagaagcaagaccctggacggcgcccactggagaatctacagacccaccaccggcgccctgctgctgctgaccgccctgcagctgtgcgaccaggtgagcgcctacggcttcatcaccgagggccacgagagattcagcgaccactactacgacaccagctggaagagactgatcttctacatcaaccacgacttcaagctggagagagaggtgtggaagagactgcacgacgagggcatcatcagactgtaccagagacccggccccggcaccgccaaggccaagaactag

SEQ ID NO: 198368 - DNA, 1803 bp, Artificial Sequence
  derived and/or modified sequence
atgcgcagctgtctgtggcgatgtcggcacctgtcccagggggtgcaatggagccttttgctcgcagtgctcgtgtttttccttttcgcccttccgtctttcattaaggaaccccagacaaagcctagcagacatcagcggacagaaaacataaaggagagaagtctacaatcacttgctaagcctaaatcccaggccccaacccgcgcccgccgcacgacaatctacgcggaaccagttccagagaacaacgccctgaacacccagactcagcctaaggcgcacaccaccggggatcgcggcaaagaggctaatcaagccccccctgaggaacaggataaagtgccccacacagcacagagggccgcatggaagtcgccagagaaagagaagaccatggtgaacaccttgtcaccacggggccaggacgccggtatggcttcaggcaggacggaagcccagagctggaaatctcaggatacgaagacaacacaaggcaacggcggtcagaccaggaagctcactgccagccgcacagtcagcgagaaacatcaaggcaaggccgccaccaccgccaaaacccttatacccaaatctcagcatcggatgctcgcgcctaccggcgctgtctcaacacgaacgaggcagaagggggtaactactgccgtgatccctcctaaagaaaaaaaacctcaagctactccaccccccgcaccatttcaatccccaactactcagaggaatcaacgtcttaaggcagcaaactttaaatcagaacccagatgggatttcgaggaaaagtactccttcgaaatcggcggccttcaaaccacgtgtccagacagtgttaaaataaaagccagtaagtcattatggctacaaaagttattcctgccaaatctgaccctctttcttgattctcggcatttcaatcagagcgaatgggaccggctcgagcactttgccccacctttcgggttcatggagctgaattattctttagtgcagaaagtggtgactagatttccacctgttcctcagcaacagctgctcctggcctccctcccagcaggttcattgcgatgcattacctgcgccgtcgtggggaacggaggcatcttaaataactcacacatgggtcaggagatcgacagtcatgattatgtctttagattgtccggagctcttataaaagggtacgaacaagatgtcggcactaggacatcattctatggcttcaccgcgttttccctcacccaatccctgctcatactgggaaaccgggggtttaagaacgtgcctctgggaaaagacgtgagatacttgcactttctagaaggcacacgcgactatgaatggctggaggctctgctaatgaaccagaccgtcatgagtaaaaacctgttttggtttcgtcataggccacaggaagcttttagggaggccctacatatggatcgctacctgttactgcaccccgacttcttaagatacatgaagaatcgctttttgagaagtaaaactctggacggagcccactggaggatctatagaccaaccacgggcgctctcctactgctcaccgcactgcaactgtgtgaccaggtaagtgcttacggcttcatcaccgaaggccatgaacggttctccgaccactattacgatacctcgtggaagaggctcattttctacattaaccacgacttcaagctagagagggaggtgtggaagaggctccatgacgagggaatcattagactgtaccaacgcccagggccaggcacagccaaggcaaaaaattag

SEQ ID NO: 198369 - DNA, 1803 bp, Artificial Sequence
  derived and/or modified sequence
atgaggagctgcctgtggcgctgccgccacctgagccagggcgtgcagtggagcctgctgctggccgtgctggtgttcttcctgtttgccctgcccagcttcatcaaggagccccagaccaagcccagccgccaccagaggacagagaacatcaaggagaggagcctgcagagcctggccaagcccaagagccaggcccccacccgggcccggaggaccaccatctatgcagagcctgtgcctgagaacaatgccctgaacacccagacccagcccaaggcccacaccactggagaccggggcaaggaggccaaccaggcccctcctgaggagcaggacaaggtgccccacacagcccagagagctgcctggaagagccctgagaaggagaagaccatggtgaacaccctgagcccccggggccaggatgctggcatggccagcggccgcacagaggcccagagctggaagagccaggacaccaagaccacccagggcaatggaggccagaccaggaagctgacagccagcaggacagtgtctgagaagcaccagggcaaggccgccaccacagccaagaccctcatccccaagagccagcacaggatgctggcccccactggagctgtgtccaccaggacccggcagaagggcgtgaccacagctgtgattcctcccaaggagaagaagccccaggccaccccacctccagcccccttccagagccccaccacccagaggaaccagaggctgaaggccgccaacttcaagtctgagccccgctgggactttgaggagaagtacagctttgagatcggcggcctgcagaccacctgcccagacagcgtgaagatcaaggccagcaagagcctgtggctgcagaagctgttcctgcccaacctgaccctcttcctggacagccgccacttcaaccagagcgagtgggaccggctggagcactttgcccccccatttggcttcatggagctgaactacagcctggtgcagaaggtggtgacccgcttcccccctgtgccccagcagcagctgctgctggccagcctgcctgctggcagcctgcgctgcatcacctgtgctgtggtgggcaatggaggcatcctgaacaacagccacatgggccaggagattgacagccatgactatgtgttccggctgagcggggccctgatcaagggctatgagcaggatgtgggcaccaggaccagcttctacggcttcaccgccttcagcctgacccagagcctgctgatcctgggcaacagaggcttcaagaatgtgcccctgggcaaggatgtgcgctacctgcacttcctggagggcacccgggactatgagtggctggaggccctgctgatgaaccagacagtgatgagcaagaacctcttctggttccgccaccggccccaggaggccttccgggaggccctgcacatggaccgctacctgctgctgcacccagacttcctgcgctacatgaagaaccgcttcctgcggagcaagaccctggatggagcccactggaggatctaccggcccaccactggagccctgctgctgctgacagccctgcagctgtgtgaccaggtgtctgcctacggcttcatcacagagggccacgagcgcttcagtgaccactactatgacacctcctggaagaggctcatcttctacatcaaccacgacttcaagctggagcgggaggtgtggaagaggctgcatgatgagggcatcatccggctgtaccagaggcctggccctggaacagccaaggccaagaactag

SEQ ID NO: 198370 - DNA, 1803 bp, Artificial Sequence
  derived and/or modified sequence
atgcggagctgcctgtggcggtgccggcacctgagccagggcgtgcagtggtccctgttgctggctgtgctggttttctttctgttcgcgctcccttcttttatcaaagagcctcagacaaagccatctagacaccagaggacagagaatatcaaggaacgctccctacagtcactggcaaagccaaagagtcaagctccgacaagagcacgccgaacgacgatatacgcggaaccagttcccgagaacaatgccctgaacacacagacacagccaaaggcacacactacaggtgatcggggaaaggaggctaatcaggccccacctgaagagcaagacaaggtgcctcataccgcccaacgcgcagcgtggaagagtcccgagaaggaaaaaaccatggtcaacacactgtcgccacgcggtcaggacgccgggatggctagcgggaggaccgaggcccagtcttggaaatcccaagacacaaagaccacacaaggaaatgggggccagacccgaaagctaaccgcctccagaactgttagcgagaaacaccaaggcaaggcggcaacgacagcaaagacattgatcccaaagtcacaacatcggatgttagcacctaccggcgcagtctccactcggacacggcagaagggcgtaaccactgcggtcatcccccccaaagagaaaaaaccacaagcaactccgcctcctgccccctttcagtcccctacaacgcagaggaatcagaggcttaaagctgccaactttaagagtgagcccagatgggatttcgaagaaaagtactcatttgagatcggggggttgcagacaacatgtcctgactctgtcaaaatcaaggcatcaaagagtttgtggctccagaaactgttcctccctaacctgactctgttcttggattcccgtcattttaatcaatccgaatgggacaggctggagcatttcgctccacctttcgggttcatggaattgaattactctttggtgcagaaagtggtcactcgcttcccacctgtgccgcaacaacagctcttgctggccagcctgccggccggctccctcaggtgtatcacctgcgccgttgtgggcaatggcggaattcttaacaattcccatatgggacaggagatagactcccacgactatgttttccggttgagcggtgccctaatcaagggctacgaacaggacgttgggactagaacctcattttacgggtttacagcctttagccttacacagagcttgctaattctggggaatagaggcttcaaaaacgtccctcttggcaaagacgtgcgttatctgcactttttggaagggacccgggactacgaatggttggaagctctcctaatgaaccagactgttatgtccaaaaaccttttttggttccggcaccgaccccaggaggcttttagagaagcactgcatatggatcgctacctactgctccatccagattttcttcggtacatgaagaataggttcttgaggagcaagactctggatggtgctcactggagaatctataggcccaccaccggtgctttgctgttactgactgctttgcagctctgcgaccaagtgagtgcctacggattcatcaccgaaggtcacgagcggttcagtgatcactactacgacactagttggaaaagactcatcttctacataaaccacgatttcaaattggagcgagaggtatggaaacgcctgcacgacgagggcattatcaggctgtatcagcgtccgggacccgggacggcaaaggcaaagaactag

SEQ ID NO: 198371 - DNA, 1803 bp, Artificial Sequence
  derived and/or modified sequence
atgcgctcatgcctttggcggtgccggcacttgagccaaggagtgcagtggtctctactgctcgcagttctcgtgttttttctattcgccctgccttcattcattaaggaacctcagactaaaccctcccggcaccagaggaccgaaaacataaaggagcgctctctgcagagcctcgccaagccaaagtcccaggccccaacgcgcgcaagaaggactacaatttacgccgagcctgtgccagaaaataatgccctcaatactcagacacagccaaaggcccataccaccggcgaccgcggaaaagaggccaatcaggctccccctgaggagcaggataaagtgccccatacagctcagagagccgcttggaaaagccccgaaaaagagaaaacaatggtgaacacactctcccctcgtggccaagatgccggaatggcttccggacggaccgaagcacaaagctggaagtctcaggacaccaaaaccacacaagggaatggcggacagactaggaaacttactgcatctaggacggtctccgaaaaacatcaaggtaaagctgcaacgaccgcaaaaaccctgataccgaaatctcagcaccggatgctggcccctacaggagctgtatctacacggacccggcaaaagggagtcacaacagcggtgattccccctaaagaaaaaaaaccccaggccaccccccctccggctccctttcaatcccctaccactcagcggaaccaacgtctcaaggcagcaaatttcaaatctgagccgagatgggactttgaagaaaagtactcttttgaaatagggggactgcagactacgtgcccggattctgtgaagattaaggccagcaagagtctctggcttcagaagctgtttctgcctaaccttacactgtttctagatagtagacattttaaccaatctgagtgggacagactggaacacttcgcccctcctttcgggtttatggaactgaactacagcctggttcagaaagttgttacccggttcccccctgtcccccaacagcaactgctcttggccagcttaccagcaggcagtttgcggtgtattacatgcgctgtggtgggcaacggcggtatccttaacaactcccacatgggacaggagatagactcccacgattacgtcttccgcctgtcaggagccctgattaaagggtatgaacaggatgtaggcacacgaactagtttctatgggttcactgccttttcccttactcagagcctccttattttaggcaatcgcggattcaagaatgtgcctctgggtaaggatgtgagatacttgcacttcctggaaggcacccgtgattatgagtggctcgaggccctactcatgaatcagaccgtcatgtccaaaaatctattttggtttcggcatagaccacaagaagcattcagagaggctctgcatatggacagatacctactcctgcaccctgacttcctacgatatatgaaaaacaggttcctgagaagtaagacactcgacggtgcccattggcggatctatcggccaaccacgggcgctctgctcctcctgacagcactgcagttatgtgatcaggtgagtgcgtatggctttattactgaggggcatgagaggtttagtgaccactactacgacacaagctggaaaaggttaatcttttacattaatcatgattttaaacttgagcgcgaagtgtggaagagactccacgacgagggcataatacgtctgtaccaaaggccaggcccaggaactgccaaagccaaaaactag

SEQ ID NO: 198372 - DNA, 1803 bp, Artificial Sequence
  derived and/or modified sequence
atgagatcctgtctatggcgatgtcgtcatctatctcagggcgtgcagtggagtcttctcctggccgttttggttttctttttgttcgcgctacctagctttattaaggagccacagaccaaacccagcagacatcagcgtacagagaatattaaggagcgaagtctgcagagtctggcgaagccaaagtcccaggcgcccacgagagctcggaggacaaccatttacgctgagccagttccagagaataacgccttaaacacccagacacagcccaaagctcacacaaccggtgatagaggaaaggaagctaatcaggccccgcccgaggagcaggacaaggtgccccacactgcccaaagggccgcctggaaatcccctgaaaaagagaaaaccatggttaacacgctgtcgcccagaggccaggatgcaggtatggcctctgggaggacggaggcgcaaagttggaagagccaagacacgaagactactcaggggaacggtgggcagacccgaaagctgaccgcgtccaggacagtttcagagaaacaccagggcaaggcggctaccaccgcaaaaacactgattccaaagagccaacaccggatgttggcccctaccggggcagtgtccactcgaacacgccaaaagggggtgacaactgcagtaattccaccaaaagagaagaagccacaggccacacctcctcccgctccctttcaatccccaactacacagcgcaaccaaaggttaaaggcagccaattttaagagcgagcccaggtgggacttcgaagaaaagtacagcttcgagatcggcggcctccagactacttgccctgattctgtgaaaatcaaagcctctaagtctctctggctccagaagttgttcttacccaacctgactctattcctggactctcgacactttaaccaaagtgaatgggataggctggaacactttgctcccccatttgggttcatggaattaaattattcactcgtgcagaaagtagtcacaaggttcccaccagtccctcagcagcagctgttactggcctcactgcccgccggatctctccgctgtatcacatgcgcagtcgtcggaaacggtgggatcctaaacaactcccatatgggtcaagaaatcgatagtcacgactatgtattcagattgtctggcgcacttatcaaaggttacgagcaggacgtgggtactcgcactagtttttatggcttcaccgcattttctctgacacaatcgctcttaatcctgggaaacagaggttttaaaaatgtccccttggggaaagacgtaaggtacctgcactttcttgagggaacccgcgactacgagtggttagaagctttgttgatgaatcagactgtgatgtccaaaaacttattttggttccgacacagacctcaggaagcattccgggaggccctgcatatggacaggtacttgcttctacatcctgattttctgagatatatgaaaaatagattcttgaggtccaagactcttgatggtgcccactggcgcatttatagaccgacaacaggtgccctgctcctgctaactgctttacagctttgtgatcaggtcagcgcgtacggtttcataaccgaaggccacgaacggttttccgaccactactacgacacatcatggaagcgtctgatattttatattaaccacgattttaaactcgagcgagaagtctggaaacggttgcacgatgaaggcatcattcggctctatcagcgccctggacccgggacagccaaagcaaaaaactag

SEQ ID NO: 198373 - DNA, 1803 bp, Artificial Sequence
  derived and/or modified sequence
atgcgctcatgtttgtggaggtgcagacacctgtcccaaggcgtccagtggagtcttcttctcgccgtgctggtattctttcttttcgcactgccgtcatttatcaaagagccgcagactaagccgtcccggcatcaacgaaccgagaacataaaggaacgctcactccagtcccttgctaagccaaagtctcaggcccctacaagagccagaagaacaacgatctatgcagaaccagttcctgaaaataacgccctgaatacccagacgcagcccaaagcacatacaaccggtgatagaggaaaagaagcgaatcaggcaccccctgaggaacaggacaaggttccacataccgcccagagagcagcatggaaatcacctgaaaaagagaagactatggtcaacactttgtccccccgtgggcaggacgctgggatggccagcgggagaaccgaggcccagtcgtggaagtcacaagatacaaagactactcaagggaacggcggacagacccggaaattgactgcatctcgtactgtctccgaaaagcatcagggtaaagccgccactactgccaaaacattaataccaaagagtcagcaccgaatgctggcaccaactggcgccgttagcacccgtacaagacagaagggcgtgactaccgccgtgattcctcccaaagaaaaaaaaccacaagcaactcccccacccgctccattccaatcccctacaacccaacgtaatcaaagacttaaggcagctaattttaaatcagagccccggtgggatttcgaggaaaaatattcttttgagattggcggccttcaaactacttgtcccgattctgtcaaaataaaagcctcaaaatccctctggctgcaaaagctgtttcttcctaacctaaccctgttcctggattctcgccactttaaccagagcgaatgggacagacttgagcactttgcccccccgttcggatttatggagttaaattacagccttgtccagaaggtggtcactcgctttccccccgtcccgcagcaacagctgttgttagcatccctccctgccggatctctcagatgtatcacctgcgccgtggtcggaaatggaggtatactcaacaattcacatatggggcaagagatagactcgcacgactatgtcttcagactgtccggggccttaatcaagggctatgaacaggacgtaggtactaggacttccttctatggctttaccgcattctccctcactcagtctctgttgattctgggaaataggggttttaaaaacgtaccactgggtaaggatgtccgctacttgcactttctcgaaggaacaagagattacgaatggttggaagccttgctgatgaatcagactgttatgagcaaaaacctgttttggtttcggcaccgcccgcaggaggcttttcgggaggcattacatatggataggtacttgctgctgcacccagacttcttgagatatatgaagaatagattcctgaggagcaaaactctcgacggagctcactggaggatctatcggccaacaactggagcactgcttttgttgaccgccctgcaattgtgtgatcaagtcagtgcttatgggtttattacagaagggcatgagagatttagcgatcattactacgatacgtcttggaagagactgatcttttacataaaccacgactttaagttggaaagagaagtgtggaagcgtttgcacgatgaaggaatcatccgcttgtaccagcgtcccgggccaggaacggcaaaagcgaaaaattag

SEQ ID NO: 198374 - DNA, 2542 bp, Artificial Sequence
  derived and/or modified sequence
ggttcctcccttcccaggcagagactgataaactcagcacttgccggagtggctcattgttaagacaaagggtgtgcacttcctggccaggaaacctgagcggtgagactcccagctgcctacatcaaggccccaggacatgcagaaccttcctctagaacccgacccaccaccatgaggtcctgcctgtggagatgcaggcacctgagccaaggcgtccagtggtccttgcttctggctgtcctggtcttctttctcttcgccttgccctcttttattaaggagcctcaaacaaagccttccaggcatcaacgcacagagaacattaaagaaaggtctctacagtccctggcaaagcctaagtcccaggcacccacaagggcaaggaggacaaccatctatgcagagccagtgccagagaacaatgccctcaacacacaaacccagcccaaggcccacaccaccggagacagaggaaaggaggccaaccaggcaccgccggaggagcaggacaaggtgccccacacagcacagagggcagcatggaagagcccagaaaaagagaaaaccatggtgaacacactgtcacccagagggcaagatgcagggatggcctctggcaggacagaggcacaatcatggaagagccaggacacaaagacgacccaaggaaatgggggccagaccaggaagctgacggcctccaggacggtgtcagagaagcaccagggcaaagcggcaaccacagccaagacgctcattcccaaaagtcagcacagaatgctggctcccacaggagcagtgtcaacaaggacgagacagaaaggagtgaccacagcagtcatcccacctaaggagaagaaacctcaggccaccccaccccctgcccctttccagagccccacgacgcagagaaaccaaagactgaaggccgccaacttcaaatctgagcctcggtgggattttgaggaaaaatacagcttcgaaataggaggccttcagacgacttgccctgactctgtgaagatcaaagcctccaagtcgctgtggctccagaaactctttctgcccaacctcactctcttcctggactccagacacttcaaccagagtgagtgggaccgcctggaacactttgcaccaccctttggcttcatggagctcaactactccttggtgcagaaggtcgtgacacgcttccctccagtgccccagcagcagctgctcctggccagcctccccgctgggagcctccggtgcatcacctgtgccgtggtgggcaacgggggcatcctgaacaactcccacatgggccaggagatagacagtcacgactacgtgttccgattgagcggagctctcattaaaggctacgaacaggatgtggggactcggacatccttctacggctttaccgccttctccctgacccagtcactccttatattgggcaatcggggtttcaagaacgtgcctcttgggaaggacgtccgctacttgcacttcctggaaggcacccgggactatgagtggctggaagcactgcttatgaatcagacggtgatgtcaaaaaaccttttctggttcaggcacagaccccaggaagcttttcgggaagccctgcacatggacaggtacctgttgctgcacccagactttctccgatacatgaagaacaggtttctgaggtctaagaccctggatggtgcccactggaggatataccgccccaccactggggccctcctgctgctcactgcccttcagctctgtgaccaggtgagtgcttatggcttcatcactgagggccatgagcgcttttctgatcactactatgatacatcatggaagcggctgatcttttacataaaccatgacttcaagctggagagagaagtctggaagcggctacacgatgaagggataatccggctgtaccagcgtcctggtcccggaactgccaaagccaagaactgaccggggccagggctgccatggtctccttgcctgctccaaggcacaggatacagtgggaatcttgagactctttggccatttcccatggctcagactaagctccaagcccttcaggagttccaagggaacacttgaaccatggacaagactctctcaagatggcaaatggctaattgaggttctgaagttcttcagtacattgctgtaggtcctgaggccagggatttttaattaaatggggtgatgggtggccaataccacaattcctgctgaaaaacactcttccagtccaaaagcttcttgatacagaaaaaagagcctggatttacagaaacatatagatctggtttgaattccagatcgagtttacagttgtgaaatcttgaaggtattacttaacttcactacagattgtctagaagacctttctaggagttatctgattctagaagggtctatacttgtccttgtctttaagctatttgacaactctacgtgttgtagaaaactgataataatacaaatgattgttgtccatggaaaggcaaataaattttctacagtg

SEQ ID NO: 198375 - DNA, 2319 bp, Artificial Sequence
  derived and/or modified sequence
ctacatcaaggccccaggacatgcagaaccttcctctagaacccgacccaccaccatgaggtcctgcctgtggagatgcaggcacctgagccaaggcgtccagtggtccttgcttctggctgtcctggtcttctttctcttcgccttgccctcttttattaaggagcctcaaacaaagccttccaggcatcaacgcacagagaacattaaagaaaggtctctacagtccctggcaaagcctaagtcccaggcacccacaagggcaaggaggacaaccatctatgcagagccagtgccagagaacaatgccctcaacacacaaacccagcccaaggcccacaccaccggagacagaggaaaggaggccaaccaggcaccgccggaggagcaggacaaggtgccccacacagcacagagggcagcatggaagagcccagaaaaagagaaaaccatggtgaacacactgtcacccagagggcaagatgcagggatggcctctggcaggacagaggcacaatcatggaagagccaggacacaaagacgacccaaggaaatgggggccagaccaggaagctgacggcctccaggacggtgtcagagaagcaccagggcaaagcggcaaccacagccaagacgctcattcccaaaagtcagcacagaatgctggctcccacaggagcagtgtcaacaaggacgagacagaaaggagtgaccacagcagtcatcccacctaaggagaagaaacctcaggccaccccaccccctgcccctttccagagccccacgacgcagagaaaccaaagactgaaggccgccaacttcaaatctgagcctcggtgggattttgaggaaaaatacagcttcgaaataggaggccttcagacgacttgccctgactctgtgaagatcaaagcctccaagtcgctgtggctccagaaactctttctgcccaacctcactctcttcctggactccagacacttcaaccagagtgagtgggaccgcctggaacactttgcaccaccctttggcttcatggagctcaactactccttggtgcagaaggtcgtgacacgcttccctccagtgccccagcagcagctgctcctggccagcctccccgctgggagcctccggtgcatcacctgtgccgtggtgggcaacgggggcatcctgaacaactcccacatgggccaggagatagacagtcacgactacgtgttccgattgagcggagctctcattaaaggctacgaacaggatgtggggactcggacatccttctacggctttaccgccttctccctgacccagtcactccttatattgggcaatcggggtttcaagaacgtgcctcttgggaaggcacagaccccaggaagcttttcgggaagccctgcacatggacaggtacctgttgctgcacccagactttctccgatacatgaagaacaggtttctgaggtctaagaccctggatggtgcccactggaggatataccgccccaccactggggccctcctgctgctcactgcccttcagctctgtgaccaggtgagtgcttatggcttcatcactgagggccatgagcgcttttctgatcactactatgatacatcatggaagcggctgatcttttacataaaccatgacttcaagctggagagagaagtctggaagcggctacacgatgaagggataatccggctgtaccagcgtcctggtcccggaactgccaaagccaagaactgaccggggccagggctgccatggtctccttgcctgctccaaggcacaggatacagtgggaatcttgagactctttggccatttcccatggctcagactaagctccaagcccttcaggagttccaagggaacacttgaaccatggacaagactctctcaagatggcaaatggctaattgaggttctgaagttcttcagtacattgctgtaggtcctgaggccagggatttttaattaaatggggtgatgggtggccaataccacaattcctgctgaaaaacactcttccagtccaaaagcttcttgatacagaaaaaagagcctggatttacagaaacatatagatctggtttgaattccagatcgagtttacagttgtgaaatcttgaaggtattacttaacttcactacagattgtctagaagacctttctaggagttatctgattctagaagggtctatacttgtccttgtctttaagctatttgacaactctacgtgttgtagaaaactgataataatacaaatgattgttgtccatggaaaggcaaataaattttctacagtg

SEQ ID NO: 198376 - RNA, 1803 nt, Artificial Sequence
  derived and/or modified sequence
augagauccugucuauggcgaugucgucaucuaucucagggcgugcaguggagucuucuccuggccguuuugguuuucuuuuuguucgcgcuaccuagcuuuauuaaggagccacagaccaaacccagcagacaucagcguacagagaauauuaaggagcgaagucugcagagucuggcgaagccaaagucccaggcgcccacgagagcucggaggacaaccauuuacgcugagccaguuccagagaauaacgccuuaaacacccagacacagcccaaagcucacacaaccggugauagaggaaaggaagcuaaucaggccccgcccgaggagcaggacaaggugccccacacugcccaaagggccgccuggaaauccccugaaaaagagaaaaccaugguuaacacgcugucgcccagaggccaggaugcagguauggccucugggaggacggaggcgcaaaguuggaagagccaagacacgaagacuacucaggggaacggugggcagacccgaaagcugaccgcguccaggacaguuucagagaaacaccagggcaaggcggcuaccaccgcaaaaacacugauuccaaagagccaacaccggauguuggccccuaccggggcaguguccacucgaacacgccaaaagggggugacaacugcaguaauuccaccaaaagagaagaagccacaggccacaccuccucccgcucccuuucaauccccaacuacacagcgcaaccaaagguuaaaggcagccaauuuuaagagcgagcccaggugggacuucgaagaaaaguacagcuucgagaucggcggccuccagacuacuugcccugauucugugaaaaucaaagccucuaagucucucuggcuccagaaguuguucuuacccaaccugacucuauuccuggacucucgacacuuuaaccaaagugaaugggauaggcuggaacacuuugcucccccauuuggguucauggaauuaaauuauucacucgugcagaaaguagucacaagguucccaccagucccucagcagcagcuguuacuggccucacugcccgccggaucucuccgcuguaucacaugcgcagucgucggaaacggugggauccuaaacaacucccauaugggucaagaaaucgauagucacgacuauguauucagauugucuggcgcacuuaucaaagguuacgagcaggacguggguacucgcacuaguuuuuauggcuucaccgcauuuucucugacacaaucgcucuuaauccugggaaacagagguuuuaaaaauguccccuuggggaaagacguaagguaccugcacuuucuugagggaacccgcgacuacgagugguuagaagcuuuguugaugaaucagacugugauguccaaaaacuuauuuugguuccgacacagaccucaggaagcauuccgggaggcccugcauauggacagguacuugcuucuacauccugauuuucugagauauaugaaaaauagauucuugagguccaagacucuugauggugcccacuggcgcauuuauagaccgacaacaggugcccugcuccugcuaacugcuuuacagcuuugugaucaggucagcgcguacgguuucauaaccgaaggccacgaacgguuuuccgaccacuacuacgacacaucauggaagcgucugauauuuuauauuaaccacgauuuuaaacucgagcgagaagucuggaaacgguugcacgaugaaggcaucauucggcucuaucagcgcccuggacccgggacagccaaagcaaaaaacuag

SEQ ID NO: 198377 - RNA, 1803 nt, Artificial Sequence
  derived and/or modified sequence
augcgcucauguuuguggaggugcagacaccugucccaaggcguccaguggagucuucuucucgccgugcugguauucuuucuuuucgcacugccgucauuuaucaaagagccgcagacuaagccgucccggcaucaacgaaccgagaacauaaaggaacgcucacuccagucccuugcuaagccaaagucucaggccccuacaagagccagaagaacaacgaucuaugcagaaccaguuccugaaaauaacgcccugaauacccagacgcagcccaaagcacauacaaccggugauagaggaaaagaagcgaaucaggcacccccugaggaacaggacaagguuccacauaccgcccagagagcagcauggaaaucaccugaaaaagagaagacuauggucaacacuuuguccccccgugggcaggacgcugggauggccagcgggagaaccgaggcccagucguggaagucacaagauacaaagacuacucaagggaacggcggacagacccggaaauugacugcaucucguacugucuccgaaaagcaucaggguaaagccgccacuacugccaaaacauuaauaccaaagagucagcaccgaaugcuggcaccaacuggcgccguuagcacccguacaagacagaagggcgugacuaccgccgugauuccucccaaagaaaaaaaaccacaagcaacucccccacccgcuccauuccaauccccuacaacccaacguaaucaaagacuuaaggcagcuaauuuuaaaucagagccccggugggauuucgaggaaaaauauucuuuugagauuggcggccuucaaacuacuugucccgauucugucaaaauaaaagccucaaaaucccucuggcugcaaaagcuguuucuuccuaaccuaacccuguuccuggauucucgccacuuuaaccagagcgaaugggacagacuugagcacuuugcccccccguucggauuuauggaguuaaauuacagccuuguccagaagguggucacucgcuuuccccccgucccgcagcaacagcuguuguuagcaucccucccugccggaucucucagauguaucaccugcgccguggucggaaauggagguauacucaacaauucacauauggggcaagagauagacucgcacgacuaugucuucagacuguccggggccuuaaucaagggcuaugaacaggacguagguacuaggacuuccuucuauggcuuuaccgcauucucccucacucagucucuguugauucugggaaauagggguuuuaaaaacguaccacuggguaaggauguccgcuacuugcacuuucucgaaggaacaagagauuacgaaugguuggaagccuugcugaugaaucagacuguuaugagcaaaaaccuguuuugguuucggcaccgcccgcaggaggcuuuucgggaggcauuacauauggauagguacuugcugcugcacccagacuucuugagauauaugaagaauagauuccugaggagcaaaacucucgacggagcucacuggaggaucuaucggccaacaacuggagcacugcuuuuguugaccgcccugcaauugugugaucaagucagugcuuauggguuuauuacagaagggcaugagagauuuagcgaucauuacuacgauacgucuuggaagagacugaucuuuuacauaaaccacgacuuuaaguuggaaagagaaguguggaagcguuugcacgaugaaggaaucauccgcuuguaccagcgucccgggccaggaacggcaaaagcgaaaaauuag

SEQ ID NO: 198378 - protein, 574 aa, Artificial Sequence
  derived and/or modified sequence
MASDLESSLTSIDWLPQLTLRATIEKLGSASQAGPPGSSRKCSPGSPTDPNATLSKDEAAVHQDGKPRYSYATLITYAINSSPAKKMTLSEIYRWICDNFPYYKNAGIGWKNSIRHNLSLNKCFRKVPRPRDDPGKGSYWTIDTCPDISRKRRHPPDDDLSQDSPEQEASKSPRGGVAGSGEASLPPEGNPQMSLQSPTSIASYSQGTGSVDGGAVAAGASGRESAEGPPPLYNTNHDFKFSYSEINFQDLSWSFRNLYKSMLEKSSSSSQHGFSSLLGDIPPSNNYYMYQQQQPPPPQQQQQQQQPPQPPPQQSQPQQQQAPAQGPSAVGGAPPLHTPSTDGCTPPGGKQAGAEGYGPPPVMAMHPPPLQHGGYHPHQHHPHSHPAQQPPPPQPQAQGQAPINNTGFAFPSDWCSNIDSLKESFKMVNRLNWSSIEQSQFSELMESLRQAEQKNWTLDQHHIANLCDSLNHFLTQTGHVPPQGGTHRPPAPARIADSCALTSGKQESAMSQVNSYGHPQAPHLYPGPSPMYPIPTQDSAGYNRPAHHMVPRPSVPPPGANEEIPDDFDWDLIT

SEQ ID NO: 198379 - DNA, 5499 bp, Artificial Sequence
  derived and/or modified sequence
tctgcccgccttctggctccccgggagcccagactggtcggagcccgagcggtggcagcgcggggagccccacgcgccgaagggagcggacccgacaggacggccctagaggaggtgctgccgccacagtagcagggaccggagtctcgagccgcggcctcccggaccgtgctgcccaggccagctcagggacagccgggagtacgaaagccccaccctctggggcaccccgggagcggaggcgggagcggggacgcgagcaacctctccccctgttggagagaaaagacccttaccactcgggtgagggaaagaagagacccctggaggggacgcctctctcctgcctagaggcgaggaagacccctgtactggccggggaggagacccccagaagtggaaagaagggagctttccgtagggaagcagagtgagaccaccctagcgcgcccccgcccctccaaacacacactctcaacagttcaggactttggaggcaaagagagacggggctgtgcctgtggagtaggcaccctcggcccaccactattcacaggagacaggagtccttacgttcagaagccactccagggaaagaagaggaatcggctttcagccttctggagaggggaagacctccccctcaacttcctcgtgcctagacagtggaacggggtggagcccctccgctcctatctccagcagacagaaagagccctccacctcagaaagatccagtttgggggggaggggaactcccccaagggggaggagacaactcctggttgggagaggctcctcccctcctcccccgggtaacaagcagggtgtggggggtgtgccaccttccccaagtaggacctccttctcctccccctccccctcctccaaccttgactcctcatcctcaggggacccagttcccctcaccaacttgggaggctcagcctcgtccaggaagagccactgaggatgagagccgtcacctgcctctgaagaggggaatccctccaaccccaaactccagtaccaggtggttccctccctttgccggaggaaccttggagacagaacccagaagtaccatggcttctgacctagagagtagcctcacctccatagactggctcccccagctgaccctccgagctaccattgagaagcttggaagtgcctcccaggctgggcctcccgggagcagccgcaagtgttcaccagggtcacccacagatcctaatgccaccctgagcaaagacgaggcagcagtgcaccaggacggcaagccacgatacagctatgccactctcatcacctatgccatcaactcctctccagccaagaagatgaccctcagcgagatttaccgctggatctgtgataacttcccctattacaagaatgctggcattggttggaagaattcaatacggcacaacctttctctcaacaagtgtttccggaaggtgcccagacctcgggatgaccctgggaagggttcctattggacaattgacacctgccctgacatttcccgaaagagaagacaccctccagatgatgatctgtcccaagactcaccagaacaggaggcaagcaagagcccacggggaggcgttgcagggagtggagaagcctcactgcctcctgaggggaatccgcagatgtcacttcagagccccacatctatagccagctacagccagggcacaggatctgtggatggtggagcagtggcagcaggggcttcaggccgagaaagtgctgagggtccccctcccctctataacaccaaccatgactttaaattctcctactcagagatcaactttcaggatctaagctggtccttccgcaacctctataagtccatgctggagaagtcctcttcctcctctcagcacggcttttcttctctcctgggggacatcccaccctcgaacaactactacatgtatcagcagcagcagccaccgccacctcaacagcagcagcagcagcagcagccgccacagccacctccccagcagtcccagccacagcagcagcaggcacctgcccagggcccctcagctgtagggggtgctcctccactgcacaccccaagcacagatggttgtaccccaccagggggaaagcaagctggggcggaaggctatgggcctccccctgtaatggccatgcatccacccccgctgcagcatggaggctaccaccctcatcagcaccatccccactcccaccctgcccagcagccaccacctccacagccacaggcacaaggccaggctcccatcaacaacactggctttgcctttccttctgactggtgctctaatattgactctttaaaggaaagcttcaagatggtgaatcggctcaattggtccagcattgagcagtcacaattctcagaactgatggagagtctacgacaggcagagcagaagaactggaccctcgaccagcatcacattgccaatctgtgtgactccctcaaccacttccttactcagactggtcacgtgccccctcaagggggtacccaccgcccaccagcccctgcccgtattgctgactcctgtgccctcaccagtggcaaacaggagtcagccatgagccaagtgaactcttatgggcacccacaagctccccacctctaccctggcccatcaccaatgtacccaatccccacccaggactcagcaggatacaatcgcccagcacaccatatggtccctcggccatcagtgccacctcctggtgccaatgaggagatccctgatgacttcgactgggacttgatcacttagtgcatcacagagtgtggacatcagcccagggccgcgtggtgaaatctggcagtggggaaagagcaaccccagcccgtcccttccccccgtctgtatatagacatatatcctctttttgttctttctctgtcagagaagccactgcaagatgctgccgaagataaccctctctttcctgcctcattcttctctcttccttcctgttttttcctagttcttttattattattcttatattattattattattattggttatatactgtccatagtctcctgtccctacatcatggatcatgtccaccttttgctaatttaaaatcatcaggctggaagatgaagccatgatagctacagagaaaggttttagactccagtttacctttctcttggagaaactcaatgctaatcccaccttttggccctaaattgttttttgttcccatcagtttcaggccaggactggagaggccacattaccaagtagaaagggtctgaaacattacttggcagccaagaatttggaggttttaaaatggtgctaattctgtcctctgaggtcttccttgtccctttataccttcaatccttacttctgccagtctgtatttcctatcaagggtgaaagtgatgatggtggtgcaggagggtgacaataaaatcctagtggaattggagaccattggaagggatggaatataagtcagtgtgaaactgagtatacactgccatgttacatcagtgtccattggcttgttttgagcctgttctctaagaagataggattggttttagcccaaactctgcttctatggtagggcatgaggacaactattcagcatggttttagcttcttggagatgattccaacttaactattttggctttttaaacataattttctctgaaaattaattgtggctcttatttgcatttacgaatgatcttcccatccctttttcccattcagcaaatattagtttgtcctcctttaattgtttgcccaaatcttccacccatcttttttcttccctcattttctgggattctcaagaaagaaaaagtaacccattatcactctgagtttcgtcgtgccctgagacatgatgggaatctcattcccacctctcatagcagagccaaacctttagtgttggtggtaggaggatggggagaggaaaaaagagctggcaaagaaatggatagggaatattttagttctttaaatatataggcagatgcttctcttggaatccagatcatctggctgaagcttttgcaagtaggctttgaggggtgaaggagattggtggaggagagtaaataatctagaggcaagagttcagtgagggccaagggggacccccagaaaaaggtatggagctaactcatctcttttacaaggggtggccatgacttactgttgcaaagtactcagtgtatatttaatgttgattgttgaattttagttacgagagggaagaacaattttacttctgtccttatttcacttgctgaaaagctgtgggacaaaatgtatggaatagacaaggccactttctttgtgatttctgcttttcatgcatattattttatttacccataatttccaagaggtttggcgttccgctctcctgcttttttctttcatccacccctttcctttttttggaagggggttatatatgagagttcattgaagaagtccagtgaggctgaagtaaaggggcaagatagggcagttaactaaagagcactttatttctttgaagcctttctaagaaagaaatgggggtgcgagtggcttgaatctcccatgatgttggagggcacttagtggggttgaagtatgacataatatttcccattggggaaaggagaatttctcttagagggtggcaaaatgcctttgcccagtgtccctattttaggcatcttttccttccttattccttccagtcagggtgtgtcctatacaaaacttcccatcagttctcctcaatattccccatttgtaaatgatcacttctcttttctaaacccttttcctgttcagatccatacaggatttgcaagggtaggatcatacatgcaaatgccccttgttcatctgtgtcttctgcaaactagtctcatgaagaattctggcgtgcagccagggtagctgaagtttgggtctgggactggagattggccattaggcctcctgagattccagctcccttccaccaagcccagtcttgctacgtggcacagggcaaacctgactccctttgggcctcagtttcccctccccttcatgaaatgaaaagaatactactttttcttgttggtctagcattgctggacacaaagtgtagtcattattgttgtattgggtgatgtgtgcaaaactgcagaagctcactgcctataagaggaaataagagagaaagtggaggagagggacaaaaggagtaattatttggtatagatccacccatcccaacctttctctcctcagtccctgctcctcatgtttctggtttggtgagtcctttgtgccaccacccataatgctttgcattgctgcatcctgggaagggggtatatggtctcacaagttgttgtcattgtttttttgcatgctttcttaataaaaaaaaaaaaagaatgtttacagttttatcttaaaaaaaaaaaaaaaaaa

SEQ ID NO: 198380 - DNA, 1725 bp, Artificial Sequence
  derived and/or modified sequence
atggcctcagacctcgaaagcagcctcacatccatcgactggctgccgcagctcacgctcagagccactatcgaaaaattgggaagcgccagccaggcaggtcctcccgggagctcgcgcaagtgttctccaggcagtccaaccgacccaaacgcgaccttgagtaaggacgaggcggcagtacaccaggatggtaagccacggtactcttatgctacactgataacgtacgccatcaatagcagccccgcaaagaagatgaccctgtccgaaatctataggtggatttgcgacaactttccttactacaagaacgctgggatcggctggaaaaactcaattcgacataacctcagtctcaacaaatgctttaggaaagtgcctagacctagagacgacccaggaaaaggctcctattggaccattgacacatgccccgatatcagtaggaaaagacgtcaccccccagatgatgatttgtcccaggacagcccagagcaggaggcatctaaaagcccgcgtggcggcgtagcaggctccggagaagcgtctctgcctcccgagggcaatccacagatgagtcttcaatcaccaacgtccatagcctcttacagtcagggaacaggctctgttgatggtggggccgttgctgcgggtgccagcggtagggaaagcgccgagggcccaccacccctgtataacaccaatcatgacttcaagtttagttactccgagatcaattttcaagacctctcatggagctttaggaacctctacaagtcaatgctggaaaaatcaagcagctcatcacagcacggattctcttccttgcttggagatatcccaccttcgaataattactacatgtaccagcaacaacagcctcctcctccgcaacaacaacagcaacaacagcaacctccccagcctcctccgcaacagtctcagccacaacaacagcaggcacctgcacaaggaccctcagcggtaggcggcgctccaccacttcataccccatcgaccgatgggtgcactccaccaggcggaaaacaggctggtgcggagggttacggaccgcctcccgtcatggccatgcatcctccgcctctgcaacatgggggatatcacccgcaccaacatcacccccacagtcatcccgctcagcagccccccccccctcagcctcaggcgcagggtcaggctcctattaacaacacgggttttgccttcccctctgactggtgctccaatattgacagcctcaaggaaagcttcaagatggtcaatagactaaattggagctcgatcgaacagagccagttctctgagctgatggaaagtttgaggcaggctgagcagaaaaactggactctggatcagcaccacattgccaatctgtgtgattctctcaatcatttcttaacccagactggtcatgtccctcctcagggaggcacacaccgccctcccgcgcccgctagaattgcagactcatgtgcactcacgagcgggaagcaagagagtgctatgagtcaggtcaactcttatgggcacccacaggccccccacttgtatccaggccccagcccaatgtaccctatccccacacaggacagcgctgggtacaataggccagcccaccacatggttccacgccctagtgtgcctcctcccggcgctaatgaagagatccctgatgattttgactgggaccttatcacctag

SEQ ID NO: 198381 - DNA, 1581 bp, Artificial Sequence
  derived and/or modified sequence
atggcgtccgatttagagagctccctcactagcattgactggctccctcagctcaccctacgggctaccattgagaaattggggagtgcttcacaggctggcccccctgggtcatctaggaaatgctcccccgggagccctactgacccaaacgcaaccctgagtaaggacgaggcagctgtccatcaggatggcaagcccagatacagttacgctaccctaattacatatgcaattaacagctcccccgcaaaaaagatgacccttagtgagatctacaggtggatctgcgacaattttccttactacaagaacgctggcatcggctggaagaacagtatacgtcacaatctgtccctgaacaaatgtttcaggaaagtgccccgtccacgagacgatcctggaaaaggcagctattggacaatcgacacatgccccgacatttcccggaagcgaagacatccaccagacgatgatctgtctcaagacagtccagagcaggaagcatctaagtccccacgcggtggggtggctggaagcggggaggcttctttaccccccgaggggaatcctcagatgagcctacagtcacccacctccatcgcatcatattcccaaggaaccggtagcgttgatggtggagcagtggccgcaggagcatctggccgagaatctgccgaaggcccacccccactgtacaatactaaccatgattttaaattctcctattccgaaattaacttccaggacctgtcttggtctttcagaaacctttataagagcatgcttgaaaagtcctcttcaagttctcaacatgggttcagctcactcttaggagacattccccccagcaataactattacatgtaccaacagcagcagcctccgccacctcagcagcagcaacagcagcagcagccccctcagccccccccccagcagtcacagcctcagcagcagcaggcacctgctcaggggccaagcgctgttggcggggcacccccactgcacaccccatcaaccgatggatgtacaccccctggtggcaaacaagccggcgctgagggctacggcccccctccagtgatggcaatgcacccacccccactgcaacatggagggtatcacccacaccagcaccacccgcatagccaccctgctcagcaacctccacccccacagccgcaggcacaaggccaggcaccgatcaacaacaccggttttgcctttccaagcgattggtgttctaatatcgactcgctgaaggagagttttaagatggtgaacaggctgaactggagtagcattgaacagtctcagttctctgaactgatggagtcacttcgtcaggctgagcagaaaaactggactctagatcagcatcatatcgccaacctttgtgattccctgaaccatttcctcacccagactggacatgtgcccccccagggcggcactcaccgcccacctgcccccgcacgtatcgctgattcttgtgccctaacatccgggaaacaagagtctgcaatgtcccagggcaccgccccttctcagctgccctggcgatggcggttgtgttag

SEQ ID NO: 198382 - DNA, 1725 bp, Artificial Sequence
  derived and/or modified sequence
atggccagtgacctggagagcagcctgaccagcattgactggctgccccagctgaccctgcgggccaccatcgagaagctgggcagcgccagccaggccggccccccaggcagcagcaggaagtgcagccctggcagccccacagaccccaatgccaccctgagcaaggatgaagctgctgtgcaccaggacggcaagccccgctacagctatgccaccctcatcacctacgccatcaacagcagccctgccaagaagatgaccctgtctgagatctaccgctggatctgtgacaacttcccctactacaagaatgccggcatcggctggaagaacagcatccgccacaacctgagcctgaacaagtgcttcaggaaggtgccccggcccagagatgaccccgggaagggcagctactggaccatcgacacctgcccagacatcagcaggaagaggaggcaccccccagatgatgacctgagccaggacagccctgagcaggaggccagcaagagcccccggggcggcgtggccggcagcggggaggccagcctgcccccagagggcaacccccagatgagcctgcagagccccaccagcatcgccagctacagccagggcaccggctctgtggatggcggcgctgtggccgccggggccagcggccgggagagcgctgagggccccccacccctgtacaacaccaaccacgacttcaagttctcctacagcgagatcaacttccaggacctgtcctggagcttcaggaacctgtacaagtccatgctggagaagagcagcagcagcagccagcacggcttcagcagcctgctgggggacatcccccccagcaacaactactacatgtaccagcagcagcagcccccaccaccccagcagcagcagcagcagcagcagcccccccagcccccaccccagcagagccagccccagcagcagcaggccccagcccagggccccagcgctgtgggcggggccccacccctgcacacccccagcacagatggctgcaccccacctgggggcaagcaggccggggctgagggctacggccccccacctgtgatggccatgcaccccccacccctgcagcacggcggctaccacccccaccagcaccacccccacagccacccagcccagcagcccccaccaccccagccccaggcccagggccaggcccccatcaacaacacaggctttgccttccccagcgactggtgcagcaacatcgacagcctgaaggagagcttcaagatggtgaaccggctgaactggagcagcattgagcagagccagttcagcgagctgatggagagcctgcggcaggccgagcagaagaactggaccctggaccagcaccacatcgccaacctgtgtgacagcctgaaccacttcctgacccagacaggccacgtgcccccccagggcggcacccaccggcccccagccccagccagaattgctgacagctgtgccctgaccagcggcaagcaggagagcgccatgagccaggtgaacagctatggccacccccaggccccccacctgtacccaggccccagccccatgtaccccatccccacccaggacagcgctggctacaacagacctgcccaccacatggtgccccggcccagcgtgcccccacctggggccaatgaggagatcccagatgactttgactgggacctgatcacctag

SEQ ID NO: 198383 - DNA, 1581 bp, Artificial Sequence
  derived and/or modified sequence
atggccagtgacctggagagcagcctgaccagcattgactggctgccccagctgaccctgcgggccaccatcgagaagctgggcagcgccagccaggccggccccccaggcagcagcaggaagtgcagccctggcagccccacagaccccaatgccaccctgagcaaggatgaagctgctgtgcaccaggacggcaagccccgctacagctatgccaccctcatcacctacgccatcaacagcagccctgccaagaagatgaccctgtctgagatctaccgctggatctgtgacaacttcccctactacaagaatgccggcatcggctggaagaacagcatccgccacaacctgagcctgaacaagtgcttcaggaaggtgccccggcccagagatgaccccgggaagggcagctactggaccatcgacacctgcccagacatcagcaggaagaggaggcaccccccagatgatgacctgagccaggacagccctgagcaggaggccagcaagagcccccggggcggcgtggccggcagcggggaggccagcctgcccccagagggcaacccccagatgagcctgcagagccccaccagcatcgccagctacagccagggcaccggctctgtggatggcggcgctgtggccgccggggccagcggccgggagagcgctgagggccccccacccctgtacaacaccaaccacgacttcaagttctcctacagcgagatcaacttccaggacctgtcctggagcttcaggaacctgtacaagtccatgctggagaagagcagcagcagcagccagcacggcttcagcagcctgctgggggacatcccccccagcaacaactactacatgtaccagcagcagcagcccccaccaccccagcagcagcagcagcagcagcagcccccccagcccccaccccagcagagccagccccagcagcagcaggccccagcccagggccccagcgctgtgggcggggccccacccctgcacacccccagcacagatggctgcaccccacctgggggcaagcaggccggggctgagggctacggccccccacctgtgatggccatgcaccccccacccctgcagcacggcggctaccacccccaccagcaccacccccacagccacccagcccagcagcccccaccaccccagccccaggcccagggccaggcccccatcaacaacacaggctttgccttccccagcgactggtgcagcaacatcgacagcctgaaggagagcttcaagatggtgaaccggctgaactggagcagcattgagcagagccagttcagcgagctgatggagagcctgcggcaggccgagcagaagaactggaccctggaccagcaccacatcgccaacctgtgtgacagcctgaaccacttcctgacccagacaggccacgtgcccccccagggcggcacccaccggcccccagccccagccagaattgctgacagctgtgccctgaccagcggcaagcaggagagcgccatgagccagggcacagcccccagccagctgccctggcgctggaggctgtgctag

SEQ ID NO: 198384 - DNA, 1725 bp, Artificial Sequence
  derived and/or modified sequence
atggccagcgacctggagagcagcctgaccagcatcgactggctgccccagcttaccctgagggctactatagaaaagttaggcagcgccagccaggccggaccgccaggctcaagtaggaagtgcagccctgggagtccaaccgacccaaacgcaacgctaagcaaagatgaagccgccgtacaccaggatggtaaacctcgttattcctatgcgaccctaataacatacgcgattaacagtagtcctgcgaagaagatgaccttgtccgagatttatagatggatatgtgacaattttccatactacaaaaatgccgggatcgggtggaaaaacagcatcaggcataaccttagcctcaataagtgcttcagaaaggtgccccggcccagagacgatccaggtaagggaagctattggactattgatacttgtcccgatattagtcgcaaacgtcgtcatcctccagatgacgacctcagccaggacagccccgaacaggaggcctcgaaatctcctcgaggtggtgttgccggatcaggcgaagcatctttgccccccgagggaaaccctcagatgagcctccaaagccccaccagtatcgccagctactcccagggcactggaagcgtggacggaggcgctgtggctgcaggggccagcggcagggaatccgctgagggccctcctcccctgtataacactaaccacgattttaaattttcgtattcagagatcaatttccaagacctttcatggtctttcaggaatttatacaagtccatgctggaaaagagtagttcttcctcccagcatggttttagtagtcttctgggcgacatccctccctccaataattactatatgtaccagcagcagcagccccccccaccacagcagcaacagcaacaacaacagccgccacagcctccgcctcagcagagccagccgcagcagcagcaagcccctgcccaggggccgtctgccgtcggcggtgccccgcccctccatactccttctacagacggctgcaccccccctggcggcaaacaagcgggagccgaaggatacggccctccccccgttatggcgatgcacccacctcccctccagcatggcggttaccacccccaccagcaccaccctcacagccaccccgcccagcaaccccccccgcctcaacctcaggcccaaggtcaggcgccgatcaataacactggctttgccttcccttccgattggtgtagcaatattgactcattaaaagaatcatttaaaatggtgaatcggctcaactggagttccatagagcagagccagttctcagaactgatggaatcattgcgccaggctgagcaaaagaattggacgttggatcaacatcacattgccaatctgtgcgatagccttaatcatttcctcacccaaacgggccatgtgccaccccaaggagggacccatagacctcccgctccggctcggatcgctgactcctgcgccctgacatcagggaagcaggagagcgctatgtcacaggtgaacagctatggccacccacaagcgccgcacctgtaccccgggccttcccctatgtatcccatcccgacccaagatagcgcgggatacaaccgccctgctcatcatatggtgccaaggccatcagtgcctccacccggggctaacgaggagatacccgacgacttcgactgggacctgattacatag

SEQ ID NO: 198385 - DNA, 1581 bp, Artificial Sequence
  derived and/or modified sequence
atggccagcgacctggagagcagcctgaccagcatcgactggctgccacagctgactcttcgagccaccattgagaaacttggcagcgcaagccaggccgggcccccaggttcaagtaggaagtgttctcccggaagccctaccgacccaaatgctactttatctaaagatgaggctgctgtccatcaggatggaaaaccaaggtactcgtatgctacactgattacatatgctattaattctagtcccgccaaaaagatgaccctgagtgagatctaccgatggatatgtgataacttcccatattataagaacgccggaatcggatggaagaattccatcagacacaacttaagcctgaacaaatgctttcggaaggtgccccgcccacgtgacgatcccggcaagggaagctattggactatcgatacatgcccggacatcagcaggaagcggcggcaccctccagacgatgacctctcacaggactccccggagcaggaagcctccaaatccccccgcggtggcgtcgcgggctctggcgaggcttctctccctccagagggcaaccctcaaatgagtctgcagtcccctacaagcattgccagttactcccagggaacgggctctgtcgatgggggagcagttgcagccggggcatctgggagagagagcgcggaaggcccccctcccctgtataacactaatcatgacttcaagttttcatactccgagatcaactttcaggatctatcttggagctttcgtaatctgtacaagtctatgctagaaaagagctccagctcgagtcagcacggtttcagcagcctcttgggtgacataccaccctccaacaattactacatgtatcagcagcagcaacccccccctcctcaacagcagcagcagcaacagcagccccctcagcccccaccccagcagtcccaaccccaacagcagcaggcaccggctcaggggcctagcgccgtagggggtgctccgccactgcacaccccctccacagacggctgcacccctccgggaggaaaacaagctggcgcagaaggatacgggccccccccagtgatggccatgcacccaccaccactgcagcacggtggctaccacccccaccagcatcacccccattcccacccagctcaacaacctccaccccctcaaccccaagcccaaggacaggcaccaataaacaacactggtttcgcgttcccctctgattggtgcagtaatatcgacagtctcaaggaatctttcaaaatggtgaatcgattaaactggtcctccatcgaacagagccagtttagtgagctaatggagtccctgagacaggctgaacagaagaactggaccctggatcaacaccacattgccaatttgtgcgacagtctgaatcattttctcactcaaacaggtcacgttccccctcagggcggcacccacaggcccccggcccctgcgcgtatcgccgacagttgtgcccttacaagtggtaagcaggaatccgccatgtctcaagggacggcccccagccaactcccatggcgctggagactgtgttag

SEQ ID NO: 198386 - DNA, 1725 bp, Artificial Sequence
  derived and/or modified sequence
atggccagtgatctagagtcctcattaacttcaatagactggttgcctcagctgaccctccgtgccaccattgagaaattgggctctgcttctcaggcagggcctcctggatccagcaggaaatgctcccccggtagccctaccgatcctaacgccaccctctccaaggatgaggcagccgtgcaccaggacgggaagccaaggtacagctacgccactcttattacctatgccatcaacagttctcctgctaagaagatgaccctcagtgagatttatcgatggatctgcgataattttccatattacaaaaacgcaggaatcggttggaaaaacagcatccggcacaacctctccttgaataaatgctttcgaaaagtcccccgtcctagggacgatcccggtaagggcagctactggaccattgatacctgccctgatatctcgcgaaaaagaagacatcctccggacgatgacctgagccaggattcccccgagcaggaggcttctaagagcccacgcggtggagtcgcaggttctggcgaagcttctcttccacctgaagggaaccctcagatgagcctgcagagtccgacgagtatagcatcatacagtcagggaactgggtccgtcgacggcggagcagtcgccgcaggcgcatcgggaagggaaagtgctgaaggccctccccctttatacaacacgaaccatgactttaagtttagctacagcgagatcaactttcaggacctgtcttggtcttttcggaatctctataagtcaatgcttgagaaatcctcatctagcagccaacacggcttttcatcattgctcggcgacattccacccagcaataactactatatgtaccagcagcagcagccacctccaccccagcaacagcagcagcagcagcagcctccccaacctccccctcagcagtcacaaccccagcaacagcaggcccctgcccagggacccagtgccgttggcggagcccctcctcttcatacgccgtccactgacgggtgtactccacccggtgggaaacaggccggtgccgaaggttatggtccaccacctgtgatggctatgcatcccccacccttgcaacatgggggttatcaccctcaccaacaccaccctcatagccacccagctcagcagcctccacctccacagcctcaggcgcagggccaggcccctattaataacactggctttgcctttccttcagactggtgtagcaacatcgattctttgaaggaatctttcaaaatggtgaacagattaaactggtcgtctattgagcaatctcagtttagcgagctcatggaaagccttagacaggctgagcaaaaaaattggaccttggatcagcaccacattgcgaacttatgtgattccctgaatcacttccttacacagacgggacatgtgccacctcaagggggaacgcacagacccccagcccctgccagaatagccgatagttgcgccttaactagcggcaagcaggaatccgctatgagccaggtgaattcgtacgggcaccctcaagcaccacacttataccctggtcctagtccgatgtaccctatccccacgcaggacagtgcaggctacaatagacccgctcaccatatggtccctcggccaagcgtgccccctccaggggctaacgaggaaatccccgacgactttgactgggaccttatcacatag

SEQ ID NO: 198387 - DNA, 1581 bp, Artificial Sequence
  derived and/or modified sequence
atggccagcgatctggaatcaagccttaccagtattgactggttgcctcagctgaccctgagagctactatcgaaaaactgggatccgcaagccaggcagggcctcctggaagttccaggaagtgttcccccggatcccccacagaccctaacgctacgctgtcaaaggacgaagcagccgtgcaccaagatgggaagcctcggtatagctacgcaactctgattacctacgccatcaacagctctcccgctaagaagatgacactgagtgagatatatcgctggatctgcgataatttcccctactacaagaacgcaggaatcggctggaagaactccatccgccataatttgtctctcaataagtgcttcagaaaggtaccgcgaccccgtgacgacccgggaaagggaagctattggactatagacacctgcccagacatcagcagaaagagaagacaccctccggacgacgatctctctcaggattcgcctgagcaggaagcttccaagtccccgcgtggcggtgtcgcgggttctggagaggcatctctccctccggagggaaacccccagatgagtcttcaatctccaacttcaattgcctcttattcgcaggggaccggaagcgtggacggcggagctgtcgccgctggcgctagtgggagagagtccgcggagggacccccacctctgtataacacgaaccacgacttcaaattttcctacagcgaaattaacttccaagatcttagctggtcgttcagaaatctgtacaagtctatgctagagaagtcatcaagctccagccagcacggcttctcctctcttcttggggatattcctccttcaaacaattactatatgtaccagcagcagcaaccaccgcctccccagcagcaacagcaacagcaacagccacctcagccccctccgcagcagagccaaccccagcagcagcaggctcccgctcaaggaccctccgccgtgggtggtgcaccccctctgcacaccccctcaaccgacggctgcacccccccaggcggtaagcaagcgggagctgagggctacgggccacccccagtgatggcaatgcaccccccaccactccagcacggagggtaccaccctcaccagcatcacccgcattcccacccagcacagcagcccccacctccacagccgcaggcccagggccaagccccaatcaacaatactggtttcgcctttcccagcgattggtgcagcaatattgatagcctcaaggagtccttcaaaatggtgaaccgcttaaattggtctagcattgaacagtcacagttctccgagctcatggaatccctccggcaagccgagcagaaaaactggacgctcgatcagcaccacatcgctaatctctgtgattccctgaatcatttcttaacacagaccggccacgtacctcctcaaggtggaactcaccgacctcccgcacctgccaggatcgccgactcttgtgccctgacctcgggaaaacaagaaagcgcaatgtctcagggcaccgctcctagccagctcccgtggcgatggcgcctctgctag

SEQ ID NO: 198388 - DNA, 1725 bp, Artificial Sequence
  derived and/or modified sequence
atggcttccgacctagagtcatctttaacatccattgactggctccctcagctcacacttagagctaccatcgaaaaactcggcagtgccagccaggccggacccccagggtcttcaaggaaatgtagcccaggcagtccgaccgaccctaacgccactctaagtaaggacgaagctgccgtacatcaagacgggaaacccagatactcctacgccaccctcattacctacgccattaacagcagtcctgccaagaagatgactttgtcagaaatttataggtggatatgtgacaatttcccctattacaagaatgccggcataggatggaagaatagcattcgccacaacctcagtttaaataaatgcttcaggaaggtccccaggcccagagacgacccaggaaaaggatcttactggaccatagatacctgtccagatattagcaggaagcggcggcacccgccagacgacgatctttcccaggacagccccgagcaggaagcttctaagtcaccccggggcggagttgctgggagcggcgaagctagtctgcctcctgagggcaacccacagatgtcactccaatccccaacgtcgatcgcatcctattcacaggggacgggtagcgtagatggcggagcggtggccgccggggcatccggtcgcgagtctgccgaaggcccacctcccctctacaacacaaatcacgactttaaattctcttacagtgagataaattttcaggacttgtcgtggtcattccgcaacctgtataaaagcatgctcgagaagtcatcttcgagttctcagcacggatttagcagcctgttaggagacattcctccaagtaataactattacatgtaccagcaacagcagcctcctcccccacaacaacagcaacaacagcaacaaccaccacagcctcccccccagcaatcccagccacagcagcagcaggcccctgcacagggccccagtgctgtcggaggagcaccacctctgcacactccgagcactgatgggtgcaccccaccaggcggaaaacaggccggggccgagggttacgggccgcccccagtgatggccatgcaccctccaccgttacagcacgggggctatcacccacaccagcatcatccccacagccatcccgcgcaacagccccctccaccgcagccccaggctcagggtcaggcacctatcaacaacacaggttttgcattcccctccgactggtgcagcaatatagattctctgaaagagagtttcaaaatggtcaaccgcctgaattggtcttctatcgagcaaagtcagtttagtgagttaatggagagccttcgccaggccgagcagaagaactggactctggatcagcatcacatcgccaacctgtgtgacagcctcaaccacttcctcacacagaccggccatgtgcctcctcagggtggaactcaccgtccccctgcccctgccagaattgcagacagctgtgctctaacttccgggaaacaagagtcagcaatgagtcaagtgaactcatatgggcatccgcaggcgccacatctgtaccctggaccctcacccatgtaccctatccctacgcaggattccgccggttataacagacctgcccaccacatggttccgcggccttcagtgcctcctccaggcgccaacgaagagattcctgacgactttgactgggaccttattacatag

SEQ ID NO: 198389 - DNA, 1725 bp, Artificial Sequence
  derived and/or modified sequence
atggcatctgacttagaatcctctctgacatctattgattggctcccacagttaactttgagggcgacaattgaaaaacttggcagcgctagccaggcaggaccaccaggctcttctcgtaaatgcagtccaggatctcctaccgacccaaacgctactctctctaaagacgaggctgccgtccaccaggacggcaaacccaggtactcgtatgctaccctgattacctatgccatcaacagctcccccgctaaaaagatgacactcagtgaaatatacagatggatttgcgataattttccttactataaaaacgctggcatcggttggaagaactcaatcaggcacaatctcagtctcaacaagtgtttccgtaaggtaccacgtccccgcgatgaccctgggaaagggagttactggaccatcgacacatgtccagatattagcagaaagagaagacaccctccagacgatgatctctcacaggacagtccagaacaggaagcctcaaagtcccctcgcggcggggttgctggctcgggggaagctagcctaccaccagagggcaacccccagatgtcactacagtctcccacttctatcgcatcttactctcagggaacaggcagcgtagacggaggtgccgtagccgctggggcttcaggtcgcgaatccgctgaaggtccaccacctctgtacaataccaatcatgactttaagttttcatactccgagattaacttccaggacctctcttggtcttttcgaaacctgtacaagagcatgttggagaaaagctcctccagcagtcaacacggctttagctccctcttaggagacatcccccccagtaacaactactacatgtatcagcaacagcagccacctccccctcagcagcaacagcagcagcagcaaccaccacagccgcccccccagcagtctcaaccacaacaacaacaggctccagcacaaggcccctccgccgtcggaggcgcacctcctctgcatacgccctcaacagacggctgtacgccacccggcggaaaacaggcaggggctgaaggctacgggccaccaccagtgatggctatgcacccaccccctctgcagcatggtgggtaccacccgcaccagcaccatccccactcgcaccccgcccaacaacctcctcccccccagcctcaggctcaaggacaggcccccattaataacaccggttttgctttcccatcagactggtgttccaacatagactccttgaaagagtccttcaaaatggttaatagactgaattggtcttcaattgagcagtctcaattttcagaactgatggaatctctgagacaggctgagcagaagaactggacactagaccaacatcatatcgctaacctttgcgattccctgaatcacttcttaacccaaaccggccacgtgccccctcagggaggaacacaccgcccacctgcccccgccagaatcgctgattcatgcgccctgacatccggcaagcaagaatccgcaatgagccaggttaattcttatggccatccgcaggcccctcatctgtacccagggccttctccaatgtaccctatcccgacccaagactccgcgggctataacaggccagcccatcatatggtccctcgaccgtctgtcccccctccaggagctaatgaagaaattcctgatgactttgactgggatctgatcacatag

SEQ ID NO: 198390 - DNA, 5523 bp, Artificial Sequence
  derived and/or modified sequence
ggagccggggcctgcagcggagccgagccgagcccgagcccgcgccgagccctgacactgtctgcccgccttctggctccccgggagcccagactggtcggagcccgagcggtggcagcgcggggagccccacgcgccgaagggagcggacccgacaggacggccctagaggaggtgctgccgccacagtagcagggaccggagtctcgagccgcggcctcccggaccgtgctgcccaggccagctcagggacagccgggagtacgaaagccccaccctctggggcaccccgggagcggaggcgggagcggggacgcgagcaacctctccccctgttggagagaaaagacccttaccactcgggtgagggaaagaagagacccctggaggggacgcctctctcctgcctagaggcgaggaagacccctgtactggccggggaggagacccccagaagtggaaagaagggagctttccgtagggaagcagagtgagaccaccctagcgcgcccccgcccctccaaacacacactctcaacagttcaggactttggaggcaaagagagacggggctgtgcctgtggagtaggcaccctcggcccaccactattcacaggagacaggagtccttacgttcagaagccactccagggaaagaagaggaatcggctttcagccttctggagaggggaagacctccccctcaacttcctcgtgcctagacagtggaacggggtggagcccctccgctcctatctccagcagacagaaagagccctccacctcagaaagatccagtttgggggggaggggaactcccccaagggggaggagacaactcctggttgggagaggctcctcccctcctcccccgggtaacaagcagggtgtggggggtgtgccaccttccccaagtaggacctccttctcctccccctccccctcctccaaccttgactcctcatcctcaggggacccagttcccctcaccaacttgggaggctcagcctcgtccaggaagagccactgaggatgagagccgtcacctgcctctgaagaggggaatccctccaaccccaaactccagtaccaggtggttccctccctttgccggaggaaccttggagacagaacccagaagtaccatggcttctgacctagagagtagcctcacctccatagactggctcccccagctgaccctccgagctaccattgagaagcttggaagtgcctcccaggctgggcctcccgggagcagccgcaagtgttcaccagggtcacccacagatcctaatgccaccctgagcaaagacgaggcagcagtgcaccaggacggcaagccacgatacagctatgccactctcatcacctatgccatcaactcctctccagccaagaagatgaccctcagcgagatttaccgctggatctgtgataacttcccctattacaagaatgctggcattggttggaagaattcaatacggcacaacctttctctcaacaagtgtttccggaaggtgcccagacctcgggatgaccctgggaagggttcctattggacaattgacacctgccctgacatttcccgaaagagaagacaccctccagatgatgatctgtcccaagactcaccagaacaggaggcaagcaagagcccacggggaggcgttgcagggagtggagaagcctcactgcctcctgaggggaatccgcagatgtcacttcagagccccacatctatagccagctacagccagggcacaggatctgtggatggtggagcagtggcagcaggggcttcaggccgagaaagtgctgagggtccccctcccctctataacaccaaccatgactttaaattctcctactcagagatcaactttcaggatctaagctggtccttccgcaacctctataagtccatgctggagaagtcctcttcctcctctcagcacggcttttcttctctcctgggggacatcccaccctcgaacaactactacatgtatcagcagcagcagccaccgccacctcaacagcagcagcagcagcagcagccgccacagccacctccccagcagtcccagccacagcagcagcaggcacctgcccagggcccctcagctgtagggggtgctcctccactgcacaccccaagcacagatggttgtaccccaccagggggaaagcaagctggggcggaaggctatgggcctccccctgtaatggccatgcatccacccccgctgcagcatggaggctaccaccctcatcagcaccatccccactcccaccctgcccagcagccaccacctccacagccacaggcacaaggccaggctcccatcaacaacactggctttgcctttccttctgactggtgctctaatattgactctttaaaggaaagcttcaagatggtgaatcggctcaattggtccagcattgagcagtcacaattctcagaactgatggagagtctacgacaggcagagcagaagaactggaccctcgaccagcatcacattgccaatctgtgtgactccctcaaccacttccttactcagactggtcacgtgccccctcaagggggtacccaccgcccaccagcccctgcccgtattgctgactcctgtgccctcaccagtggcaaacaggagtcagccatgagccaagtgaactcttatgggcacccacaagctccccacctctaccctggcccatcaccaatgtacccaatccccacccaggactcagcaggatacaatcgcccagcacaccatatggtccctcggccatcagtgccacctcctggtgccaatgaggagatccctgatgacttcgactgggacttgatcacttagtgcatcacagagtgtggacatcagcccagggccgcgtggtgaaatctggcagtggggaaagagcaaccccagcccgtcccttccccccgtctgtatatagacatatatcctctttttgttctttctctgtcagagaagccactgcaagatgctgccgaagataaccctctctttcctgcctcattcttctctcttccttcctgttttttcctagttcttttattattattcttatattattattattattattggttatatactgtccatagtctcctgtccctacatcatggatcatgtccaccttttgctaatttaaaatcatcaggctggaagatgaagccatgatagctacagagaaaggttttagactccagtttacctttctcttggagaaactcaatgctaatcccaccttttggccctaaattgttttttgttcccatcagtttcaggccaggactggagaggccacattaccaagtagaaagggtctgaaacattacttggcagccaagaatttggaggttttaaaatggtgctaattctgtcctctgaggtcttccttgtccctttataccttcaatccttacttctgccagtctgtatttcctatcaagggtgaaagtgatgatggtggtgcaggagggtgacaataaaatcctagtggaattggagaccattggaagggatggaatataagtcagtgtgaaactgagtatacactgccatgttacatcagtgtccattggcttgttttgagcctgttctctaagaagataggattggttttagcccaaactctgcttctatggtagggcatgaggacaactattcagcatggttttagcttcttggagatgattccaacttaactattttggctttttaaacataattttctctgaaaattaattgtggctcttatttgcatttacgaatgatcttcccatccctttttcccattcagcaaatattagtttgtcctcctttaattgtttgcccaaatcttccacccatcttttttcttccctcattttctgggattctcaagaaagaaaaagtaacccattatcactctgagtttcgtcgtgccctgagacatgatgggaatctcattcccacctctcatagcagagccaaacctttagtgttggtggtaggaggatggggagaggaaaaaagagctggcaaagaaatggatagggaatattttagttctttaaatatataggcagatgcttctcttggaatccagatcatctggctgaagcttttgcaagtaggctttgaggggtgaaggagattggtggaggagagtaaataatctagaggcaagagttcagtgagggccaagggggacccccagaaaaaggtatggagctaactcatctcttttacaaggggtggccatgacttactgttgcaaagtactcagtgtatatttaatgttgattgttgaattttagttacgagagggaagaacaattttacttctgtccttatttcacttgctgaaaagctgtgggacaaaatgtatggaatagacaaggccactttctttgtgatttctgcttttcatgcatattattttatttacccataatttccaagaggtttggcgttccgctctcctgcttttttctttcatccacccctttcctttttttggaagggggttatatatgagagttcattgaagaagtccagtgaggctgaagtaaaggggcaagatagggcagttaactaaagagcactttatttctttgaagcctttctaagaaagaaatgggggtgcgagtggcttgaatctcccatgatgttggagggcacttagtggggttgaagtatgacataatatttcccattggggaaaggagaatttctcttagagggtggcaaaatgcctttgcccagtgtccctattttaggcatcttttccttccttattccttccagtcagggtgtgtcctatacaaaacttcccatcagttctcctcaatattccccatttgtaaatgatcacttctcttttctaaacccttttcctgttcagatccatacaggatttgcaagggtaggatcatacatgcaaatgccccttgttcatctgtgtcttctgcaaactagtctcatgaagaattctggcgtgcagccagggtagctgaagtttgggtctgggactggagattggccattaggcctcctgagattccagctcccttccaccaagcccagtcttgctacgtggcacagggcaaacctgactccctttgggcctcagtttcccctccccttcatgaaatgaaaagaatactactttttcttgttggtctagcattgctggacacaaagtgtagtcattattgttgtattgggtgatgtgtgcaaaactgcagaagctcactgcctataagaggaaataagagagaaagtggaggagagggacaaaaggagtaattatttggtatagatccacccatcccaacctttctctcctcagtccctgctcctcatgtttctggtttggtgagtcctttgtgccaccacccataatgctttgcattgctgcatcctgggaagggggtatatggtctcacaagttgttgtcattgtttttttgcatgctttcttaataaaaaaaaaaaaagaa

SEQ ID NO: 198391 - DNA, 2676 bp, Artificial Sequence
  derived and/or modified sequence
aagaggaatcggctttcagccttctggagaggggaagacctccccctcaacttcctcgtgcctagacagtggaacggggtggagcccctccgctcctatctccagcagacagaaagagccctccacctcagaaagatccagtttgggggggaggggaactcccccaagggggaggagacaactcctggttgggagaggctcctcccctcctcccccgggtaacaagcagggtgtggggggtgtgccaccttccccaagtaggacctccttctcctccccctccccctcctccaaccttgactcctcatcctcaggggacccagttcccctcaccaacttgggaggctcagcctcgtccaggaagagccactgaggatgagagccgtcacctgcctctgaagaggggaatccctccaaccccaaactccagtaccaggtggttccctccctttgccggaggaaccttggagacagaacccagaagtaccatggcttctgacctagagagtagcctcacctccatagactggctcccccagctgaccctccgagctaccattgagaagcttggaagtgcctcccaggctgggcctcccgggagcagccgcaagtgttcaccagggtcacccacagatcctaatgccaccctgagcaaagacgaggcagcagtgcaccaggacggcaagccacgatacagctatgccactctcatcacctatgccatcaactcctctccagccaagaagatgaccctcagcgagatttaccgctggatctgtgataacttcccctattacaagaatgctggcattggttggaagaattcaatacggcacaacctttctctcaacaagtgtttccggaaggtgcccagacctcgggatgaccctgggaagggttcctattggacaattgacacctgccctgacatttcccgaaagagaagacaccctccagatgatgatctgtcccaagactcaccagaacaggaggcaagcaagagcccacggggaggcgttgcagggagtggagaagcctcactgcctcctgaggggaatccgcagatgtcacttcagagccccacatctatagccagctacagccagggcacaggatctgtggatggtggagcagtggcagcaggggcttcaggccgagaaagtgctgagggtccccctcccctctataacaccaaccatgactttaaattctcctactcagagatcaactttcaggatctaagctggtccttccgcaacctctataagtccatgctggagaagtcctcttcctcctctcagcacggcttttcttctctcctgggggacatcccaccctcgaacaactactacatgtatcagcagcagcagccaccgccacctcaacagcagcagcagcagcagcagccgccacagccacctccccagcagtcccagccacagcagcagcaggcacctgcccagggcccctcagctgtagggggtgctcctccactgcacaccccaagcacagatggttgtaccccaccagggggaaagcaagctggggcggaaggctatgggcctccccctgtaatggccatgcatccacccccgctgcagcatggaggctaccaccctcatcagcaccatccccactcccaccctgcccagcagccaccacctccacagccacaggcacaaggccaggctcccatcaacaacactggctttgcctttccttctgactggtgctctaatattgactctttaaaggaaagcttcaagatggtgaatcggctcaattggtccagcattgagcagtcacaattctcagaactgatggagagtctacgacaggcagagcagaagaactggaccctcgaccagcatcacattgccaatctgtgtgactccctcaaccacttccttactcagactggtcacgtgccccctcaagggggtacccaccgcccaccagcccctgcccgtattgctgactcctgtgccctcaccagtggcaaacaggagtcagccatgagccaaggtactgcaccaagccagttgccatggaggtggagactatgttgaaaaggaagcataggagaaaggcaaaagagaactgagagaaaggattttatggggcagtgacccaaattgagcagtggaactagtttatcagttgactgaatatctgttgaatcagtgaagtcctaaactgaaaaatgcaaaagaaatagactgtatgattcctttttagacctcagtttgggagatcagaattgtttaagaaaagggaggagatttgttagagaaaggctgtattttaaatttgcgtctcagtaatccctaccgcctgggtgataccggatgaaatggtggttctatgcttatgtgatgttcaaactagtgaaatgagagagatgtcatgattatgttcctgtttcttgctttttgtttttgagatggggtctcgctctgtcgcccaggctctggagtgcagtggtgtgatcacggctcactgcaaccttgacccctggagctcaggtgatcctcccactttagcctcctgagtagctgggactacaggtgtgtaccaccatgcccagctaattttttttttgtattttgtgtatagctggggtttcaccgtgtcgcccaggctatcttcaaactcttggactcaagggatctaccc

SEQ ID NO: 198392 - DNA, 1725 bp, Artificial Sequence
  derived and/or modified sequence
atggccagcgacctggagagcagcctgaccagcatcgactggctgccccagctgaccctgagagccaccatcgagaagctgggcagcgccagccaggccggcccccccggcagcagcagaaagtgcagccccggcagccccaccgaccccaacgccaccctgagcaaggacgaggccgccgtgcaccaggacggcaagcccagatacagctacgccaccctgatcacctacgccatcaacagcagccccgccaagaagatgaccctgagcgagatctacagatggatctgcgacaacttcccctactacaagaacgccggcatcggctggaagaacagcatcagacacaacctgagcctgaacaagtgcttcagaaaggtgcccagacccagagacgaccccggcaagggcagctactggaccatcgacacctgccccgacatcagcagaaagagaagacacccccccgacgacgacctgagccaggacagccccgagcaggaggccagcaagagccccagaggcggcgtggccggcagcggcgaggccagcctgccccccgagggcaacccccagatgagcctgcagagccccaccagcatcgccagctacagccagggcaccggcagcgtggacggcggcgccgtggccgccggcgccagcggcagagagagcgccgagggccccccccccctgtacaacaccaaccacgacttcaagttcagctacagcgagatcaacttccaggacctgagctggagcttcagaaacctgtacaagagcatgctggagaagagcagcagcagcagccagcacggcttcagcagcctgctgggcgacatcccccccagcaacaactactacatgtaccagcagcagcagcccccccccccccagcagcagcagcagcagcagcagcccccccagccccccccccagcagagccagccccagcagcagcaggcccccgcccagggccccagcgccgtgggcggcgccccccccctgcacacccccagcaccgacggctgcaccccccccggcggcaagcaggccggcgccgagggctacggccccccccccgtgatggccatgcaccccccccccctgcagcacggcggctaccacccccaccagcaccacccccacagccaccccgcccagcagcccccccccccccagccccaggcccagggccaggcccccatcaacaacaccggcttcgccttccccagcgactggtgcagcaacatcgacagcctgaaggagagcttcaagatggtgaacagactgaactggagcagcatcgagcagagccagttcagcgagctgatggagagcctgagacaggccgagcagaagaactggaccctggaccagcaccacatcgccaacctgtgcgacagcctgaaccacttcctgacccagaccggccacgtgcccccccagggcggcacccacagaccccccgcccccgccagaatcgccgacagctgcgccctgaccagcggcaagcaggagagcgccatgagccaggtgaacagctacggccacccccaggccccccacctgtaccccggccccagccccatgtaccccatccccacccaggacagcgccggctacaacagacccgcccaccacatggtgcccagacccagcgtgcccccccccggcgccaacgaggagatccccgacgacttcgactgggacctgatcacctag

SEQ ID NO: 198393 - DNA, 1581 bp, Artificial Sequence
  derived and/or modified sequence
atggccagcgacctggagagcagcctgaccagcatcgactggctgccccagctgaccctgagagccaccatcgagaagctgggcagcgccagccaggccggcccccccggcagcagcagaaagtgcagccccggcagccccaccgaccccaacgccaccctgagcaaggacgaggccgccgtgcaccaggacggcaagcccagatacagctacgccaccctgatcacctacgccatcaacagcagccccgccaagaagatgaccctgagcgagatctacagatggatctgcgacaacttcccctactacaagaacgccggcatcggctggaagaacagcatcagacacaacctgagcctgaacaagtgcttcagaaaggtgcccagacccagagacgaccccggcaagggcagctactggaccatcgacacctgccccgacatcagcagaaagagaagacacccccccgacgacgacctgagccaggacagccccgagcaggaggccagcaagagccccagaggcggcgtggccggcagcggcgaggccagcctgccccccgagggcaacccccagatgagcctgcagagccccaccagcatcgccagctacagccagggcaccggcagcgtggacggcggcgccgtggccgccggcgccagcggcagagagagcgccgagggccccccccccctgtacaacaccaaccacgacttcaagttcagctacagcgagatcaacttccaggacctgagctggagcttcagaaacctgtacaagagcatgctggagaagagcagcagcagcagccagcacggcttcagcagcctgctgggcgacatcccccccagcaacaactactacatgtaccagcagcagcagcccccccccccccagcagcagcagcagcagcagcagcccccccagccccccccccagcagagccagccccagcagcagcaggcccccgcccagggccccagcgccgtgggcggcgccccccccctgcacacccccagcaccgacggctgcaccccccccggcggcaagcaggccggcgccgagggctacggccccccccccgtgatggccatgcaccccccccccctgcagcacggcggctaccacccccaccagcaccacccccacagccaccccgcccagcagcccccccccccccagccccaggcccagggccaggcccccatcaacaacaccggcttcgccttccccagcgactggtgcagcaacatcgacagcctgaaggagagcttcaagatggtgaacagactgaactggagcagcatcgagcagagccagttcagcgagctgatggagagcctgagacaggccgagcagaagaactggaccctggaccagcaccacatcgccaacctgtgcgacagcctgaaccacttcctgacccagaccggccacgtgcccccccagggcggcacccacagaccccccgcccccgccagaatcgccgacagctgcgccctgaccagcggcaagcaggagagcgccatgagccagggcaccgcccccagccagctgccctggagatggagactgtgctag

SEQ ID NO: 198394 - RNA, 1725 nt, Artificial Sequence
  derived and/or modified sequence
auggcuuccgaccuagagucaucuuuaacauccauugacuggcucccucagcucacacuuagagcuaccaucgaaaaacucggcagugccagccaggccggacccccagggucuucaaggaaauguagcccaggcaguccgaccgacccuaacgccacucuaaguaaggacgaagcugccguacaucaagacgggaaacccagauacuccuacgccacccucauuaccuacgccauuaacagcaguccugccaagaagaugacuuugucagaaauuuauagguggauaugugacaauuuccccuauuacaagaaugccggcauaggauggaagaauagcauucgccacaaccucaguuuaaauaaaugcuucaggaagguccccaggcccagagacgacccaggaaaaggaucuuacuggaccauagauaccuguccagauauuagcaggaagcggcggcacccgccagacgacgaucuuucccaggacagccccgagcaggaagcuucuaagucaccccggggcggaguugcugggagcggcgaagcuagucugccuccugagggcaacccacagaugucacuccaauccccaacgucgaucgcauccuauucacaggggacggguagcguagauggcggagcgguggccgccggggcauccggucgcgagucugccgaaggcccaccuccccucuacaacacaaaucacgacuuuaaauucucuuacagugagauaaauuuucaggacuugucguggucauuccgcaaccuguauaaaagcaugcucgagaagucaucuucgaguucucagcacggauuuagcagccuguuaggagacauuccuccaaguaauaacuauuacauguaccagcaacagcagccuccucccccacaacaacagcaacaacagcaacaaccaccacagccucccccccagcaaucccagccacagcagcagcaggccccugcacagggccccagugcugucggaggagcaccaccucugcacacuccgagcacugaugggugcaccccaccaggcggaaaacaggccggggccgaggguuacgggccgcccccagugauggccaugcacccuccaccguuacagcacgggggcuaucacccacaccagcaucauccccacagccaucccgcgcaacagcccccuccaccgcagccccaggcucagggucaggcaccuaucaacaacacagguuuugcauuccccuccgacuggugcagcaauauagauucucugaaagagaguuucaaaauggucaaccgccugaauuggucuucuaucgagcaaagucaguuuagugaguuaauggagagccuucgccaggccgagcagaagaacuggacucuggaucagcaucacaucgccaaccugugugacagccucaaccacuuccucacacagaccggccaugugccuccucaggguggaacucaccgucccccugccccugccagaauugcagacagcugugcucuaacuuccgggaaacaagagucagcaaugagucaagugaacucauaugggcauccgcaggcgccacaucuguacccuggacccucacccauguacccuaucccuacgcaggauuccgccgguuauaacagaccugcccaccacaugguuccgcggccuucagugccuccuccaggcgccaacgaagagauuccugacgacuuugacugggaccuuauuacauag

SEQ ID NO: 198395 - RNA, 1725 nt, Artificial Sequence
  derived and/or modified sequence
auggcaucugacuuagaauccucucugacaucuauugauuggcucccacaguuaacuuugagggcgacaauugaaaaacuuggcagcgcuagccaggcaggaccaccaggcucuucucguaaaugcaguccaggaucuccuaccgacccaaacgcuacucucucuaaagacgaggcugccguccaccaggacggcaaacccagguacucguaugcuacccugauuaccuaugccaucaacagcucccccgcuaaaaagaugacacucagugaaauauacagauggauuugcgauaauuuuccuuacuauaaaaacgcuggcaucgguuggaagaacucaaucaggcacaaucucagucucaacaaguguuuccguaagguaccacguccccgcgaugacccugggaaagggaguuacuggaccaucgacacauguccagauauuagcagaaagagaagacacccuccagacgaugaucucucacaggacaguccagaacaggaagccucaaaguccccucgcggcgggguugcuggcucgggggaagcuagccuaccaccagagggcaacccccagaugucacuacagucucccacuucuaucgcaucuuacucucagggaacaggcagcguagacggaggugccguagccgcuggggcuucaggucgcgaauccgcugaagguccaccaccucuguacaauaccaaucaugacuuuaaguuuucauacuccgagauuaacuuccaggaccucucuuggucuuuucgaaaccuguacaagagcauguuggagaaaagcuccuccagcagucaacacggcuuuagcucccucuuaggagacaucccccccaguaacaacuacuacauguaucagcaacagcagccaccucccccucagcagcaacagcagcagcagcaaccaccacagccgcccccccagcagucucaaccacaacaacaacaggcuccagcacaaggccccuccgccgucggaggcgcaccuccucugcauacgcccucaacagacggcuguacgccacccggcggaaaacaggcaggggcugaaggcuacgggccaccaccagugauggcuaugcacccacccccucugcagcaugguggguaccacccgcaccagcaccauccccacucgcaccccgcccaacaaccuccucccccccagccucaggcucaaggacaggcccccauuaauaacaccgguuuugcuuucccaucagacugguguuccaacauagacuccuugaaagaguccuucaaaaugguuaauagacugaauuggucuucaauugagcagucucaauuuucagaacugauggaaucucugagacaggcugagcagaagaacuggacacuagaccaacaucauaucgcuaaccuuugcgauucccugaaucacuucuuaacccaaaccggccacgugcccccucagggaggaacacaccgcccaccugcccccgccagaaucgcugauucaugcgcccugacauccggcaagcaagaauccgcaaugagccagguuaauucuuauggccauccgcaggccccucaucuguacccagggccuucuccaauguacccuaucccgacccaagacuccgcgggcuauaacaggccagcccaucauauggucccucgaccgucuguccccccuccaggagcuaaugaagaaauuccugaugacuuugacugggaucugaucacauag

SEQ ID NO: 198396 - protein, 1610 aa, Artificial Sequence
  derived and/or modified sequence
MNTPKEEFQDWPIVRIAAHLPDLIVYGHFSPERPFMDYFDGVLMFVDISGFTAMTEKFSSAMYMDRGAEQLVEILNYHISAIVEKVLIFGGDILKFAGDALLALWRVERKQLKNIITVVIKCSLEIHGLFETQEWEEGLDIRVKIGLAAGHISMLVFGDETHSHFLVIGQAVDDVRLAQNMAQMNDVILSPNCWQLCDRSMIEIESVPDQRAVKVNFLKPPPNFNFDEFFTKCTTFMHYYPSGEHKNLLRLACTLKPDPELEMSLQKYVMESILKQIDNKQLQGYLSELRPVTIVFVNLMFEDQDKAEEIGPAIQDAYMHITSVLKIFQGQINKVFMFDKGCSFLCVFGFPGEKVPDELTHALECAMDIFDFCSQVHKIQTVSIGVASGIVFCGIVGHTVRHEYTVIGQKVNLAARMMMYYPGIVTCDSVTYNGSNLPAYFFKELPKKVMKGVADSGPLYQYWGRTEKVMFGMACLICNRKEDYPLLGRNKEINYFMYTMKKFLISNSSQVLMYEGLPGYGKSQILMKIEYLAQGKNHRIIAISLNKISFHQTFYTIQMFMANVLGLDTCKHYKERQTNLRNKVMTLLDEKFYCLLNDIFHVQFPISREISRMSTLKKQKQLEILFMKILKLIVKEERIIFIIDEAQFVDSTSWRFMEKLIRTLPIFIIMSLCPFVNIPCAAARAVIKNRNTTYIVIGAVQPNDISNKICLDLNVSCISKELDSYLGEGSCGIPFYCEELLKNLEHHEVLVFQQTESEEKTNRTWNNLFKYSIKLTEKLNMVTLHSDKESEEVCHLTSGVRLKNLSPPTSLKEISLIQLDSMRLSHQMLVRCAAIIGLTFTTELLFEILPCWNMKMMIKTLATLVESNIFYCFRNGKELQKALKQNDPSFEVHYRSLSLKPSEGMDHGEEEQLRELENEVIECHRIRFCNPMMQKTAYELWLKDQRKAMHLKCARFLEEDAHRCDHCRGRDFIPYHHFTVNIRLNALDMDAIKKMAMSHGFKTEEKLILSNSEIPETSAFFPENRSPEEIREKILNFFDHVLTKMKTSDEDIIPLESCQCEEILEIVILPLAHHFLALGENDKALYYFLEIASAYLIFCDNYMAYMYLNEGQKLLKTLKKDKSWSQTFESATFYSLKGEVCFNMGQIVLAKKMLRKALKLLNRIFPYNLISLFLHIHVEKNRHFHYVNRQAQESPPPGKKRLAQLYRQTVCLSLLWRIYSYSYLFHCKYYAHLAVMMQMNTALETQNCFQIIKAYLDYSLYHHLAGYKGVWFKYEVMAMEHIFNLPLKGEGIEIVAYVAETLVFNKLIMGHLDLAIELGSRALQMWALLQNPNRHYQSLCRLSRCLLLNSRYPQLIQVLGRLWELSVTQEHIFSKAFFYFVCLDILLYSGFVYRTFEECLEFIHQYENNRILKFHSGLLLGLYSSVAIWYARLQEWDNFYKFSNRAKNLLPRRTMTLTYYDGISRYMEGQVLHLQKQIKEQSENAQASGEELLKNLENLVAQNTTGPVFCPRLYHLMAYVCILMGDGQKCGLFLNTALRLSETQGNILEKCWLNMNKESWYSTSELKEDQWLQTILSLPSWEKIVAGRVNIQDLQKNKFLMRANTVDNHF

SEQ ID NO: 198397 - DNA, 4833 bp, Artificial Sequence
  derived and/or modified sequence
atgaacacccccaaggaggagttccaggactggcccatcgtgagaatcgccgcccacctgcccgacctgatcgtgtacggccacttcagccccgagagacccttcatggactacttcgacggcgtgctgatgttcgtggacatcagcggcttcaccgccatgaccgagaagttcagcagcgccatgtacatggacagaggcgccgagcagctggtggagatcctgaactaccacatcagcgccatcgtggagaaggtgctgatcttcggcggcgacatcctgaagttcgccggcgacgccctgctggccctgtggagagtggagagaaagcagctgaagaacatcatcaccgtggtgatcaagtgcagcctggagatccacggcctgttcgagacccaggagtgggaggagggcctggacatcagagtgaagatcggcctggccgccggccacatcagcatgctggtgttcggcgacgagacccacagccacttcctggtgatcggccaggccgtggacgacgtgagactggcccagaacatggcccagatgaacgacgtgatcctgagccccaactgctggcagctgtgcgacagaagcatgatcgagatcgagagcgtgcccgaccagagagccgtgaaggtgaacttcctgaagcccccccccaacttcaacttcgacgagttcttcaccaagtgcaccaccttcatgcactactaccccagcggcgagcacaagaacctgctgagactggcctgcaccctgaagcccgaccccgagctggagatgagcctgcagaagtacgtgatggagagcatcctgaagcagatcgacaacaagcagctgcagggctacctgagcgagctgagacccgtgaccatcgtgttcgtgaacctgatgttcgaggaccaggacaaggccgaggagatcggccccgccatccaggacgcctacatgcacatcaccagcgtgctgaagatcttccagggccagatcaacaaggtgttcatgttcgacaagggctgcagcttcctgtgcgtgttcggcttccccggcgagaaggtgcccgacgagctgacccacgccctggagtgcgccatggacatcttcgacttctgcagccaggtgcacaagatccagaccgtgagcatcggcgtggccagcggcatcgtgttctgcggcatcgtgggccacaccgtgagacacgagtacaccgtgatcggccagaaggtgaacctggccgccagaatgatgatgtactaccccggcatcgtgacctgcgacagcgtgacctacaacggcagcaacctgcccgcctacttcttcaaggagctgcccaagaaggtgatgaagggcgtggccgacagcggccccctgtaccagtactggggcagaaccgagaaggtgatgttcggcatggcctgcctgatctgcaacagaaaggaggactaccccctgctgggcagaaacaaggagatcaactacttcatgtacaccatgaagaagttcctgatcagcaacagcagccaggtgctgatgtacgagggcctgcccggctacggcaagagccagatcctgatgaagatcgagtacctggcccagggcaagaaccacagaatcatcgccatcagcctgaacaagatcagcttccaccagaccttctacaccatccagatgttcatggccaacgtgctgggcctggacacctgcaagcactacaaggagagacagaccaacctgagaaacaaggtgatgaccctgctggacgagaagttctactgcctgctgaacgacatcttccacgtgcagttccccatcagcagagagatcagcagaatgagcaccctgaagaagcagaagcagctggagatcctgttcatgaagatcctgaagctgatcgtgaaggaggagagaatcatcttcatcatcgacgaggcccagttcgtggacagcaccagctggagattcatggagaagctgatcagaaccctgcccatcttcatcatcatgagcctgtgccccttcgtgaacatcccctgcgccgccgccagagccgtgatcaagaacagaaacaccacctacatcgtgatcggcgccgtgcagcccaacgacatcagcaacaagatctgcctggacctgaacgtgagctgcatcagcaaggagctggacagctacctgggcgagggcagctgcggcatccccttctactgcgaggagctgctgaagaacctggagcaccacgaggtgctggtgttccagcagaccgagagcgaggagaagaccaacagaacctggaacaacctgttcaagtacagcatcaagctgaccgagaagctgaacatggtgaccctgcacagcgacaaggagagcgaggaggtgtgccacctgaccagcggcgtgagactgaagaacctgagcccccccaccagcctgaaggagatcagcctgatccagctggacagcatgagactgagccaccagatgctggtgagatgcgccgccatcatcggcctgaccttcaccaccgagctgctgttcgagatcctgccctgctggaacatgaagatgatgatcaagaccctggccaccctggtggagagcaacatcttctactgcttcagaaacggcaaggagctgcagaaggccctgaagcagaacgaccccagcttcgaggtgcactacagaagcctgagcctgaagcccagcgagggcatggaccacggcgaggaggagcagctgagagagctggagaacgaggtgatcgagtgccacagaatcagattctgcaaccccatgatgcagaagaccgcctacgagctgtggctgaaggaccagagaaaggccatgcacctgaagtgcgccagattcctggaggaggacgcccacagatgcgaccactgcagaggcagagacttcatcccctaccaccacttcaccgtgaacatcagactgaacgccctggacatggacgccatcaagaagatggccatgagccacggcttcaagaccgaggagaagctgatcctgagcaacagcgagatccccgagaccagcgccttcttccccgagaacagaagccccgaggagatcagagagaagatcctgaacttcttcgaccacgtgctgaccaagatgaagaccagcgacgaggacatcatccccctggagagctgccagtgcgaggagatcctggagatcgtgatcctgcccctggcccaccacttcctggccctgggcgagaacgacaaggccctgtactacttcctggagatcgccagcgcctacctgatcttctgcgacaactacatggcctacatgtacctgaacgagggccagaagctgctgaagaccctgaagaaggacaagagctggagccagaccttcgagagcgccaccttctacagcctgaagggcgaggtgtgcttcaacatgggccagatcgtgctggccaagaagatgctgagaaaggccctgaagctgctgaacagaatcttcccctacaacctgatcagcctgttcctgcacatccacgtggagaagaacagacacttccactacgtgaacagacaggcccaggagagccccccccccggcaagaagagactggcccagctgtacagacagaccgtgtgcctgagcctgctgtggagaatctacagctacagctacctgttccactgcaagtactacgcccacctggccgtgatgatgcagatgaacaccgccctggagacccagaactgcttccagatcatcaaggcctacctggactacagcctgtaccaccacctggccggctacaagggcgtgtggttcaagtacgaggtgatggccatggagcacatcttcaacctgcccctgaagggcgagggcatcgagatcgtggcctacgtggccgagaccctggtgttcaacaagctgatcatgggccacctggacctggccatcgagctgggcagcagagccctgcagatgtgggccctgctgcagaaccccaacagacactaccagagcctgtgcagactgagcagatgcctgctgctgaacagcagatacccccagctgatccaggtgctgggcagactgtgggagctgagcgtgacccaggagcacatcttcagcaaggccttcttctacttcgtgtgcctggacatcctgctgtacagcggcttcgtgtacagaaccttcgaggagtgcctggagttcatccaccagtacgagaacaacagaatcctgaagttccacagcggcctgctgctgggcctgtacagcagcgtggccatctggtacgccagactgcaggagtgggacaacttctacaagttcagcaacagagccaagaacctgctgcccagaagaaccatgaccctgacctactacgacggcatcagcagatacatggagggccaggtgctgcacctgcagaagcagatcaaggagcagagcgagaacgcccaggccagcggcgaggagctgctgaagaacctggagaacctggtggcccagaacaccaccggccccgtgttctgccccagactgtaccacctgatggcctacgtgtgcatcctgatgggcgacggccagaagtgcggcctgttcctgaacaccgccctgagactgagcgagacccagggcaacatcctggagaagtgctggctgaacatgaacaaggagagctggtacagcaccagcgagctgaaggaggaccagtggctgcagaccatcctgagcctgcccagctgggagaagatcgtggccggcagagtgaacatccaggacctgcagaagaacaagttcctgatgagagccaacaccgtggacaaccacttctag

SEQ ID NO: 198398 - DNA, 4374 bp, Artificial Sequence
  derived and/or modified sequence
atgctggtgttcggcgacgagacccacagccacttcctggtgatcggccaggccgtggacgacgtgagactggcccagaacatggcccagatgaacgacgtgatcctgagccccaactgctggcagctgtgcgacagaagcatgatcgagatcgagagcgtgcccgaccagagagccgtgaaggtgaacttcctgaagcccccccccaacttcaacttcgacgagttcttcaccaagtgcaccaccttcatgcactactaccccagcggcgagcacaagaacctgctgagactggcctgcaccctgaagcccgaccccgagctggagatgagcctgcagaagtacgtgatggagagcatcctgaagcagatcgacaacaagcagctgcagggctacctgagcgagctgagacccgtgaccatcgtgttcgtgaacctgatgttcgaggaccaggacaaggccgaggagatcggccccgccatccaggacgcctacatgcacatcaccagcgtgctgaagatcttccagggccagatcaacaaggtgttcatgttcgacaagggctgcagcttcctgtgcgtgttcggcttccccggcgagaaggtgcccgacgagctgacccacgccctggagtgcgccatggacatcttcgacttctgcagccaggtgcacaagatccagaccgtgagcatcggcgtggccagcggcatcgtgttctgcggcatcgtgggccacaccgtgagacacgagtacaccgtgatcggccagaaggtgaacctggccgccagaatgatgatgtactaccccggcatcgtgacctgcgacagcgtgacctacaacggcagcaacctgcccgcctacttcttcaaggagctgcccaagaaggtgatgaagggcgtggccgacagcggccccctgtaccagtactggggcagaaccgagaaggtgatgttcggcatggcctgcctgatctgcaacagaaaggaggactaccccctgctgggcagaaacaaggagatcaactacttcatgtacaccatgaagaagttcctgatcagcaacagcagccaggtgctgatgtacgagggcctgcccggctacggcaagagccagatcctgatgaagatcgagtacctggcccagggcaagaaccacagaatcatcgccatcagcctgaacaagatcagcttccaccagaccttctacaccatccagatgttcatggccaacgtgctgggcctggacacctgcaagcactacaaggagagacagaccaacctgagaaacaaggtgatgaccctgctggacgagaagttctactgcctgctgaacgacatcttccacgtgcagttccccatcagcagagagatcagcagaatgagcaccctgaagaagcagaagcagctggagatcctgttcatgaagatcctgaagctgatcgtgaaggaggagagaatcatcttcatcatcgacgaggcccagttcgtggacagcaccagctggagattcatggagaagctgatcagaaccctgcccatcttcatcatcatgagcctgtgccccttcgtgaacatcccctgcgccgccgccagagccgtgatcaagaacagaaacaccacctacatcgtgatcggcgccgtgcagcccaacgacatcagcaacaagatctgcctggacctgaacgtgagctgcatcagcaaggagctggacagctacctgggcgagggcagctgcggcatccccttctactgcgaggagctgctgaagaacctggagcaccacgaggtgctggtgttccagcagaccgagagcgaggagaagaccaacagaacctggaacaacctgttcaagtacagcatcaagctgaccgagaagctgaacatggtgaccctgcacagcgacaaggagagcgaggaggtgtgccacctgaccagcggcgtgagactgaagaacctgagcccccccaccagcctgaaggagatcagcctgatccagctggacagcatgagactgagccaccagatgctggtgagatgcgccgccatcatcggcctgaccttcaccaccgagctgctgttcgagatcctgccctgctggaacatgaagatgatgatcaagaccctggccaccctggtggagagcaacatcttctactgcttcagaaacggcaaggagctgcagaaggccctgaagcagaacgaccccagcttcgaggtgcactacagaagcctgagcctgaagcccagcgagggcatggaccacggcgaggaggagcagctgagagagctggagaacgaggtgatcgagtgccacagaatcagattctgcaaccccatgatgcagaagaccgcctacgagctgtggctgaaggaccagagaaaggccatgcacctgaagtgcgccagattcctggaggaggacgcccacagatgcgaccactgcagaggcagagacttcatcccctaccaccacttcaccgtgaacatcagactgaacgccctggacatggacgccatcaagaagatggccatgagccacggcttcaagaccgaggagaagctgatcctgagcaacagcgagatccccgagaccagcgccttcttccccgagaacagaagccccgaggagatcagagagaagatcctgaacttcttcgaccacgtgctgaccaagatgaagaccagcgacgaggacatcatccccctggagagctgccagtgcgaggagatcctggagatcgtgatcctgcccctggcccaccacttcctggccctgggcgagaacgacaaggccctgtactacttcctggagatcgccagcgcctacctgatcttctgcgacaactacatggcctacatgtacctgaacgagggccagaagctgctgaagaccctgaagaaggacaagagctggagccagaccttcgagagcgccaccttctacagcctgaagggcgaggtgtgcttcaacatgggccagatcgtgctggccaagaagatgctgagaaaggccctgaagctgctgaacagaatcttcccctacaacctgatcagcctgttcctgcacatccacgtggagaagaacagacacttccactacgtgaacagacaggcccaggagagccccccccccggcaagaagagactggcccagctgtacagacagaccgtgtgcctgagcctgctgtggagaatctacagctacagctacctgttccactgcaagtactacgcccacctggccgtgatgatgcagatgaacaccgccctggagacccagaactgcttccagatcatcaaggcctacctggactacagcctgtaccaccacctggccggctacaagggcgtgtggttcaagtacgaggtgatggccatggagcacatcttcaacctgcccctgaagggcgagggcatcgagatcgtggcctacgtggccgagaccctggtgttcaacaagctgatcatgggccacctggacctggccatcgagctgggcagcagagccctgcagatgtgggccctgctgcagaaccccaacagacactaccagagcctgtgcagactgagcagatgcctgctgctgaacagcagatacccccagctgatccaggtgctgggcagactgtgggagctgagcgtgacccaggagcacatcttcagcaaggccttcttctacttcgtgtgcctggacatcctgctgtacagcggcttcgtgtacagaaccttcgaggagtgcctggagttcatccaccagtacgagaacaacagaatcctgaagttccacagcggcctgctgctgggcctgtacagcagcgtggccatctggtacgccagactgcaggagtgggacaacttctacaagttcagcaacagagccaagaacctgctgcccagaagaaccatgaccctgacctactacgacggcatcagcagatacatggagggccaggtgctgcacctgcagaagcagatcaaggagcagagcgagaacgcccaggccagcggcgaggagctgctgaagaacctggagaacctggtggcccagaacaccaccggccccgtgttctgccccagactgtaccacctgatggcctacgtgtgcatcctgatgggcgacggccagaagtgcggcctgttcctgaacaccgccctgagactgagcgagacccagggcaacatcctggagaagtgctggctgaacatgaacaaggagagctggtacagcaccagcgagctgaaggaggaccagtggctgcagaccatcctgagcctgcccagctgggagaagatcgtggccggcagagtgaacatccaggacctgcagaagaacaagttcctgatgagagccaacaccgtggacaaccacttctag

SEQ ID NO: 198399 - DNA, 4833 bp, Artificial Sequence
  derived and/or modified sequence
atgaatacccccaaggaagagtttcaggactggcccattgtccgtatcgcagcgcacttaccagacctaatcgtgtatggccacttttcacctgaacggcctttcatggattatttcgacggagtgctgatgttcgtggatatatcaggatttacagcgatgaccgaaaagttctcctcagcgatgtacatggatcgcggcgcagagcagctggtcgaaatcctgaattatcatataagcgcaattgtggaaaaagtgctgatcttcggaggtgacatactgaagttcgctggagatgcattgttggccctgtggagggtggagcgcaagcagctgaagaacatcatcacggtggtgatcaaatgctcgctggagatacatggcctgttcgagacccaggagtgggaagaggggctagacatccgggtaaagatcggacttgcggccggtcacatcagcatgctggtcttcggggacgaaactcatagccacttcctcgtgataggacaagctgttgatgacgtcagacttgcccagaacatggcccagatgaacgatgttatactctcacctaactgttggcaactctgcgatagatcgatgatcgaaatcgagtccgtgcctgatcagagggcagtcaaggtgaactttctgaagcctcctcctaactttaattttgacgaattttttaccaaatgtaccacatttatgcactactacccctctggcgagcacaagaatctgcttcgtctggcatgtaccctgaaaccagatccagagctggaaatgtccctgcagaagtacgtcatggagagcatcctcaagcaaatcgacaataagcagctccaggggtatctatctgaacttagacctgtgaccattgtcttcgtgaacctcatgttcgaggatcaggacaaggcagaagagatcgggccagcgattcaggatgcatacatgcatataacatccgtgctcaagatcttccagggacaaattaataaagtatttatgtttgataagggctgcagctttctttgtgtctttggcttccctggcgaaaaagtgccagacgagctgacgcacgccctggagtgtgccatggatatattcgacttttgttcccaggttcacaagatccagacagtctcaatcggtgtggcatctggtattgtgttctgtgggatcgtgggtcatacagtgagacatgagtacactgtgatcggacagaaagttaacctcgctgcacggatgatgatgtattacccgggcattgtgacatgcgactctgtgacctataatggctccaacttgcccgcatatttctttaaagaactaccaaagaaggtcatgaagggcgtcgccgattccgggccactttatcaatattggggacgcacggagaaggtcatgttcggtatggcctgcctcatttgcaatcgtaaggaagactatccgctcctgggaaggaacaaggagatcaattacttcatgtacaccatgaagaagttcttgatttccaattccagtcaggtcctaatgtacgaaggcctaccaggctacgggaaaagccagattcttatgaagattgagtacctggctcaaggcaagaaccacagaattattgctatcagtctgaacaaaatttcttttcaccagaccttttataccatccagatgtttatggcaaatgtgctgggtctggatacatgtaagcattataaagaacgccagacaaatctgagaaataaggttatgacactactggatgaaaagttttactgcctcttgaatgacattttccacgtgcagtttcccatttccagagagataagcaggatgagcaccctcaagaagcagaagcagctagaaattctatttatgaagattctgaagttgatcgtgaaggaagagcgaataatctttattatcgatgaggcccaatttgtagacagcacaagctggagatttatggaaaagctcatcaggaccctgcctatttttatcattatgagtctctgtccatttgtgaatattccttgtgccgccgcccgcgcagtgataaagaaccggaatacgacatatattgttattggggccgtgcagcctaatgatatctccaataagatctgtcttgacctcaacgtgtcatgtattagcaaagagctggattcctacctgggcgagggaagttgcggaatccctttttactgcgaagagctgcttaagaaccttgagcaccacgaagttctggttttccagcagactgagagtgaggaaaaaacaaatcgaacgtggaacaacctgtttaagtattctataaagctcactgaaaaactgaatatggtgaccctgcacagtgacaaagaaagtgaggaagtgtgtcatctgacaagtggtgtcaggctgaaaaatttgtcacccccgacaagtctgaaagaaatttcactgattcagctggattccatgcgactgtcacaccagatgctggtgaggtgcgctgccataatcgggctgacctttaccacagaacttctgtttgagattcttccctgctggaacatgaagatgatgattaagacgctcgctaccctggtggaatcgaacattttttattgttttcggaatggaaaggagctccagaaagccttgaagcagaacgaccccagctttgaggtgcattataggtcgctatcactgaaacctagcgagggcatggaccacggagaggaagaacaattaagagagttggagaatgaggtcatagagtgccacaggatcagattctgtaatcccatgatgcagaagaccgcctatgaattgtggctgaaggatcaacgcaaagcaatgcacttgaagtgtgccaggtttctggaggaggacgcccatcggtgtgatcactgtagagggcgcgactttattccctaccaccatttcactgtgaacattagactgaacgccctggatatggacgctatcaagaagatggccatgagccatggtttcaagacggaagagaagctcatcctatctaatagtgaaatcccagagacatcagcgttttttccagagaacaggagtcctgaagagatccgcgaaaaaattctgaattttttcgaccacgttttaacaaagatgaagacctcagacgaagacatcattcccctcgaatcctgccaatgcgaagagatcttagagattgtgatccttccgctcgcgcaccacttcttggccctgggagaaaacgacaaagccctgtattacttcttggagatcgccagtgcgtatttaatcttctgtgacaactacatggcatacatgtatctgaatgagggccagaaacttttgaaaactctcaagaaggataagtcttggagtcagacattcgagtccgcaacattttacagtttaaaaggcgaagtttgtttcaatatggggcagatcgtgttggccaaaaagatgctcaggaaggcactgaaactcctgaacagaatcttcccctacaatttaataagtctgtttctccacattcatgtggagaaaaaccgtcacttccattacgtgaacaggcaagctcaggaatcccctcctcccggcaaaaaacgcctggcgcagctttacagacaaacagtctgtctgagtctcctgtggagaatatattcctatagctacctgttccactgcaagtactacgcccaccttgcagtgatgatgcaaatgaacaccgcactcgagactcagaattgttttcaaatcattaaagcttacctggactacagcctctatcaccaccttgcgggttacaagggcgtgtggttcaaatacgaggttatggcaatggagcacattttcaatcttcctctgaaaggcgagggtattgagatcgtggcctacgtcgccgaaacactagtgtttaataagctcatcatgggtcatcttgacctagctatagagctgggatccagagccctgcaaatgtgggctttgctccagaacccaaaccggcactaccagtctctttgtaggctcagcagatgcttactacttaacagccgatatccacagctcatccaggtgcttggcaggctctgggagctaagcgtgactcaggagcacatttttagcaaggcttttttctactttgtctgcctcgacattctcctctattcaggcttcgtgtaccgaacctttgaggagtgcctcgaattcatccaccaatacgaaaataaccgtatcttgaaattccattcggggcttctcctgggcctatatagcagcgtagccatttggtacgcccggctgcaggaatgggacaatttctataagttctcgaatagggcgaagaatctgctcccccggcggaccatgacactcacctattacgatggcataagtagatatatggaggggcaggtgctccacttgcagaagcagatcaaggagcagagtgagaacgcccaagccagcggcgaagaactgctcaaaaatctcgagaacctcgtggcccagaacacaacaggtcccgtcttctgtcccagattataccatttgatggcctacgtttgtatacttatgggagatgggcagaaatgtggattgttcctgaacacagcactgcgcctcagtgagacccagggcaatatcctagagaagtgctggctgaacatgaacaaagaatcttggtacagtaccagtgagctgaaagaggatcagtggctacagacaatcctcagccttccttcttgggagaagattgtggccgggcgtgttaatattcaagacttgcaaaagaacaagttcctcatgcgcgctaacaccgtagataaccacttctag

SEQ ID NO: 198400 - DNA, 4374 bp, Artificial Sequence
  derived and/or modified sequence
atgctagtgtttggtgacgaaacacatagtcatttccttgttatcgggcaggccgtggacgacgtccgccttgctcagaacatggcgcagatgaatgatgtcatactgagcccaaactgctggcagttgtgcgacagatcgatgattgaaatcgagagtgtgcctgatcagcgagcagttaaagtcaattttcttaagccacctcccaacttcaatttcgatgaattttttaccaaatgtacgaccttcatgcattattatccaagcggggagcataagaacctattaagattggcttgtactctgaaacccgatccggaactcgaaatgagcctccagaagtacgttatggagtccatcctgaaacagattgacaacaaacaactgcagggctacctgagcgagttgcggcctgtcacaatcgtgtttgtaaatctgatgtttgaggaccaagataaagccgaagagatcggaccagctattcaggacgcatatatgcacataacttccgtgcttaagattttccaaggacagataaacaaggtgtttatgttcgataaaggttgttccttcctctgcgtctttggattccctggggagaaagtgcccgacgaactgacacatgccctggagtgcgccatggacatcttcgacttttgcagccaggtgcacaaaatccagacagtgagtattggagttgcctccggtattgtcttctgcggcatcgtgggccataccgtgcgacacgagtataccgttattggccaaaaggttaatctcgcagcgaggatgatgatgtactatccaggaatcgtcacgtgcgacagcgtgacttataatggcagcaacttgcccgcttatttttttaaggagctgcctaaaaaggtgatgaaaggtgtcgctgacagtggacctctgtatcaatactggggcagaaccgaaaaagtgatgttcggaatggcctgcctgatctgtaatcggaaagaggattatcctctgttagggcggaataaagaaatcaattattttatgtataccatgaagaagtttttgatctcaaacagctcccaggtcctgatgtacgaaggcctgcctggatatggcaagtcccagatactgatgaagatcgaatatttggcacagggcaaaaatcataggattattgccatcagcttgaataagatttcttttcaccagaccttctatacaattcagatgtttatggcaaatgtgctaggcctggatacctgcaagcactacaaggaaaggcagacaaacttacgcaataaagtcatgacgctgctggatgagaagttttactgtttgcttaatgacatttttcacgtgcagttccccatcagccgggagatttcacgtatgtcaacactgaagaagcagaagcaactggaaatactgtttatgaaaatccttaaactgatagtgaaggaagagcgaatcatttttattatcgacgaagcacagttcgtggacagcactagctggcgatttatggaaaaactgattcggacccttcccatctttatcataatgagcttgtgccccttcgtgaatatcccttgtgccgccgccagagccgtcatcaagaacaggaatactacatatatcgtgatcggcgccgtccagcctaatgacatcagtaacaagatttgcctggatctgaatgtcagctgtatctctaaggaactggattcttacttgggggagggttcgtgcggcattccattctattgtgaggaactgctgaagaatctagagcaccatgaggtgttagtctttcagcagacggagtccgaggaaaagaccaataggacatggaacaatctcttcaaatactcaataaagctaacggagaaactgaacatggtaaccctgcattcagacaaggaatctgaggaagtctgtcatctcacttctggcgtgaggctgaaaaacctgtctcctcccaccagcttaaaggaaatctccctaatccaactcgacagcatgcgactgagtcaccagatgctggtgagatgcgccgcaatcatcgggctgaccttcacaaccgagcttcttttcgaaatccttccctgctggaatatgaagatgatgatcaaaactctagcaaccctggttgagtccaacattttttattgttttaggaatggaaaggagctccagaaggcccttaaacagaatgaccctagtttcgaagtgcattaccgttctctgtccctgaagccctccgagggtatggaccatggcgaggaagaacagcttcgagaactcgaaaacgaggtgatagagtgccacagaatacgattttgcaacccgatgatgcagaaaactgcctacgaactgtggttgaaagaccagaggaaagctatgcacttgaagtgtgctcggtttctggaagaggatgcacatcgctgcgaccactgtcggggacgggacttcattccttaccaccactttaccgtgaacattcgcctgaacgctctggacatggatgccataaagaagatggccatgagccatggcttcaagaccgaggagaagctgattctgtccaattctgaaattcctgagacaagtgcattcttccccgagaaccgctctcctgaagaaattagagaaaagattctcaacttcttcgaccacgtgctaaccaaaatgaaaaccagcgacgaggatataatccccctggagagctgccagtgtgaagagattctggagatcgtgattttacccttggcacatcactttctggcccttggggagaatgataaggctttgtattactttctggaaatcgcatccgcctatttgatcttctgcgacaattacatggcctacatgtacctcaacgaaggacagaaactgctgaagactctgaaaaaagacaaatcttggagccagacatttgagtccgcaaccttctactccctcaagggcgaggtttgttttaacatgggccagattgtgctggccaagaaaatgttgcggaaggccttaaagctcttgaatagaatcttcccgtataatctcatcagtctgttcctgcatatccacgtggagaaaaacaggcattttcactatgtgaatcgccaggctcaggaatcccccccacctggcaagaagcggctggctcagctctaccgacaaacagtctgcctgagtcttttgtggcggatttacagctacagttacctgtttcattgcaagtactacgcccacctggccgtgatgatgcagatgaacacagcgttggagactcaaaactgtttccagatcattaaagcttatttggactactctctctaccaccaccttgcggggtacaaaggcgtttggtttaaatacgaagtgatggctatggagcacatctttaaccttcccctcaagggagaagggatcgaaatcgttgcttatgttgccgagaccctcgtgtttaataagctgatcatggggcatcttgacttggccatcgaactgggcagtagagcccttcagatgtgggccctccttcagaatcccaatcgccactaccagagcctttgccgattgagccgctgtctgctgctaaactcaaggtaccctcagctgatccaagtgttggggcgtctttgggagctgtcagtaactcaggaacatatcttctctaaagcgtttttctatttcgtgtgtttggatatactgctatatagtggattcgtgtacaggacatttgaagagtgcctggagttcattcaccaatatgagaacaacaggatcctgaagtttcacagtggcctgctgctcggtctgtattcctctgtggccatttggtatgcccggctccaggaatgggacaatttctataaattctctaatcgggccaagaacctgctacctcggaggactatgactctgacttactatgacgggatctcacggtacatggagggacaagttctccatctgcagaagcagattaaggagcagtccgagaacgcccaggcgtctggggaagagcttctaaaaaatttggaaaacttagtcgcacagaataccaccgggccagttttctgtccccgtctgtaccatctaatggcatacgtgtgtatattaatgggagatggacagaagtgcggtctgtttctgaataccgccctgaggctgtcagagacacaaggcaacatccttgagaaatgttggctgaacatgaacaaagagtcctggtattcaactagcgagctgaaggaggaccaatggctgcagaccattctgtccctgccgtcctgggagaaaatcgtggcaggcagagtgaatattcaagatctgcaaaagaacaagttcctaatgcgagccaacactgttgacaaccatttctag

SEQ ID NO: 198401 - DNA, 1876 bp, Artificial Sequence
  derived and/or modified sequence
tttgtttttaaagcatacatgtatttgaatgaaggacagaagttgctaaaaactctcaagaaggacaaatcttggagccagacatttgagtctgccaccttttacagcctcaaaggtgaggtctgtttcaatatgggccagatagtgcttgccaagaaaatgctgaggaaggcactgaagctcctcaaccgaatctttccttacaacttaatctccttgtttctccatatccatgtcgagaaaaacagacactttcattatgtgaatcggcaggcccaagagagcccacctccagggaagaagaggctggcacaactttaccggcaaactgtctgcctttccttgctgtggcgcatctatagctacagttatctttttcactgcaagtattatgcccacctggcagttatgatgcaaatgaatactgcactggaaactcaaaattgtttccagatcattaaggcttacctagactattcgctataccaccacctggctggctacaaaggtgtgtggttcaaatatgaagtcatggccatggagcacatcttcaacctccccctgaaaggcgagggcattgaaatcgtggcatacgtggctgagacactggtcttcaacaagctcataatgggacacctggatttggccattgagttaggctcccgagcccttcagatgtgggcactgctccagaatcccaaccgacattatcagtccctctgcagacttagcagatgtctccttctgaacagcagatacccgcaattgatccaggtgctggggcggctgtgggagctttctgtaacacaggaacacatcttcagcaaggcatttttctattttgtctgcttggacatcctgctttattctggttttgtttatagaacatttgaagaatgtttggaattcatacaccaatacgaaaacaacagaatcctcaagttccacagtggactcctcctgggactttattcctctgtagctatctgggagtgtgaagcaggggtaggcaggagactacacacttccagagacccaggtatgccagacttcaggaatgggacaacttttacaaattttccaatagagctaaaaatcttttgccaagaagaaccatgacacttacttactatgacggaatatctaggtacatggaggggcaagttcttcaccttcaaaaacaaatcaaagaacagtcagagaatgcccaagccagtggggaggagctactcaagaacttggagaatctggtggctcaaaataccactggccctgtcttttgcccaaggctctaccacctgatggcttacgtctgtatattaatgggagatgggcagaaatgtggcctcttcctgaacacagccttgcggctctctgaaacacaggggaatatactggagaaatgctggctgaacatgaacaaagaatcatggtactcaacctctgagttaaaagaagaccaatggcttcagacgatcttgagtctcccatcatgggaaaaaattgtagcaggcagggtaaacattcaggatcttcaaaaaaacaaattcctgatgagagctaataccgtggacaatcatttctaacatgtcaaagaaaaaagattttaataagcactatgtccttgtgattatctattattgacctttctccgtggctggcccactccaggttcctacataatctcttctgttccagacacagaaacagacatgttgatttcttctctttctggagggcctacaagggtcaggagtgtcatggtttacttcttcctaatgttacaaaaaattgcttttaccattcatgttgttttagcttgacctgtttatttcagcccatgcaaaactgtatcatattacaaattattaatctc

SEQ ID NO: 198402 - DNA, 5051 bp, Artificial Sequence
  derived and/or modified sequence
gacagacatggcgcttcagctgtcttcagaataatgtcacccggcctcctctcctgtcttctgcagtcttaaaagacctagtccctaactgaggtctggcttttcctcagccctggatgaagtggagaagacctatttggagactgcttcctgtcaccataaaatcctgaacatttgtcttgaacatgaacactccaaaagaagaattccaggactggcccatagtcagaatagcagctcatttaccagacctcattgtctatggacatttctccccagagcgaccctttatggattattttgacggagtcctgatgtttgttgatatttcaggttttactgcaatgactgagaagttcagcagtgccatgtacatggacagaggggctgagcagttggtggagatcctcaactaccacataagtgcaatagtggagaaagtgttgatttttggaggagacatcctgaaatttgcaggtgatgcactgctagccctgtggagggtggagcgaaagcagctgaaaaacattatcacagtggtaattaaatgtagcctggagatccatggattgtttgagacccaggagtgggaagaaggcctagacatccgagtcaagataggactggctgctggccacatcagcatgttggtctttggagatgaaacacacagccactttctggtgattggtcaggcagtggacgatgtgcgccttgcccagaacatggctcagatgaatgatgttattctgtcaccaaactgctggcagctctgtgaccggagcatgattgaaattgagagtgttccagatcagagagcagttaaggttaacttcttaaaaccaccccccaattttaattttgatgaatttttcacaaagtgtacgaccttcatgcattattatccttctggtgagcacaaaaacctcctgaggcttgcatgcacgctgaagcctgatcctgaactggagatgtccctacaaaagtatgtgatggaaagcattttgaagcagattgataacaaacagcttcagggctatttatctgagcttcgcccagtgacgattgtgtttgtgaacctgatgtttgaagaccaagacaaagcagaagagataggcccagccatccaggatgcctatatgcacatcacttctgtcctgaagatcttccaaggccaaatcaataaagtcttcatgtttgacaagggctgctctttcctctgtgtctttggcttccctggggaaaaggtacctgacgagctcactcatgctctggaatgtgctatggatatatttgacttctgctctcaagtccacaaaatccaaactgtatccatcggtgttgccagtgggattgtcttctgtgggatcgttggacacactgtgagacacgagtacacagtcattggtcaaaaagtcaacttagctgccaggatgatgatgtactacccaggaattgtgacctgcgactctgtcacctacaatgggagcaacctaccagcgtacttttttaaagagcttccaaagaaagttatgaaaggtgttgcagattctggaccattgtatcagtattggggccgtactgagaaagtcatgtttggtatggcgtgcctcatctgcaacagaaaggaggattaccctttgctgggacgtaataaagagatcaactacttcatgtatactatgaagaaatttttgatatctaacagcagccaagtcttaatgtatgagggattaccaggatatggaaaaagccagatacttatgaaaattgagtacctggcccaaggtaagaatcacaggattattgccatttcattgaataagatcagcttccatcaaactttctataccatccagatgttcatggccaatgtcctaggcctagacacttgtaaacattataaagaacgacagaccaaccttcgaaataaagtcatgacactgttggatgaaaagttctactgtcttcttaatgacattttccatgttcagttccctatttctcgggagatttccaggatgagcaccttgaaaaagcaaaaacaattggaaatattgtttatgaagatcttgaagctgatagtgaaagaggaaaggattatttttatcattgatgaggcccagtttgtggattcgacctcctggagatttatggagaagcttatccggactcttcctatcttcatcattatgtccctgtgtcccttcgttaacattccctgtgcagctgccagggccgtaataaagaacaggaacaccacctacattgtcattggtgcagtacagcctaacgacatctccaacaagatctgtcttgacctcaatgtgagctgcatctccaaagaactggactcgtacctgggggagggaagctgtgggattccattttactgtgaagaattgcttaaaaacctggaacatcatgaggtactcgttttccaacaaacggagtctgaggaaaagacaaataggacctggaataacctgttcaagtattccattaagctaacagagaagttaaacatggttactctccatagtgataaggaaagtgaagaagtctgtcacctcacaagtggtgtcagactgaaaaacctgtcacctccaacgtcattaaaagaaatctctctgatccagctggatagcatgagactttcccaccaaatgctggtgagatgtgctgccatcattggcctgaccttcaccactgagttgttgtttgagattctcccctgttggaatatgaagatgatgatcaagaccctggcaaccctagtggaatctaacattttttattgtttccggaatggcaaggagcttcaaaaggccctgaaacagaatgatccctcatttgaggtgcactatcgttccttgtctctgaagcccagtgaagggatggatcacggtgaagaggaacagcttcgtgaactggagaatgaggtgatcgagtgccacaggattcgattctgtaaccctatgatgcagaaaacagcctacgagctgtggctcaaggaccagagaaaagccatgcacttgaaatgtgcccgctttttagaagaagatgcccacagatgtgaccactgccgaggcagggacttcattccctatcatcacttcacagtgaatattcggctcaacgctttagacatggatgccattaaaaagatggctatgtctcatggatttaaaactgaagaaaagcttatcttgtccaactcagagattcctgagacatctgcattttttcctgaaaatcgcagtcctgaagaaataagagaaaagatcttgaatttctttgaccacgttttaacaaaaatgaagacatctgacgaagacattatccctctggaatcttgccagtgtgaagaaatcctagagattgtcatcttgcctctggcccaccattttctggctttgggagaaaatgacaaagccttatattacttcttagaaattgcatctgcttatctcatcttttgtgataactacatggcatacatgtatttgaatgaaggacagaagttgctaaaaactctcaagaaggacaaatcttggagccagacatttgagtctgccaccttttacagcctcaaaggtgaggtctgtttcaatatgggccagatagtgcttgccaagaaaatgctgaggaaggcactgaagctcctcaaccgaatctttccttacaacttaatctccttgtttctccatatccatgtcgagaaaaacagacactttcattatgtgaatcggcaggcccaagagagcccacctccagggaagaagaggctggcacaactttaccggcaaactgtctgcctttccttgctgtggcgcatctatagctacagttatctttttcactgcaagtattatgcccacctggcagttatgatgcaaatgaatactgcactggaaactcaaaattgtttccagatcattaaggcttacctagactattcgctataccaccacctggctggctacaaaggtgtgtggttcaaatatgaagtcatggccatggagcacatcttcaacctccccctgaaaggcgagggcattgaaatcgtggcatacgtggctgagacactggtcttcaacaagctcataatgggacacctggatttggccattgagttaggctcccgagcccttcagatgtgggcactgctccagaatcccaaccgacattatcagtccctctgcagacttagcagatgtctccttctgaacagcagatacccgcaattgatccaggtgctggggcggctgtgggagctttctgtaacacaggaacacatcttcagcaaggcatttttctattttgtctgcttggacatcctgctttattctggttttgtttatagaacatttgaagaatgtttggaattcatacaccaatacgaaaacaacagaatcctcaagttccacagtggactcctcctgggactttattcctctgtagctatctggtatgccagacttcaggaatgggacaacttttacaaattttccaatagagctaaaaatcttttgccaagaagaaccatgacacttacttactatgacggaatatctaggtacatggaggggcaagttcttcaccttcaaaaacaaatcaaagaacagtcagagaatgcccaagccagtggggaggagctactcaagaacttggagaatctggtggctcaaaataccactggccctgtcttttgcccaaggctctaccacctgatggcttacgtctgtatattaatgggagatgggcagaaatgtggcctcttcctgaacacagccttgcggctctctgaaacacaggggaatatactggagaaatgctggctgaacatgaacaaagaatcatggtactcaacctctgagttaaaagaagaccaatggcttcagacgatcttgagtctcccatcatgggaaaaaattgtagcaggcagggtaaacattcaggatcttcaaaaaaacaaattcctgatgagagctaataccgtggacaatcatttctaacatgtcaaagaaaaaagattttaataagcacta

SEQ ID NO: 198403 - DNA, 4833 bp, Artificial Sequence
  derived and/or modified sequence
atgaacacccccaaggaggagttccaggactggcccatcgtgagaattgctgcccacctgcctgacctgattgtgtatggccacttcagccctgagcggcccttcatggactactttgatggagtgctgatgtttgtggacatcagcggcttcaccgccatgacagagaagttcagcagcgccatgtacatggacagaggagctgagcagctggtggagatcctgaactaccacatcagcgccatcgtggagaaggtgctgatctttggaggagacatcctgaagtttgctggagatgccctgctggccctgtggagggtggagaggaagcagctgaagaacatcatcaccgtggtgatcaagtgcagcctggagatccacggcctgtttgagacccaggagtgggaggagggcctggacatccgggtgaagattggcctggccgccggccacatctccatgctggtgtttggagatgagacccacagccacttcctggtgattggccaggccgtggatgatgtgcggctggcccagaacatggcccagatgaatgatgtgatcctgagccccaactgctggcagctgtgtgaccgctccatgattgaaattgagagcgtgcctgaccagagagctgtgaaggtgaacttcctgaagcccccacccaacttcaactttgatgagttcttcaccaagtgcaccaccttcatgcactactaccccagcggggagcacaagaacctgctgcggctggcctgcaccctgaagccagaccctgagctggagatgagcctgcagaagtatgtgatggagagcatcctgaagcagattgacaacaagcagctgcagggctacctgtctgagctgcggcctgtgaccatcgtgtttgtgaacctgatgtttgaggaccaggacaaggccgaggagatcggccctgccatccaggatgcctacatgcacatcacctctgtgctgaagatcttccagggccagatcaacaaggtgttcatgtttgacaagggctgcagcttcctgtgtgtgtttggcttccctggagagaaggtgcctgatgagctgacccacgccctggagtgtgccatggacatctttgacttctgcagccaggtgcacaagatccagacagtgtccattggagtggccagcggcatcgtgttctgtggcatcgtgggccacacagtgagacatgagtacacagtgattggccagaaggtgaacctggccgccaggatgatgatgtactacccaggcatcgtgacctgtgacagcgtgacctacaacggcagcaacctgcctgcctacttcttcaaggagctgcccaagaaggtgatgaagggcgtggccgacagcggccccctgtaccagtactggggccgcacagagaaggtgatgtttggcatggcctgcctgatctgcaacaggaaggaggactaccccctgctgggcaggaacaaggagatcaactacttcatgtacaccatgaagaagttcctgatcagcaacagcagccaggtgctgatgtatgagggcctgcccggctacggcaagagccagatcctgatgaagattgagtacctggcccagggcaagaaccaccgcatcatcgccatcagcctgaacaagatctccttccaccagaccttctacaccatccagatgttcatggccaacgtgctgggcctggacacctgcaagcactacaaggagcggcagaccaacctgaggaacaaggtgatgaccctgctggatgagaagttctactgcctgctgaatgacatcttccacgtgcagttccccatcagccgggagatcagcaggatgagcaccctgaagaagcagaagcagctggagatcctcttcatgaagatcctgaagctgattgtgaaggaggagcgcatcatcttcatcattgatgaggcccagtttgtggacagcacctcctggaggttcatggagaagctgatccgcaccctgcccatcttcatcatcatgagcctgtgcccctttgtgaacatcccctgtgccgccgcccgggctgtgatcaagaacagaaacaccacctacatcgtgattggagctgtgcagcccaatgacatcagcaacaagatctgcctggacctgaatgtgtcctgcatcagcaaggagctggacagctacctgggggagggcagctgtggcatccccttctactgtgaggagctgctgaagaacctggagcaccacgaggtgctggtgttccagcagacagaaagtgaggagaagaccaacagaacctggaacaacctcttcaagtacagcatcaagctgacagagaagctgaacatggtgaccctgcacagcgacaaggagagcgaggaggtgtgccacctgaccagcggcgtgcggctgaagaacctgagcccccccaccagcctgaaggagatcagcctcatccagctggacagcatgaggctgagccaccagatgctggtgcgctgtgccgccatcatcggcctgaccttcaccacagagctgctgtttgagatcctgccctgctggaacatgaagatgatgatcaagaccctggccaccctggtggagagcaacatcttctactgcttcagaaatggcaaggagctgcagaaggccctgaagcagaatgaccccagctttgaggtgcactaccgcagcctgagcctgaagcccagcgagggcatggaccatggagaggaggagcagctgcgggagctggagaatgaggtgattgagtgccaccgcatccgcttctgcaaccccatgatgcagaagacagcctatgagctgtggctgaaggaccagaggaaggccatgcacctgaagtgtgcccgcttcctggaggaggatgcccaccgctgtgaccactgccggggccgggacttcatcccctaccaccacttcaccgtgaacatccggctgaatgccctggacatggatgccatcaagaagatggccatgagccacggcttcaagacagaggagaagctgatcctgagcaacagcgagatccctgagaccagcgccttcttcccagaaaatagaagccctgaggagatccgggagaagatcctgaacttctttgaccacgtgctgaccaagatgaagaccagtgatgaggacatcatccccctggagagctgccagtgtgaggagatcctggagatcgtcatcctgcccctggcccaccacttcctggccctgggggagaatgacaaggccctgtactacttcctggagatcgccagcgcctacctgatcttctgtgacaactacatggcctacatgtacctgaatgaaggccagaagctgctgaagaccctgaagaaggacaagtcctggagccagacctttgagagcgccaccttctacagcctgaagggggaggtgtgcttcaacatgggccagatcgtgctggccaagaagatgctgaggaaggccctgaagctgctgaaccgcatcttcccctacaacctgatcagcctcttcctgcacatccacgtggagaagaacagacacttccactacgtgaaccggcaggcccaggagagccccccacctgggaagaagaggctggcccagctgtaccggcagacagtgtgcctgagcctgctgtggaggatctacagctacagctacctgttccactgcaagtactatgcccacctggccgtgatgatgcagatgaacacagccctggagacccagaactgcttccagatcatcaaggcctacctggactacagcctgtaccaccacctggccggctacaagggcgtgtggttcaagtatgaggtgatggccatggagcacatcttcaacctgcccctgaagggggagggcatcgagatcgtggcctacgtggccgagaccctggtgttcaacaagctgatcatgggccacctggacctggccatcgagctgggcagccgggccctgcagatgtgggccctgctgcagaaccccaacagacactaccagagcctgtgccgcctgagccgctgcctgctgctgaacagccgctacccccagctgatccaggtgctgggccgcctgtgggagctgtctgtgacccaggagcacatcttcagcaaggccttcttctactttgtgtgcctggacatcctgctgtacagcggctttgtgtaccgcacctttgaggagtgcctggagttcatccaccagtatgagaacaaccgcatcctgaagttccacagcggcctgctgctgggcctgtacagctctgtggccatctggtacgcccggctgcaggagtgggacaacttctacaagttcagcaacagagccaagaacctgctgcccaggaggaccatgaccctgacctactatgatggcatcagccgctacatggagggccaggtgctgcacctgcagaagcagatcaaggagcagagtgaaaatgcccaggccagcggggaggagctgctgaagaacctggagaacctggtggcccagaacaccactggacctgtgttctgcccccggctgtaccacctgatggcctacgtgtgcatcctgatgggagatggccagaagtgtggcctcttcctgaacacagccctgcggctgtctgagacccagggcaacatcctggagaagtgctggctgaacatgaacaaggagagctggtacagcaccagcgagctgaaggaggaccagtggctgcagaccatcctgagcctgcccagctgggagaagatcgtggccggccgggtgaacatccaggacctgcagaagaacaagttcctgatgagggccaacacagtggacaaccacttctag

SEQ ID NO: 198404 - DNA, 4374 bp, Artificial Sequence
  derived and/or modified sequence
atgctggtgtttggagatgagacccacagccacttcctggtgattggccaggccgtggatgatgtgcggctggcccagaacatggcccagatgaatgatgtgatcctgagccccaactgctggcagctgtgtgaccgctccatgattgaaattgaatctgtgcctgaccagagagctgtgaaggtgaacttcctgaagcccccacccaacttcaactttgatgagttcttcaccaagtgcaccaccttcatgcactactaccccagcggggagcacaagaacctgctgcggctggcctgcaccctgaagccagaccctgagctggagatgagcctgcagaagtatgtgatggagagcatcctgaagcagattgacaacaagcagctgcagggctacctgtctgagctgcggcctgtgaccatcgtgtttgtgaacctgatgtttgaggaccaggacaaggccgaggagatcggccctgccatccaggatgcctacatgcacatcacctctgtgctgaagatcttccagggccagatcaacaaggtgttcatgtttgataaaggctgcagcttcctgtgtgtgtttggcttccctggagagaaggtgcctgatgagctgacccacgccctggagtgtgccatggacatctttgacttctgcagccaggtgcacaagatccagacagtgtccattggagtggccagcggcatcgtgttctgtggcatcgtgggccacacagtgagacatgagtacaccgtcatcggccagaaggtgaacctggccgccaggatgatgatgtactacccaggcatcgtgacctgtgacagcgtgacctacaacggcagcaacctgcctgcctacttcttcaaggagctgcccaagaaggtgatgaagggcgtggccgacagcggccccctgtaccagtactggggccgcacagagaaggtgatgtttggcatggcctgcctgatctgcaacagaaaagaagactaccccctgctgggcaggaacaaggagatcaactacttcatgtacaccatgaagaagttcctgatcagcaacagcagccaggtgctgatgtatgagggcctgcccggctacggcaagagccagatcctgatgaagattgagtacctggcccagggcaagaaccaccgcatcatcgccatcagcctgaacaagatctccttccaccagaccttctacaccatccagatgttcatggccaacgtgctgggcctggacacctgcaagcactacaaggagcggcagaccaacctgaggaacaaggtgatgaccctgctggatgagaagttctactgcctgctgaatgacatcttccacgtgcagttccccatcagccgggagatcagcaggatgagcaccctgaagaagcagaagcagctggagatcctcttcatgaagatcctgaagctgattgtgaaggaggagcgcatcatcttcatcattgatgaggcccagtttgtggacagcacctcctggaggttcatggagaagctgatccgcaccctgcccatcttcatcatcatgagcctgtgcccctttgtgaacatcccctgtgccgccgcccgggccgtcatcaagaacagaaacaccacctacatcgtcatcggggctgtgcagcccaatgacatcagcaacaagatctgcctggacctgaatgtgtcctgcatcagcaaggagctggacagctacctgggggagggcagctgtggcatccccttctactgtgaggagctgctgaagaacctggagcaccacgaggtgctggtgttccagcagacagagagcgaggagaagaccaacagaacctggaacaacctcttcaagtacagcatcaagctgacagagaagctgaacatggtgaccctgcacagcgacaaggagagcgaggaggtgtgccacctgaccagcggcgtgcggctgaagaacctgagcccccccaccagcctgaaggagatcagcctcatccagctggacagcatgaggctgagccaccagatgctggtgcgctgtgccgccatcatcggcctgaccttcaccacagagctgctgtttgagatcctgccctgctggaacatgaagatgatgatcaagaccctggccaccctggtggagagcaacatcttctactgcttcagaaatggcaaggagctgcagaaggccctgaagcagaatgaccccagctttgaggtgcactaccgcagcctgagcctgaagcccagcgagggcatggaccacggggaggaggagcagctgcgggagctggagaatgaggtgattgagtgccaccgcatccgcttctgcaaccccatgatgcagaagacagcctatgagctgtggctgaaggaccagaggaaggccatgcacctgaagtgtgcccgcttcctggaggaggatgcccaccgctgtgaccactgccggggccgggacttcatcccctaccaccacttcaccgtgaacatccggctgaatgccctggacatggatgccatcaagaagatggccatgagccacggcttcaagacagaggagaagctgatcctgagcaacagcgagatccctgagaccagcgccttcttccctgagaacagaagccctgaggagatccgggagaagatcctgaacttctttgaccacgtgctgaccaagatgaagaccagtgatgaggacatcatccccctggagagctgccagtgtgaggagatcctggagatcgtcatcctgcccctggcccaccacttcctggccctgggagaaaatgacaaggccctgtactacttcctggagatcgccagcgcctacctgatcttctgtgacaactacatggcctacatgtacctgaatgaaggccagaagctgctgaagaccctgaagaaggacaagtcctggagccagacctttgaaagtgccaccttctacagcctgaagggggaggtgtgcttcaacatgggccagatcgtgctggccaagaagatgctgaggaaggccctgaagctgctgaaccgcatcttcccctacaacctgatcagcctcttcctgcacatccacgtggagaagaacagacacttccactacgtgaaccggcaggcccaggagagccccccacctgggaagaagaggctggcccagctgtaccggcagacagtgtgcctgagcctgctgtggaggatctacagctacagctacctgttccactgcaagtactatgcccacctggccgtgatgatgcagatgaacacagccctggagacccagaactgcttccagatcatcaaggcctacctggactacagcctgtaccaccacctggccggctacaagggcgtgtggttcaagtatgaggtgatggccatggagcacatcttcaacctgcccctgaagggggagggcattgaaattgtggcctacgtggccgagaccctggtgttcaacaagctgatcatgggccacctggacctggccatcgagctgggcagccgggccctgcagatgtgggccctgctgcagaaccccaacagacactaccagagcctgtgccgcctgagccgctgcctgctgctgaacagccgctacccccagctgatccaggtgctgggccgcctgtgggagctgtctgtgacccaggagcacatcttcagcaaggccttcttctactttgtgtgcctggacatcctgctgtacagcggctttgtgtaccgcacctttgaagaatgtctggagttcatccaccagtatgagaacaaccgcatcctgaagttccacagcggcctgctgctgggcctgtacagctctgtggccatctggtacgcccggctgcaggagtgggacaacttctacaagttcagcaacagagccaagaacctgctgcccaggaggaccatgaccctgacctactatgatggcatcagccgctacatggagggccaggtgctgcacctgcagaagcagatcaaggagcagagtgaaaatgcccaggccagcggggaggagctgctgaagaacctggagaacctggtggcccagaacaccaccggccctgtgttctgcccccggctgtaccacctgatggcctacgtgtgcatcctgatgggagatggccagaagtgtggcctcttcctgaacacagccctgcggctgtctgagacccagggcaacatcctggagaagtgctggctgaacatgaacaaggagagctggtacagcaccagcgagctgaaggaggaccagtggctgcagaccatcctgagcctgcccagctgggagaagatcgtggccggccgggtgaacatccaggacctgcagaagaacaagttcctgatgagggccaacacagtggacaaccacttctag

SEQ ID NO: 198405 - DNA, 4833 bp, Artificial Sequence
  derived and/or modified sequence
atgaacacccccaaggaggagttccaggactggcccatcgtgcggattgctgcccacctgcctgacctgatcgtgtacggacacttctcccccgaaagaccgtttatggattatttcgatggggtgctgatgtttgttgacatttccggttttacggcaatgaccgaaaaatttagctctgcgatgtacatggaccggggggcggaacaactcgtggaaattttaaactatcacatatctgccattgtggaaaaagtactgatcttcgggggggatatactaaagttcgccggcgatgctctacttgctctgtggagggtggaaaggaagcagttgaaaaacataataacagtagtcatcaagtgcagcttggagatacatggtctgtttgaaacacaggagtgggaggagggcttggatatcagggtcaagatcggattggccgccggtcacatctccatgctggttttcggggacgaaacacactctcattttctcgtcattgggcaggctgtggacgacgtgcggctggcacagaatatggcgcagatgaatgatgtgatcttatctccaaattgttggcagctttgcgaccgaagcatgatcgagatcgaaagtgttcccgatcagagggccgtgaaggtgaactttctcaagccacctccaaatttcaactttgacgaattctttacaaaatgtactacatttatgcactattacccaagtggagaacacaagaatttgctgcggctcgcctgtacactaaaaccagatcccgaactcgagatgtcacttcagaagtatgtgatggaatcaatcttgaagcaaatcgacaacaaacagctccaggggtacttaagtgagttgcgtccagtgaccatcgtctttgtgaatctaatgtttgaagatcaggacaaagctgaagagatcggccctgcaatacaagacgcatatatgcacatcactagcgtactgaagatcttccaaggtcaaatcaataaagtgtttatgtttgacaagggctgttccttcctgtgcgtgtttggcttccccggagagaaagttccggacgagctgactcatgcactcgagtgcgctatggatattttcgacttttgcagccaggttcacaagatccagacagtgtccattggagttgcgtcgggcattgtgttttgcgggattgttggccataccgtgcgacacgaatacactgtgatcggacaaaaagtgaacttagccgctagaatgatgatgtattatccaggcatagtcacatgcgactcagtgacttataatggatcaaacctgcctgcatattttttcaaagagctcccaaaaaaggtgatgaagggtgtggcagattccggacctctgtaccagtactgggggcgcacagagaaagtgatgttcggcatggcatgcttgatttgtaaccggaaggaagactatccattgctgggaaggaacaaagagattaactacttcatgtacacgatgaagaaatttctaatttccaactcctcccaggttctaatgtacgaaggtctgcctggttacggcaaatctcaaatcctaatgaaaatcgagtacctcgcccagggaaaaaatcaccgaattatcgctattagcctcaacaaaatctccttccaccagactttttataccatccaaatgtttatggccaacgtactcggcctggatacgtgcaagcactacaaagagcgccaaaccaaccttagaaacaaagtcatgacattactggatgagaagttctactgtttgttgaacgacatcttccacgtgcagtttccaatttctcgcgaaatttctaggatgagtaccctgaagaaacagaagcaactagaaattctttttatgaagatcctgaagctgatcgtgaaggaggagcgcataatcttcataatagacgaagctcagttcgtagatagcacttcttggcggtttatggagaagttgattagaactctgcccatatttatcattatgagtctgtgtcctttcgtaaacatcccatgtgcagcggcccgggctgtcatcaaaaatcgaaataccacttatatagtcattggtgctgttcagccaaacgatattagtaacaagatctgcttagatctcaatgttagttgcatctctaaagaacttgacagctacttgggagagggctcttgtggaatccctttttattgcgaggaactactgaagaacctggagcaccacgaggtgctggtattccaacagacagaaagcgaggaaaagacaaatcgcacctggaacaatctgtttaagtattctatcaaactcactgagaaactcaatatggtcaccttgcattctgacaaagagagtgaagaggtgtgccatctaacatctggagtgaggctgaaaaaccttagtccccccacctcgttgaaggaaatcagcctcattcaactagattcaatgcgcctctctcatcaaatgctggtgcgatgcgccgccataattgggctgaccttcaccactgaactgctttttgaaatcctcccctgctggaacatgaaaatgatgatcaaaacgctggccacgttagtggagagtaacatcttctactgtttccgtaatggcaaggagttgcagaaggccctgaaacagaacgacccttcttttgaggtccactatcgctccttaagcctgaagcctagcgagggcatggaccacggggaggaagagcaactccgcgaactggagaatgaagtaatcgagtgtcacaggatccggttctgtaatcccatgatgcagaagaccgcatatgagctgtggctgaaagaccagcgaaaggccatgcacctgaagtgcgctaggttcctggaagaggatgcccaccgctgcgatcactgtaggggaagggactttattccctaccaccattttaccgtgaatatccggcttaacgctcttgatatggacgctatcaagaaaatggcaatgtcccacggcttcaagacagaggaaaagctaattctgagtaatagcgaaatccccgagacttctgcttttttccctgaaaacaggtcccccgaggagattcgggaaaagatcctaaattttttcgatcacgtcttgactaagatgaaaacatccgacgaggatattatcccacttgaaagctgccagtgcgaggagatcctcgagattgtcatcctccccctggcccaccacttcttggcactgggtgagaacgacaaagccctgtattacttcctggaaatagcgagcgcctatctgatcttttgtgataattacatggcttacatgtatctcaatgagggacagaaactgctcaaaacgctgaaaaaggacaagtcctggagccaaacatttgagtcagcaacattctattcattaaaaggcgaagtctgctttaacatgggtcagattgttttagccaaaaaaatgctgcgaaaggcgctgaaactgctaaacagaatctttccatacaacctcatcagcctcttcctccacattcacgtcgagaagaacaggcacttccactatgtgaatagacaggcgcaagaatcccctcctccgggcaagaagagactcgctcagctctacagacagaccgtgtgtctctcactgctgtggcgaatatactcttatagttatctctttcattgcaaatattacgctcacctggctgttatgatgcagatgaatactgccctagagacccaaaactgtttccagattatcaaggcctatctggactactcgttgtaccatcacctggcaggctacaaaggcgtatggttcaaatacgaggtgatggctatggagcacatttttaatttgcctctgaagggggagggcattgagatagttgcatatgtggcagagacactggtttttaacaagttgatcatgggccatctcgacctagccatagaacttggctctagggcactacagatgtgggctctgctgcaaaaccctaatcggcactaccagtcattgtgcaggctgtcccgatgcctgctgctcaattcccggtacccccagctaatccaggtgttaggaagattatgggaactgtccgtgactcaggaacatatttttagcaaggctttcttctatttcgtttgcttagacattttactgtactcaggtttcgtctatcggacgtttgaggagtgtttggagttcattcatcagtatgagaacaaccggatacttaagttccattctggtctcctgctgggactctattccagtgtcgcaatttggtatgcaagactccaggaatgggacaacttctataaatttagtaacagggccaagaacttgctgccaagacggaccatgactttgacctactatgatggaatctcccgttacatggagggccaggtcctgcacctgcagaaacagatcaaggagcaatcagagaacgcgcaggcttcgggggaagagctcctcaagaacttggaaaatctggtggcacagaataccaccggtcctgttttttgtcctcggttgtatcacttgatggcgtacgtctgtatactgatgggcgacggtcagaagtgtggcctatttctgaataccgcgctgcgcttaagcgaaacccagggcaacatcctcgaaaagtgttggttgaatatgaacaaggagtcttggtacagcactagcgagctgaaggaagaccagtggttgcagacaatattaagcttgccaagctgggagaaaatcgtggcaggccgcgtgaatatacaagatctacaaaagaacaaatttttgatgcgagccaacacagtagataatcacttttag

SEQ ID NO: 198406 - DNA, 4374 bp, Artificial Sequence
  derived and/or modified sequence
atgctggtgttcggcgacgagacccacagccacttcctggtgatcggccaggccgttgatgacgtcaggctagcccagaacatggcacagatgaacgatgtcatcttgagtcctaactgttggcaactatgtgatcggagcatgatagagatcgagagcgttccggaccaacgtgcagtcaaggtgaactttctgaagccaccccccaatttcaactttgatgagttttttaccaagtgcacaacctttatgcattattatccatctggagagcacaagaacttgttacgcttagcatgtactctgaaacctgacccagaacttgagatgtcactgcaaaaatatgtgatggagtccatcttgaagcagatcgacaacaaacagctgcagggctatctgtccgaactacggccagttaccattgtctttgtgaacctaatgttcgaggaccaggacaaagccgaagaaatcgggcccgctattcaggacgcatacatgcacatcaccagcgtgctgaagatctttcagggccagatcaacaaggtgtttatgtttgataagggatgctccttcctgtgcgtttttggcttcccgggtgaaaaagtgcccgacgagctcacccacgcccttgagtgtgcaatggatatattcgacttctgtagtcaggttcataagatccagacagtttccattggggtggcttcagggatagtgttttgtggaatcgtcggccatacggtaaggcacgaatacacagtgatcggtcaaaaggtgaatctggctgcgcggatgatgatgtactatccggggatagtcacttgcgactcagtaacttataatgggtcaaacctgccggcgtacttcttcaaggagctgcctaagaaagttatgaagggtgtggcagactctgggccactgtaccagtattgggggcggaccgaaaaggtaatgtttggtatggcctgcctgatttgcaataggaaggaagactatccactgcttggcaggaataaagaaattaattattttatgtacacgatgaaaaaattcctgatatctaattcatctcaagtgctgatgtatgagggcttgccaggttatggtaaatcccagatcctgatgaaaatcgaatacctggcacagggcaagaaccaccgcatcattgccattagcctgaacaaaatcagcttccatcaaacgttctatacaattcaaatgttcatggcaaacgtccttggactggatacttgcaagcattacaaagagcgtcagaccaatctgaggaataaggtgatgacattactggatgagaaattttactgcctcctgaatgatattttccacgtgcagttccctatctccagggagatctcaagaatgtccaccttgaagaaacagaagcagttggaaatactcttcatgaagatcctgaagctgatcgtgaaagaagagcggattattttcatcatcgatgaggcacaatttgtggattccacttcttggaggttcatggagaaattgatcaggacactgcccattttcatcatcatgagtttgtgtccttttgtgaacatcccatgcgcagctgctagggccgtgatcaagaatcgcaacactacatacatagtgattggggctgttcagcccaatgacatcagcaacaaaatttgcttggacctgaacgtgagttgtattagcaaggaacttgactcttatctgggagaggggtcgtgtggaatccccttctactgcgaagaactgctcaagaatctagaacaccatgaggtgctggtctttcagcaaaccgaaagtgaagaaaagacaaatcgaacatggaacaatcttttcaaatattctatcaagctcacagaaaaactcaatatggtcacactgcattccgataaggaatctgaagaggtgtgtcacctgacctcaggcgtccgcctgaagaacttgtccccgcctacatccttgaaagaaatcagcctgatacagctggatagcatgagattgagccatcaaatgcttgtgcgctgtgccgccatcattgggttgacctttacgaccgaactgctatttgagatcctcccttgttggaatatgaagatgatgattaagaccctcgcaactctggttgagtcaaacatcttttactgcttccgtaacgggaaggagcttcaaaaggctttgaagcaaaacgacccttcttttgaagtgcactaccggtctctgagcctgaagccctctgagggcatggaccacggggaagaggaacagctgagagagctggagaacgaggtaatcgagtgccacagaatccggttttgcaatcccatgatgcaaaaaaccgcttacgaattatggcttaaggaccagcgcaaagccatgcacttgaagtgtgcacgtttccttgaagaggatgctcaccggtgtgaccactgccgaggacgcgattttatcccttaccaccattttaccgtgaacataagactcaatgctctcgatatggacgcaatcaagaagatggccatgtctcacggctttaagaccgaggagaagctgatcttatccaatagcgagataccggaaacaagcgcattcttccccgaaaatcgcagccccgaggagatacgcgaaaagatactcaatttttttgaccacgtgctgaccaagatgaaaacaagcgatgaagacatcattccgctcgagagttgtcagtgtgaagagatccttgagatcgttatcctgcctttggcacaccatttcctggccctgggtgaaaacgacaaggccttgtactacttcctggagatcgccagcgcatacctgattttctgcgacaactatatggcttacatgtatctgaatgaagggcaaaagctcttaaaaacactgaaaaaggataagtcatggtcacagacattcgaatccgccacgttttatagcctcaagggtgaagtctgcttcaacatgggacagatagtactcgcaaagaaaatgctgcggaaggcactcaagctcctgaatagaatctttccttacaacctgatcagcctatttctgcacattcatgttgagaaaaatagacacttccactacgtgaatcgccaagcccaagagagcccccccccgggcaagaaaagactggcacagctttacaggcagactgtttgtttgtctctgctgtggcggatttactcttatagttatctgttccactgcaaatactacgcgcacctggcagtgatgatgcagatgaacactgcgctcgaaacccagaattgttttcaaattattaaggcctacctcgactattctctctaccaccacctggccggctacaagggcgtatggtttaagtacgaggtcatggcaatggagcacatttttaacctgcctctcaagggcgagggaatcgagattgtggcctatgtggctgagaccctcgtcttcaacaagcttattatggggcacctcgatctcgctatagagctagggtcaagagctctgcagatgtgggcgttacttcagaatccaaatcggcactaccagtcactgtgccgactgtcacgttgtctcttgttgaacagtcgttacccccagttgatccaagtcttgggcagactctgggaattgtccgttacgcaagagcacattttttctaaggcatttttttatttcgtctgcttggacatcctgctatacagcggatttgtttataggactttcgaggaatgtctggaatttatccatcagtacgaaaacaaccgtatacttaagttccacagcggactgttgttgggcctttactcctccgtggccatctggtacgcccgacttcaggaatgggacaacttttacaaattctcaaatcgagcaaaaaacttactgcctagacgaaccatgaccctgacttactacgacgggatcagccggtatatggaggggcaagtgctgcatttgcaaaagcagattaaggagcagtccgaaaacgcgcaggctagcggcgaagaactactgaaaaacctcgaaaatctggtcgcacagaatactactggtccggtattttgccccagactgtatcatctcatggcctatgtctgcattctgatgggtgacggccagaaatgcggtctgttcctgaatactgctcttcggctgagcgagacgcaggggaatattttagaaaaatgttggctcaacatgaacaaagagtcttggtattcaacgtccgagttgaaggaagaccagtggctgcagactattctgtcgctgcccagctgggagaaaatcgtcgcaggccgtgttaatattcaagatcttcagaaaaacaaatttttgatgcgcgctaacactgtggacaatcatttttag

SEQ ID NO: 198407 - DNA, 4833 bp, Artificial Sequence
  derived and/or modified sequence
atgaatacacccaaggaggaattccaggattggccaatagtgaggattgcagcccacctgcctgacctgatcgtttatggacacttttccccagagcgtccttttatggattatttcgatggagtgcttatgtttgtggatatttctggcttcacagccatgactgaaaaattcagcagcgccatgtacatggaccgcggtgccgaacaattggttgaaatcctcaactaccacatctcagccatcgtagaaaaggtgctgatttttgggggtgatatcctgaaatttgctggagacgctttactagcattgtggcgtgttgagcggaagcaactgaagaacatcattacggtggtgatcaaatgttctctggaaatacacggcttatttgagactcaggagtgggaagagggtctggatattagggtgaagatcgggcttgctgccggacacatctccatgctggtctttggggacgaaactcattcacacttcctcgttatcggccaagctgtggacgacgtacggctggcccagaatatggcccaaatgaatgatgtgatcctgtcccccaattgttggcaactgtgcgatagatctatgatcgaaattgaatccgtcccagaccagagagccgttaaggtgaatttcctcaaacctccccctaattttaatttcgacgagttcttcacaaagtgcacaacattcatgcattattatccttcgggggaacataaaaacctgttgagactggcatgtaccctcaaaccggacccggagctggagatgtctctgcagaaatacgtcatggagtccatactaaagcagatagataataaacagttacaggggtatttgtcagagctgcgcccagtgactatcgtttttgtaaatctgatgtttgaggatcaagacaaagcagaggagatcggaccggcaatccaggatgcctacatgcacattaccagtgtgctcaagatcttccaggggcagattaacaaagtttttatgtttgataaagggtgttcttttctatgcgtgttcgggttcccgggagagaaagttcccgacgagttgactcacgccctcgagtgtgccatggacattttcgatttttgctctcaggtccacaaaatccaaacggtgtctatcggagtggcctctggcattgtgttctgcggaatcgttggtcacactgtcaggcatgagtacactgtgattgggcagaaggtgaatctggccgctcgcatgatgatgtactaccctgggatcgtaacctgcgacagcgtgacctacaatgggtccaacttaccagcctatttctttaaggagctccctaaaaaggtaatgaagggggttgccgacagtggacctttgtatcagtactggggaagaaccgaaaaggtgatgtttggtatggcttgccttatttgcaatcgcaaggaggattatccccttttgggccgtaataaggagatcaattactttatgtacactatgaaaaagtttcttatctctaactcctctcaggtattaatgtacgaaggcctgccgggatacggcaagagtcagatcttgatgaagattgaatacctggctcagggcaaaaaccaccgcataattgctatatcgctaaacaagatatcttttcaccagacattttacaccattcagatgtttatggctaacgtactgggactcgacacatgtaagcattataaagagcgacagacaaaccttagaaataaagtgatgaccctcctcgacgagaaattttactgtctgcttaacgacatcttccacgtccagttccccatctccagggagatctcacgaatgagcactctcaagaagcagaagcagctcgagatcctattcatgaagatccttaagcttattgtcaaggaagagagaataatttttataattgacgaagcacaatttgtagactctacctcttggcgcttcatggaaaaactcatccgaacactccccatcttcataataatgtccctgtgccctttcgtcaacattccgtgcgcggcagcaagggccgtgattaagaacagaaatactacgtacatcgtgatcggagccgtgcagccaaatgatattagtaataaaatctgcctggacctcaacgtttcctgcatctctaaggagctggattcttaccttggcgagggcagctgtggaatccccttttactgtgaagagctgttaaaaaacctggaacaccacgaggtgctggttttccaacagactgagagtgaagaaaagactaaccgcacctggaacaatctgttcaagtattctataaaattgaccgagaagctgaatatggtaaccctccacagcgacaaggaaagcgaagaggtgtgtcatctgacgagcggcgtgaggttgaagaatttgagtccccctacctctctcaaggagatcagcctgatccaactggactccatgagactgtctcatcaaatgttagtgcgctgcgctgccatcataggattgacctttacgactgagttacttttcgaaatcttaccctgttggaacatgaaaatgatgataaaaaccctggccactctggtggagtccaacatcttctattgcttcagaaacgggaaggagctccagaaggccctgaagcaaaacgacccctcctttgaagttcattaccggtcccttagcctcaagcctagcgaaggaatggatcacggcgaagaggagcaattgagagaactggagaatgaagttatagagtgtcatcgcatacggttctgtaatcctatgatgcagaaaaccgcttatgagctgtggctgaaagaccagagaaaggcaatgcatctaaagtgcgccagatttttggaggaggacgcccaccgctgcgaccactgtagaggaagagacttcattccgtaccaccactttacagttaacattcggctcaacgccctcgatatggatgcgattaagaagatggccatgtcacatggatttaagacagaagaaaagttgatcctgtccaacagcgaaatccctgagacatcagccttttttcctgaaaacaggtcacccgaagagattcgggaaaagatcctgaacttcttcgatcatgtgctgactaagatgaagacgtccgatgaggacatcatccctctagagagttgtcagtgtgaggaaatcttagaaatcgttatcttgcctttagcccatcactttctggccctgggagaaaatgacaaagccctgtattattttctggagattgccagtgcatacttaatcttctgcgacaactacatggcatatatgtatctaaatgaaggccagaaactgttgaaaactctgaagaaggataaatcgtggtctcagacttttgagagtgcaacattctatagcctgaaaggagaagtgtgctttaatatgggacaaatcgtcctggccaagaagatgcttcggaaagccctgaagctgctgaataggattttcccatataaccttatatcccttttcttacacatccatgtggagaaaaataggcatttccattacgtgaaccgacaagctcaggaaagtccaccaccaggcaaaaagcgattggcccaactgtaccggcagactgtttgcctttctctactgtggaggatctatagctatagttacctgtttcattgcaaatactatgcccacctggcggtgatgatgcagatgaacacggccctggaaacacagaattgcttccagatcattaaggcgtaccttgattacagtttgtatcaccatctcgcgggttacaaaggtgtctggtttaaatacgaagttatggcaatggagcacatctttaacctgcctctgaagggcgagggtattgaaattgtggcttacgtggccgagacactcgtctttaataagctgatcatgggtcacttggatctggcaatcgaactgggtagtagggccctgcagatgtgggccctgttgcagaatcctaataggcactaccagtccctgtgtcgtctgagtcgctgcctactgcttaattccagatatcctcaactgattcaagtgctagggagactgtgggaactctcggtcacccaagagcatatattttcgaaagcattcttttactttgtctgtctggacattctgttgtattcaggttttgtgtacagaactttcgaagagtgcctcgagtttattcaccagtatgaaaacaaccgcatcttaaaatttcacagtggcctgctgctgggcctgtactccagcgttgccatatggtacgctagattgcaggaatgggataatttttataaattcagcaaccgggcaaaaaatcttctcccaagacgaactatgactctgacttactatgacggcatttcccgatacatggagggccaagtgctgcatcttcagaagcagattaaagaacagtctgagaatgcccaggcatctggcgaagagctcctgaagaatttagaaaatctcgtcgctcaaaacacaaccgggcctgtgttctgccccaggctctatcacttgatggcctacgtatgtatcctgatgggcgatggtcagaagtgcggattattcttgaatactgctctgcgcctcagcgagacccagggtaatatcctcgaaaagtgctggctgaatatgaacaaagagtcgtggtacagcacgtccgagctcaaggaggaccaatggctgcagaccattctatctttaccgtcatgggagaagattgtggctgggagagtgaatatacaggatctccagaaaaacaagtttctcatgcgcgcaaacaccgtggacaatcacttctag

SEQ ID NO: 198408 - DNA, 4374 bp, Artificial Sequence
  derived and/or modified sequence
atgctggtgttcggagacgaaacacattcacacttcctcgtaattggacaggctgttgatgatgttcgcctggctcaaaacatggctcagatgaatgacgtcatcctatctcccaactgctggcagctgtgcgacagaagtatgatagagatcgagtccgttcccgaccagcgcgcagtcaaggttaattttctaaaaccgcctcctaacttcaatttcgacgagttcttcaccaagtgtacaacttttatgcattactaccctagcggagaacataagaacctgctgcgactggcttgtaccctgaagcctgacccagagttagagatgtcattgcagaagtatgttatggagagcattctgaagcaaatcgataataaacagctgcagggttacctttccgagctgcgtcctgtgacaatagtttttgtaaatcttatgttcgaggaccaggataaggccgaggagatcggccctgcaatacaggacgcctacatgcatataacttcagtcctgaagatcttccaggggcagatcaataaagtattcatgttcgataagggttgttcttttctctgcgtgtttggattccctggcgagaaggttcctgatgagcttacccatgcacttgagtgtgccatggatatctttgacttttgtagccaggtgcataaaattcagacggtgtctatcggagtggccagcgggattgtgttctgcggaatagtcggccatactgtgcggcacgagtacactgtcatcggccagaaagttaacctggccgctcgaatgatgatgtattaccctgggattgtaacttgcgatagcgtgacctataacggctctaacctgccagcgtacttctttaaggagctcccgaaaaaagtcatgaagggcgtggcagactccggtccgctgtaccagtactggggccgtaccgaaaaggtgatgttcgggatggcttgcctcatatgcaatcgcaaggaggactacccactgttgggtcgtaacaaagaaatcaattattttatgtacaccatgaaaaaatttctcatctcaaatagctcccaggttctgatgtacgagggcttgcctggatacgggaaaagtcagatattaatgaagattgaataccttgcccaggggaagaatcaccgaattatagcaatctccctgaataaaatctccttccatcagactttttacaccatacagatgttcatggctaatgtgctgggactggacacatgcaaacattataaggaacggcaaaccaatctgcgcaataaggtgatgactctgctcgatgaaaagttttattgcttattaaacgatattttccatgttcagttcccaatctcacgtgagataagcagaatgagcactcttaaaaaacagaaacagctggagatcctctttatgaagatactcaagcttatcgtgaaagaagaaagaattatcttcattatcgatgaagcccagttcgtggatagtacaagctggcgatttatggagaaattgatccgcactcttccgattttcatcataatgagcctgtgcccctttgttaacattccctgtgccgctgctagagccgtaatcaaaaatcggaatacaacgtatatagtaattggcgctgtgcagcccaacgacatatcaaacaaaatctgtctcgacctcaacgtgtcttgtatctcaaaggaactcgacagttacctgggggaaggcagctgcggcatccctttttactgtgaggaattactgaagaatcttgaacatcatgaggtattggtgttccagcagactgagtctgaggaaaaaactaatagaacctggaacaatctgttcaaatattccattaaactcacagaaaaactcaacatggtgacactgcactccgataaagaatcggaggaggtatgtcacctgacttccggggtgagactgaaaaacttgagtccgcctacatcattgaaggaaataagcctcatccagctggacagcatgcggctctctcaccagatgcttgttcgctgcgcggctatcatcggccttaccttcacaactgagctcctttttgaaatattgccttgttggaacatgaagatgatgattaaaactctcgcaaccctggtcgagtcaaacatcttctactgcttccgcaacggaaaagaactacaaaaagctttaaagcagaatgacccttccttcgaagttcactatcgatcactgagccttaagccttcagagggcatggaccatggagaggaggaacagcttagagagctggaaaatgaggtcattgagtgccatagaattcgattctgcaacccaatgatgcagaagaccgcctatgagttgtggctgaaagaccagagaaaggcaatgcaccttaaatgcgctaggttcctcgaagaggacgctcacaggtgcgaccactgcaggggacgagacttcataccctaccatcactttacagtgaacatacgcctgaacgctctggatatggacgcaattaaaaagatggccatgtcccatggctttaagacagaggaaaaacttattttatcaaactcagaaattccagagaccagcgccttcttccctgaaaatcgctctcccgaagaaattagggaaaagattctaaacttctttgatcacgtcctgacaaaaatgaagaccagcgatgaggacataattccactggaatcatgtcagtgtgaagagattctggagattgtcattctgcctctcgcccaccacttcctggctctcggcgaaaatgataaggcgctctactatttcctagagatcgcgtccgcctatctaatcttttgcgataactacatggcttacatgtatctgaacgagggccagaagctattgaaaaccctcaagaaagataagagttggtcacagacgtttgaatcagcgaccttttattccttgaaaggagaggtttgttttaatatgggacaaatagtgctggctaagaagatgctgagaaaagctctcaaattacttaacagaattttcccttacaacctcatatctctctttcttcacatccacgttgagaagaaccgacatttccactatgtgaatcgccaggcacaggaatcgccaccccctgggaagaaacgactggcccagctttacaggcagaccgtttgtctttcactgctgtggaggatctactcctactcctatctgttccactgcaagtactacgcacatcttgctgttatgatgcaaatgaacaccgctctcgagacccagaattgtttccagatcatcaaggcctatcttgactattcactgtaccatcacttggccggttacaagggagtttggttcaaatacgaggtgatggccatggaacacatcttcaaccttcccttgaagggagaaggaattgaaatcgtggcttacgttgctgagacactggtctttaataaactcatcatgggccacctagatttggccatcgaactgggaagccgggctctccagatgtgggccttgctacagaatccgaacaggcattaccagagcttatgccggctttcccggtgcctgttacttaactcaaggtacccacaattaattcaggtcctcggacgcctttgggagctgtcagtgacgcaggagcacatattttccaaagccttcttctatttcgtctgtctggacatcctgctgtactccgggtttgtctaccggacctttgaagagtgtctggagtttattcaccagtatgagaacaatcgaattctgaaattccactctgggttgctgctcgggctatattcttcagtggctatttggtacgcgcgtttgcaggaatgggataatttttacaaattttcaaatagagccaaaaacctcttgccaagaagaactatgactctgacttattacgacggcatttccagatatatggaggggcaggttcttcacctgcagaagcagatcaaagagcagagcgagaatgcgcaagcgtctggggaggagttgttaaagaatcttgaaaatctagtggctcagaacaccacgggtccagtcttttgccctcggctctaccaccttatggcctatgtgtgtatcctgatgggggatggacagaaatgcggcctgttcctaaatactgctctgcgcctgagcgaaacacagggcaacatcctggaaaagtgttggctgaacatgaataaagaatcctggtactccactagcgaacttaaggaggatcagtggctgcagacgatacttagtctccccagttgggaaaaaattgtcgccggaagggtgaatatccaggacctgcagaaaaataagttcttaatgcgggctaataccgtggacaaccatttttag

SEQ ID NO: 198409 - protein, 458 aa, Artificial Sequence
  derived and/or modified sequence
MDGSRRVRATSVLPRYGPPCLFKGHLSTKSNAFCTDSSSLRLSTLQLVKNHMAVHYNKILSAKAAVDCSVPVSVSTSIKYADQQRREKLKKELAQCEKEFKLTKTAMRANYKNNSKSLFNTLQKPSGEPQIEDDMLKEEMNGFSSFARSLVPSSERLHLSLHKSSKVITNGPEKNSSSSPSSVDYAASGPRKLSSGALYGRRPRSTFPNSHRFQLVISKAPSGDLLDKHSELFSNKQLPFTPRTLKTEAKSFLSQYRYYTPAKRKKDFTDQRIEAETQTELSFKSELGTAETKNMTDSEMNIKQASNCVTYDAKEKIAPLPLEGHDSTWDEIKDDALQHSSPRAMCQYSLKPPSTRKIYSDEEELLYLSFIEDVTDEILKLGLFSNRFLERLFERHIKQNKHLEEEKMRHLLHVLKVDLGCTSEENSFSSVKGDNNHDMELSTLKIMEMSIEDCPLDV

SEQ ID NO: 198410 - protein, 599 aa, Artificial Sequence
  derived and/or modified sequence
MDGSRRVRATSVLPRYGPPCLFKGHLSTKSNAFCTDSSSLRLSTLQLVKNHMAVHYNKILSAKAAVDCSVPVSVSTSIKYADQQRREKLKKELAQCEKEFKLTKTAMRANYKNNSKSLFNTLQKPSGEPQIEDDMLKEEMNGFSSFARSLVPSSERLHLSLHKSSKVITNGPEKNSSSSPSSVDYAASGPRKLSSGALYGRRPRSTFPNSHRFQLVISKAPSGDLLDKHSELFSNKQLPFTPRTLKTEAKSFLSQYRYYTPAKRKKDFTDQRIEAETQTELSFKSELGTAETKNMTDSEMNIKQASNCVTYDAKEKIAPLPLEGHDSTWDEIKDDALQHSSPRAMCQYSLKPPSTRKIYSDEEELLYLSFIEDVTDEILKLGLFSNRFLERLFERHIKQNKHLEEEKMRHLLHVLKVDLGCTSEENSVKQNDVDMLNVFDFEKAGNSEPNELKNESEVTIQQERQQYQKALDMLLSAPKDENEIFPSPTEFFMPIYKSKHSEGVIIQQVNDETNLETSTLDENHPSISDSLTDRETSVNVIEGDSDPEKVEISNGLCGLNTSPSQSVQFSSVKGDNNHDMELSTLKIMEMSIEDCPLDV

SEQ ID NO: 198411 - DNA, 1800 bp, Artificial Sequence
  derived and/or modified sequence
atggacggcagcagaagagtgagagccaccagcgtgctgcccagatacggccccccctgcctgttcaagggccacctgagcaccaagagcaacgccttctgcaccgacagcagcagcctgagactgagcaccctgcagctggtgaagaaccacatggccgtgcactacaacaagatcctgagcgccaaggccgccgtggactgcagcgtgcccgtgagcgtgagcaccagcatcaagtacgccgaccagcagagaagagagaagctgaagaaggagctggcccagtgcgagaaggagttcaagctgaccaagaccgccatgagagccaactacaagaacaacagcaagagcctgttcaacaccctgcagaagcccagcggcgagccccagatcgaggacgacatgctgaaggaggagatgaacggcttcagcagcttcgccagaagcctggtgcccagcagcgagagactgcacctgagcctgcacaagagcagcaaggtgatcaccaacggccccgagaagaacagcagcagcagccccagcagcgtggactacgccgccagcggccccagaaagctgagcagcggcgccctgtacggcagaagacccagaagcaccttccccaacagccacagattccagctggtgatcagcaaggcccccagcggcgacctgctggacaagcacagcgagctgttcagcaacaagcagctgcccttcacccccagaaccctgaagaccgaggccaagagcttcctgagccagtacagatactacacccccgccaagagaaagaaggacttcaccgaccagagaatcgaggccgagacccagaccgagctgagcttcaagagcgagctgggcaccgccgagaccaagaacatgaccgacagcgagatgaacatcaagcaggccagcaactgcgtgacctacgacgccaaggagaagatcgcccccctgcccctggagggccacgacagcacctgggacgagatcaaggacgacgccctgcagcacagcagccccagagccatgtgccagtacagcctgaagccccccagcaccagaaagatctacagcgacgaggaggagctgctgtacctgagcttcatcgaggacgtgaccgacgagatcctgaagctgggcctgttcagcaacagattcctggagagactgttcgagagacacatcaagcagaacaagcacctggaggaggagaagatgagacacctgctgcacgtgctgaaggtggacctgggctgcaccagcgaggagaacagcgtgaagcagaacgacgtggacatgctgaacgtgttcgacttcgagaaggccggcaacagcgagcccaacgagctgaagaacgagagcgaggtgaccatccagcaggagagacagcagtaccagaaggccctggacatgctgctgagcgcccccaaggacgagaacgagatcttccccagccccaccgagttcttcatgcccatctacaagagcaagcacagcgagggcgtgatcatccagcaggtgaacgacgagaccaacctggagaccagcaccctggacgagaaccaccccagcatcagcgacagcctgaccgacagagagaccagcgtgaacgtgatcgagggcgacagcgaccccgagaaggtggagatcagcaacggcctgtgcggcctgaacaccagccccagccagagcgtgcagttcagcagcgtgaagggcgacaacaaccacgacatggagctgagcaccctgaagatcatggagatgagcatcgaggactgccccctggacgtgtag

SEQ ID NO: 198412 - DNA, 1800 bp, Artificial Sequence
  derived and/or modified sequence
atggacggttcaagacgggtgagagccactagtgttctccccaggtatggacccccctgtttgtttaaaggtcacctgtccaccaaaagcaatgccttttgcacggattcttcttcattgagactctccacgctccagctggtcaagaaccatatggccgttcactacaataagatactgagcgcaaaagcggccgttgattgcagcgtccccgtctctgtgagcacctcaatcaaatatgctgaccagcagcgtagagaaaagctcaaaaaggagctggcccagtgcgagaaggaatttaaactgacaaagaccgcaatgagagccaactataaaaacaattccaagtctctgtttaacacgctccagaagccatctggcgaaccacagatcgaggacgacatgctcaaggaggaaatgaatggcttttcctcattcgcccggagcctggtgcccagctcagagcggctgcacctttccctgcataaatcatccaaggtgattactaacgggcccgaaaaaaattcaagctcctctccttcatcagtggattacgcagctagtggcccgagaaagttgtcgagcggagctctgtacgggcggaggccgcgctcaacgttccctaatagccaccggttccagctcgtgatctccaaggcgccgagcggtgaccttctggacaaacattctgaactcttcagcaataagcagcttccattcactcccagaacccttaaaacagaggctaagtcattcctttctcagtatcgatactatacaccagctaaacggaaaaaggatttcacagaccagcggattgaagccgagacgcaaaccgagctgagctttaagtccgaactcgggaccgcagagactaaaaacatgactgacagtgaaatgaatattaaacaggcttctaactgcgtgacttacgatgccaaagagaaaatcgctccattaccactggagggacatgattctacgtgggacgaaattaaggacgatgccctccagcattccagccctcgcgcaatgtgtcagtattccttaaagcctccatcaacaagaaagatctactcggatgaggaggagctgctgtacctgtcctttatcgaagatgtcaccgacgagatcctgaaactcggtctcttcagcaaccggtttttggagagactatttgagcgccatattaaacagaacaaacacctcgaggaggaaaaaatgcgacatctgttgcacgttttgaaagtggatcttggctgcacatcagaagagaatagtgttaaacagaatgacgtcgacatgctcaacgtgtttgacttcgagaaggcagggaactccgaacctaatgagctcaagaatgagagtgaggtaactatccagcaggagcggcaacagtatcagaaggctttggacatgctgctttctgctccaaaagacgagaatgaaattttcccgagcccaactgagtttttcatgcccatatacaagagtaagcacagtgaaggagttatcatccagcaggtgaacgatgagactaatctggaaacgagtacactggacgagaaccacccaagtatctcagactctctaactgacagggaaacatctgttaacgtgattgagggggactctgatcccgagaaggtggaaatttctaatggtttgtgtgggctcaacactagcccttcccagtccgttcagttttcgtctgtgaagggtgacaataatcatgatatggaactctctactctcaaaatcatggaaatgtccattgaagactgccctcttgatgtttag

SEQ ID NO: 198413 - DNA, 1800 bp, Artificial Sequence
  derived and/or modified sequence
atggatggcagcagaagagtgcgggccacctctgtgctgcccaggtatggccccccctgcctcttcaagggccacctgagcaccaagagcaatgccttctgcacagacagcagcagcctgcggctgagcaccctgcagctggtgaagaaccacatggctgtgcactacaacaagatcctgagcgccaaggctgctgtggactgcagcgtgcctgtgtctgtgtccaccagcatcaagtatgctgaccagcagaggcgggagaagctgaagaaggagctggcccagtgtgagaaggagttcaagctgaccaagacagccatgagggccaactacaagaacaacagcaagagcctcttcaacaccctgcagaagcccagcggggagccccagattgaagatgacatgctgaaggaggagatgaatggcttcagcagctttgcccggagcctggtgcccagcagcgagcggctgcacctgagcctgcacaagagcagcaaggtgatcaccaacggccctgagaagaacagcagcagcagccccagctctgtggactatgctgccagcggccccaggaagctgagcagcggggccctgtatggaagaagacccaggagcaccttccccaacagccaccgcttccagctggtgatcagcaaggcccccagcggggacctgctggacaagcacagcgagctgttcagcaacaagcagctgcccttcacccccaggaccctgaagacagaggccaagagcttcctgagccagtaccgctactacaccccagccaagaggaagaaggacttcacagaccagagaattgaagctgagacccagacagagctgtccttcaagtctgagctgggcacagctgagaccaagaacatgacagacagcgagatgaacatcaagcaggccagcaactgtgtgacctatgatgccaaggagaagatcgcccccctgcccctggagggccatgacagcacctgggatgagatcaaggatgatgccctgcagcacagcagcccccgggccatgtgccagtacagcctgaagccacccagcaccaggaagatctacagtgatgaggaggagctgctgtacctgtccttcattgaagatgtgacagatgagatcctgaagctgggcctcttcagcaaccgcttcctggagcggctgtttgagcggcacatcaagcagaacaagcacctggaggaggagaagatgaggcacctgctgcacgtgctgaaggtggacctgggctgcaccagtgaagaaaattctgtgaagcagaatgatgtggacatgctgaatgtgtttgattttgagaaggccggcaacagcgagcccaatgagctgaagaatgaaagtgaggtgaccatccagcaggagcggcagcagtaccagaaggccctggacatgctgctgagcgcccccaaggatgaaaatgagatcttccccagccccacagagttcttcatgcccatctacaagagcaagcacagcgagggcgtcatcatccagcaggtgaatgatgagaccaacctggagaccagcaccctggatgagaaccaccccagcatcagtgacagcctgacagaccgggagacctctgtgaatgtgattgaaggagacagcgaccctgagaaggtggagatcagcaatggcctgtgtggcctgaacaccagccccagccagagcgtgcagttcagctctgtgaagggggacaacaaccacgacatggagctgagcaccctgaagatcatggagatgagcattgaggactgccccctggatgtgtag

SEQ ID NO: 198414 - DNA, 1800 bp, Artificial Sequence
  derived and/or modified sequence
atggacggcagccggcgggtgcgggccaccagcgtgctgccccggtacggtcctccatgtctgtttaagggacacctgtctacaaagtcaaacgccttttgcacagactcgtcttctctgcgtctgtctaccctgcagctcgtaaagaatcacatggcggtccactacaacaagatcctcagcgcaaaagccgccgtggactgctctgttcccgtgtctgtgtccacatcgatcaaatacgccgatcagcagaggagagagaaactgaagaaggaactcgcccaatgtgagaaagagtttaaactcaccaagacggccatgagggccaattataaaaacaattccaaatcactgtttaatacacttcagaaaccgtccggggagccacagattgaggacgacatgctgaaggaggagatgaacggctttagctcatttgctcgaagtctcgtgccatcttctgaacgtctacacctgtccttgcataaaagcagtaaagtgattacaaacggcccggagaagaactcgtcctctagccctagctctgtggattatgccgcgtctgggcctaggaagctcagcagcggggccctgtacggccgccggccgaggagcaccttcccaaacagccatcggtttcagctagtcatttccaaggccccatcgggggacctcctcgataaacacagtgaactcttcagcaacaagcagctgccgttcactccccggaccttaaaaacggaggctaaaagcttcttgagccaataccgttattatacgccagccaagcgcaaaaaagattttacagaccaaaggatcgaagccgagacacagactgagttatctttcaaatccgagttgggtaccgcagaaactaaaaacatgacggactcggaaatgaacatcaaacaagcttccaactgtgttacatacgacgcaaaagaaaaaatcgctccactaccccttgagggccacgactcaacctgggatgaaattaaagacgacgccctgcagcactcaagccctagagcaatgtgccaatactcattaaagcccccaagtactagaaaaatctacagcgacgaggaggagcttctttatctcagtttcatcgaggacgtcacggacgaaatccttaagttgggtctcttttctaacagattcctggagcgactctttgagcgtcatatcaaacaaaataaacacctggaagaggagaaaatgcggcacctgctgcacgtcttaaaggtggatctcggatgtacatcagaggagaactccgtcaaacagaacgacgttgatatgttaaacgtcttcgactttgaaaaggccggtaattccgaacccaatgagctgaagaatgaatcagaagtcacgattcagcaggaaagacaacagtaccagaaagcgctcgacatgttactctctgccccgaaggatgagaacgagatctttccctcccccacagagttttttatgcctatttacaagagtaaacacagcgagggggtgatcatccagcaggtgaacgatgaaaccaatctggagacatcgactcttgacgaaaatcacccaagcatctcggatagtcttaccgatagggagacctcggtcaatgttatcgaaggggactccgacccggaaaaagttgagatctccaatgggctctgtggactgaatacgtccccctcacagtccgtgcagtttagcagcgtaaaaggcgataacaatcatgatatggaactaagcaccctcaagatcatggagatgtctattgaggattgccccctcgacgtctag

SEQ ID NO: 198415 - DNA, 1800 bp, Artificial Sequence
  derived and/or modified sequence
atggatgggtccagacgagttcgggcaacttctgtgctgccccgatacgggcctccctgcctatttaagggacacctatccactaagagtaatgccttttgcactgattcaagtagtctccgactaagtacactgcagttagttaagaaccatatggctgtccattataataaaatcctctctgccaaggcggctgtcgattgctctgtgccggtgtcggtgagcactagtataaagtacgccgatcagcagcggcgagaaaagctcaaaaaagagcttgcacagtgtgaaaaagaattcaaacttaccaagaccgcaatgcgcgcaaactacaaaaataattccaaatctctgtttaataccttgcagaaaccctcaggagagccgcagattgaagacgacatgttgaaggaagagatgaacggcttctccagcttcgctagaagtttggttcctagctcagagcgcctgcacctgtcactccacaaaagttcaaaagtaattacaaatggtccggagaagaatagctcatcctctccgtctagcgtcgactatgccgcaagcggccctcggaaattgagctcaggcgctctgtacggcagacggcctaggtctacattccctaactcacacaggtttcagttagtcatatccaaggctccttcaggagacctgcttgataagcactccgagctgttcagcaacaagcaactgcctttcacgcccaggacacttaagacggaggctaagtctttcttatctcagtacagatattataccccagcaaaaagaaaaaaggatttcacagatcagcgaatagaagccgagactcagacggagctttctttcaaaagcgaattgggtacagcggaaacaaagaacatgaccgattccgaaatgaatatcaagcaggccagcaattgtgtgacttatgatgctaaagagaaaatagcgcctttgcccctcgagggacacgacagtacttgggatgagattaaggacgatgccctccaacattccagtccacgtgcaatgtgccaatatagcttgaagccacctagtacaaggaagatctattctgatgaggaggaactcttatatctaagcttcatcgaggacgtgactgatgagatcttgaaactgggcctgttttctaaccgttttctcgagcgcctgttcgagcgtcacattaagcagaacaagcatcttgaagaggagaaaatgagacatttgcttcacgtcctgaaagtagacttggggtgcacaagcgaagaaaattctgttaaacagaatgatgtagacatgttgaacgtcttcgatttcgaaaaagccggaaacagcgagccaaatgagctcaagaatgagtccgaagtcactattcagcaagaaagacaacaataccagaaagcgctggacatgctcctgtctgccccaaaagacgagaatgagatcttccccagtcctacggaattttttatgcccatctacaagagcaaacatagtgagggcgtaattattcaacaggttaacgacgaaactaacttggaaacgagtaccctggacgagaaccatccatctattagcgactccctcactgaccgcgagacatcggtgaacgtgatagagggcgatagtgaccccgaaaaggttgagatctctaatggcttgtgcgggctgaatactagtccaagccagagcgtgcaattctcaagtgtgaaaggcgataacaaccatgacatggaactcagtacactgaagattatggagatgtcgatcgaggattgccccttggacgtgtag

SEQ ID NO: 198416 - DNA, 2123 bp, Artificial Sequence
  derived and/or modified sequence
gactggggctcgatgccccttccccgccaggtctctccgtccgcaactgtcctcctagtaccgggtatcccgcaggcggggctgcggaacgcacgtcccctgcgccgtgacgtcacaatagcgactcactggacccagcccttagcaacggcctggcaacggtttccctgctgctgcagcccccgtcggctcctcttttccagtcctccactgccggggctgggcccggccgcgggaaggaccgaaggggatacagcgtgtccctgcggcggctgcaagaggactaagcatggatggcagccggagagtcagagcaacctctgtccttcccagatatggtccaccgtgcctatttaaaggacacttgagcaccaaaagtaatgctttttgcactgactcctcttctctcagactaagcactctccagctggtcaagaatcacatggctgttcactataataaaatcctttcagccaaagctgcagtagactgctcggttccagtaagcgtgagtaccagcataaagtatgcagaccaacaacgaagagagaaactcaaaaaggaattagcacaatgtgaaaaagagttcaaattaactaaaactgcaatgcgagccaattataaaaataattccaagtcactttttaataccttacaaaagccctcaggcgaaccgcaaattgaggatgacatgttaaaagaagaaatgaatggattttcatcctttgcaaggtcactagtaccctcttcagagagactacacctaagtctacataaatccagtaaagtcatcacaaatggtcctgagaagaactccagttcctccccgtccagtgtggattatgcagcctccgggccccggaaactgagctctggagccctgtatggcagaaggcccagaagcacattcccaaattcccaccggtttcagttagtcatttcgaaagcacccagtggggatcttttggataaacattctgaactcttttctaacaaacaattgccattcactcctcgcactttaaaaacagaagcaaaatctttcctgtcacagtatcgctattatacacctgccaaaagaaaaaaggattttacagatcaacggatagaagctgaaacccagactgaattaagctttaaatctgagttggggacagctgagactaaaaacatgacagattcagaaatgaacataaagcaggcatctaattgtgtgacatatgatgccaaagaaaaaatagctcctttacctttagaagggcatgactcaacatgggatgagattaaggatgatgctcttcagcattcctcaccaagggcaatgtgtcagtattccctgaagcccccttcaactcgtaaaatctactctgatgaagaagaactgttgtatctgagtttcattgaagatgtaacagatgaaattttgaaacttggtttattttcaaacaggtttttagaacgactgttcgagcgacatataaaacaaaataaacatttggaggaggaaaaaatgcgccacctgctgcatgtcctgaaagtagacttaggctgcacatcggaggaaaactcggtaaagcaaaatgatgttgatatgttgaatgtatttgattttgaaaaggctgggaattcagaaccaaatgaattaaaaaatgaaagtgaagtaacaattcagcaggaacgtcaacaataccaaaaggctttggatatgttattgtcggcaccaaaggatgagaacgagatattcccttcaccaactgaatttttcatgcctatttataaatcaaagcattcagaaggggttataattcaacaggtgaatgatgaaacaaatcttgaaacttcaactttggatgaaaatcatccaagtatttcagacagtttaacagatcgggaaacttctgtgaatgtcattgaaggtgatagtgaccctgaaaaggttgagatttcaaatggattatgtggtcttaacacatcaccctcccaatctgttcagttctccagtgtcaaaggcgacaataatcatgacatggagttatcaactcttaaaatcatggaaatgagcattgaggactgccctttggatgtttaatcttcattaataaatacctcaaatggccagtaac

SEQ ID NO: 198417 - protein, 384 aa, Artificial Sequence [sequence omitted]

SEQ ID NO: 198418 - DNA, 1718 bp, Artificial Sequence
  derived and/or modified sequence
ccgccatccgccctcccggcctggcctgcccttgcgcccggctccccagtgcccgccgcccgcccgccgcgctcccgcgctccgttccgcccaggccgcgcccagctggaatgcagagatcgccgcccggctacggcgcacaggacgacccgcccgcccgccgcgactgtgcatgggccccgggacacggggccgccgctgacacgcgcggcctcgccgccggccccgccgccctcgccgcgcccgccgcgcccgcctcgccgcccagcccgcagcgcagtcccccgcgcagccccgagccggggcgctatggcctcagcccggccggccgcggggaacgccaggcggcagacgagtcgcgcatccggcggcccatgaacgccttcatggtgtgggcaaaggacgagcgcaagcggctggctcagcagaacccggacctgcacaacgcggtgctcagcaagatgctgggcaaagcgtggaaggagctgaacgcggcggagaagcggcccttcgtggaggaagccgaacggctgcgcgtgcagcacttgcgcgaccaccccaactacaagtaccggccgcgccgcaagaagcaggcgcgcaaggcccggcggctggagcccggcctcctgctcccgggattagcgcccccgcagccaccgcccgagcctttccccgcggcgtctggctcggctcgcgccttccgcgagctgcccccgctgggcgccgagttcgacggcctggggctgcccacgcccgagcgctcgcctctggacggcctggagcccggcgaggctgccttcttcccaccgcccgcggcgcccgaggactgcgcgctgcggcccttccgcgcgccctacgcgcccaccgagttgtcgcgggaccccggcggttgctacggggctcccctggcggaggcgctcaggaccgcgccccccgcggcgccgctcgctggcctgtactacggcaccctgggcacgcccggcccgtaccccggcccgctgtcgccgccgcccgaggccccgccgctggagagcgccgagccgctggggcccgccgccgatctgtgggccgacgtggacctcaccgagttcgaccagtacctcaactgcagccggactcggcccgacgcccccgggctcccgtaccacgtggcactggccaaactgggcccgcgcgccatgtcctgcccagaggagagcagcctgatctccgcgctgtcggacgccagcagcgcggtctattacagcgcgtgcatctccggctaggccgccggcgccgcccgggtccctgcagcgcttcctcccgcagcccccgcgaccgatccgaccgcgtcgctgccgctctgctctctcatacgcgtgtatgtttggttccatgtcacagccccctaggagccagtgatgctcggccttgcgcccgttccacctcccaggccacccttcctgggcttctgggccacctgccctcggggggcccctgcgagggtgcctggagttcccacgtgtcccggggcttttccaggaagcccgagcccaggacctgttggcagagttgccagggttacatttttgaagcacctgctccttttcttgcagtgtattttctacaaccagattgtattaatattttttactttgcccttttaaaaaatatacctaatacaatatatttaatttttaattaaactcttaaacttttcttccaaaaaaaaaaaaaaa

SEQ ID NO: 198419 - DNA, 1155 bp, Artificial Sequence
  derived and/or modified sequence
atgcagagaagcccccccggctacggcgcccaggacgacccccccgccagaagagactgcgcctgggcccccggccacggcgccgccgccgacaccagaggcctggccgccggccccgccgccctggccgcccccgccgcccccgccagcccccccagcccccagagaagcccccccagaagccccgagcccggcagatacggcctgagccccgccggcagaggcgagagacaggccgccgacgagagcagaatcagaagacccatgaacgccttcatggtgtgggccaaggacgagagaaagagactggcccagcagaaccccgacctgcacaacgccgtgctgagcaagatgctgggcaaggcctggaaggagctgaacgccgccgagaagagacccttcgtggaggaggccgagagactgagagtgcagcacctgagagaccaccccaactacaagtacagacccagaagaaagaagcaggccagaaaggccagaagactggagcccggcctgctgctgcccggcctggcccccccccagcccccccccgagcccttccccgccgccagcggcagcgccagagccttcagagagctgccccccctgggcgccgagttcgacggcctgggcctgcccacccccgagagaagccccctggacggcctggagcccggcgaggccgccttcttccccccccccgccgcccccgaggactgcgccctgagacccttcagagccccctacgcccccaccgagctgagcagagaccccggcggctgctacggcgcccccctggccgaggccctgagaaccgccccccccgccgcccccctggccggcctgtactacggcaccctgggcacccccggcccctaccccggccccctgagccccccccccgaggccccccccctggagagcgccgagcccctgggccccgccgccgacctgtgggccgacgtggacctgaccgagttcgaccagtacctgaactgcagcagaaccagacccgacgcccccggcctgccctaccacgtggccctggccaagctgggccccagagccatgagctgccccgaggagagcagcctgatcagcgccctgagcgacgccagcagcgccgtgtactacagcgcctgcatcagcggctag

SEQ ID NO: 198420 - DNA, 1155 bp, Artificial Sequence
  derived and/or modified sequence
atgcagagaagcccccccggatacggggcacaggatgacccccccgcccgacgggactgtgcctgggcgccaggtcacggcgctgctgcagatacgcgcgggcttgcagctggtccagccgcgctggccgctcctgcagcgcctgcttctccaccctccccacaacgctccccccccagaagccccgaaccaggcagatacggactctctccagccggcagaggtgagcggcaggccgccgacgaatccaggattaggagacctatgaatgctttcatggtgtgggcaaaggatgagcggaaaaggctcgcacaacagaaccccgatcttcataatgctgttctcagcaagatgctcggaaaagcctggaaggaactgaatgcagccgagaaaaggccctttgtagaagaggccgaacgtctgagagtccagcacttgcgggaccatcccaattataagtatcgaccccgccggaagaagcaagctagaaaggctagacgcctggagccaggcttactacttccaggtctggctcccccacaacctcctcccgaacccttcccagcagctagtggctccgcccgcgcttttagggaactgcccccattgggcgctgagtttgacggcttaggcctgcccaccccagagcgttcccccttggatggtctcgaacctggggaggcagccttcttcccccccccagctgcacccgaagattgcgccctccggccttttcgcgccccctacgcccccaccgagctgagccgggacccggggggttgctacggagcacctttagcagaagcactgcggactgcccctcccgctgcccccctggcagggctctattacggcacactcggcaccccaggcccgtacccaggtcccctttcgccgcccccagaagcacctccccttgaatcggcagaacccctaggacccgccgctgatctgtgggctgacgtcgacttaactgagttcgatcagtatctcaactgttctagaacacggcctgacgcaccaggccttccttaccacgttgctctggcgaagttgggaccgcgcgccatgtcctgtcctgaggagtcctccttgatcagcgccctgtcagatgcctcgagtgctgtgtactacagtgcatgcatatccggatag

SEQ ID NO: 198421 - DNA, 1155 bp, Artificial Sequence
  derived and/or modified sequence
atgcagaggagccccccaggctacggggcccaggatgaccccccagcccggcgggactgtgcctgggcccctggccacggggctgctgctgacacccggggcctggccgccggccctgctgccctggccgccccagctgccccagccagcccccccagcccccagaggagcccccccaggagccctgagcccggccgctatggcctgagccctgctggccgcggggagcggcaggccgcagatgagagccgcatccggcggcccatgaatgccttcatggtgtgggccaaggatgagaggaagaggctggcccagcagaacccagacctgcacaatgctgtgctgagcaagatgctgggcaaggcctggaaggagctgaatgctgctgagaagaggccctttgtggaggaggccgagcggctgcgggtgcagcacctgcgggaccaccccaactacaagtaccggcccaggaggaagaagcaggccaggaaggcccggcggctggagcccggcctgctgctgcccggcctggccccaccccagcccccacctgagcccttccctgctgccagcggcagcgcccgggccttccgggagctgccccccctgggcgctgagtttgatggcctgggcctgcccaccccagagaggagccccctggatggcctggagcctggagaggccgccttcttccccccacctgctgcccctgaggactgtgccctgcggcccttccgggccccctatgcccccacagagctgagccgggaccccggcggctgctacggggcccccctggccgaggccctgaggacagcccccccagctgcccccctggccggcctgtactacggcaccctgggcaccccaggcccctacccaggccccctgagccccccacctgaggccccacccctggagagcgctgagcccctgggccctgctgctgacctgtgggcagatgtggacctgacagaatttgaccagtacctgaactgcagcaggaccaggccagatgcccctggcctgccctaccacgtggccctggccaagctgggcccccgggccatgagctgcccagaggagagcagcctcatcagcgccctgagtgatgccagcagcgctgtgtactacagcgcctgcatctctggatag

SEQ ID NO: 198422 - DNA, 1155 bp, Artificial Sequence
  derived and/or modified sequence
atgcagcggagcccccccggctacggcgcccaggacgacccccccgcccggcgcgactgtgcatgggcacccggccacggagctgcagcagataccagagggctcgccgccgggcccgcagccttagccgcacctgccgctccagctagccctccaagtccccaacggtcgccgcccaggtcccccgagcccggaagatacggtctgtcccctgctggaagaggagagagacaggccgccgatgaatcacggatccgtcgcccaatgaacgcattcatggtatgggctaaagacgagcgtaagcgcctggcacagcaaaaccctgatttacacaacgccgttttgtctaagatgcttggaaaagcatggaaagaacttaacgcagccgaaaagcgacccttcgtagaggaggccgagcggttaagggtgcagcacctgcgtgaccatcccaactacaagtatcggccccgaagaaagaagcaagcgcggaaggccaggcggcttgagcccggtctgctgcttcccggactggcccctccacagcctccacccgaacccttcccggcagcttctggctcagccagagcttttagagagctgccgccactgggcgcagaattcgatggcttaggacttcctactcccgaacggtcaccactcgacggattggagcctggagaagcagccttcttccctcccccagcagcaccggaagattgcgcactgcggcccttccgggctccttatgcaccaactgaattgagccgggacccaggaggatgctatggggcgccgcttgccgaggcgctgcgaaccgcacctcctgccgcacccctggccggcctctactatggaacactggggaccccaggtccatatccaggtcccctgtccccaccaccagaggcccccccattggaatctgctgaacctctgggtcctgccgctgatctgtgggcagacgtggatctcacagagtttgatcagtacctgaattgctcaagaacccgacccgatgcgccggggcttccctaccacgtggccctcgcaaaacttggtcctcgagcaatgagttgccctgaagagagtagcttgatcagcgcactgtcggacgctagttctgccgtgtactactctgcttgtatcagtgggtag

SEQ ID NO: 198423 - DNA, 1155 bp, Artificial Sequence
  derived and/or modified sequence
atgcagcggtctcctcctggctatggagctcaggatgatcctccagctcgtcgcgactgcgcatgggcccctggacacggagcggctgcagacacacgcggtctggccgctggcccagcggcattggctgcaccagcagctcccgcatctccgccaagccctcagagatccccccctcgctcccccgagccgggtcggtatgggctgtcccctgctggccgaggcgaacgtcaggccgctgacgaatcaaggattcgccgtccaatgaacgccttcatggtgtgggctaaggacgagcgcaaacggctggcacaacagaatccagacctccacaacgcagtcttatctaagatgcttgggaaagcttggaaagagctgaatgctgctgaaaaaaggcccttcgtggaagaggcggaaagactgcgggtgcagcacctccgagatcacccgaattataagtaccgacccagaaggaaaaagcaggctaggaaggctcgaagattggaaccaggtctcttattgccagggctcgccccaccccagccaccccctgagcctttcccagctgccagcggatccgctagagcttttcgggagttgccgccactcggtgcagagtttgatgggcttggcctgcccacccccgagcgcagccccctcgacggcctcgaacccggagaggctgcattttttccaccccctgctgctcctgaagattgcgccctacgaccatttagagcaccctatgcccctacagagctgtccagagaccccggaggctgctatggcgcacctctggcagaagccttgcgcaccgcgccaccggctgctccgttagccggactgtactacggtaccctggggaccccaggaccatatccaggccctctgtcgcccccacctgaggctccccctctggagtcagccgagcctctgggaccagcagccgacctctgggcggacgtggacctaaccgaatttgaccagtacctgaattgttctcgaactaggccggatgcacccggtctcccttatcacgtggctctcgccaagctcgggccacgtgctatgtcatgtccggaagaatcatctctgatctcagctctgtccgatgctagttctgccgtctactactcagcatgcatcagcggttag

SEQ ID NO: 198424 - DNA, 1723 bp, Artificial Sequence
  derived and/or modified sequence
ccaccgccgtccccaccgccatccgccctcccggcctggcctgcccttgcgcccggctccccagtgcccgccgcccgcccgccgcgctcccgcgctccgttccgcccaggccgcgcccagctggaatgcagagatcgccgcccggctacggcgcacaggacgacccgcccgcccgccgcgactgtgcatgggccccgggacacggggccgccgctgacacgcgcggcctcgccgccggccccgccgccctcgccgcgcccgccgcgcccgcctcgccgcccagcccgcagcgcagtcccccgcgcagccccgagccggggcgctatggcctcagcccggccggccgcggggaacgccaggcggcagacgagtcgcgcatccggcggcccatgaacgccttcatggtgtgggcaaaggacgagcgcaagcggctggctcagcagaacccggacctgcacaacgcggtgctcagcaagatgctgggcaaagcgtggaaggagctgaacgcggcggagaagcggcccttcgtggaggaagccgaacggctgcgcgtgcagcacttgcgcgaccaccccaactacaagtaccggccgcgccgcaagaagcaggcgcgcaaggcccggcggctggagcccggcctcctgctcccgggattagcgcccccgcagccaccgcccgagcctttccccgcggcgtctggctcggctcgcgccttccgcgagctgcccccgctgggcgccgagttcgacggcctggggctgcccacgcccgagcgctcgcctctggacggcctggagcccggcgaggctgccttcttcccaccgcccgcggcgcccgaggactgcgcgctgcggcccttccgcgcgccctacgcgcccaccgagttgtcgcgggaccccggcggttgctacggggctcccctggcggaggcgctcaggaccgcgccccccgcggcgccgctcgctggcctgtactacggcaccctgggcacgcccggcccgtaccccggcccgctgtcgccgccgcccgaggccccgccgctggagagcgccgagccgctggggcccgccgccgatctgtgggccgacgtggacctcaccgagttcgaccagtacctcaactgcagccggactcggcccgacgcccccgggctcccgtaccacgtggcactggccaaactgggcccgcgcgccatgtcctgcccagaggagagcagcctgatctccgcgctgtcggacgccagcagcgcggtctattacagcgcgtgcatctccggctaggccgccggcgccgcccgggtccctgcagcgcttcctcccgcagcccccgcgaccgatccgaccgcgtcgctgccgctctgctctctcatacgcgtgtatgtttggttccatgtcacagccccctaggagccagtgatgctcggccttgcgcccgttccacctcccaggccacccttcctgggcttctgggccacctgccctcggggggcccctgcgagggtgcctggagttcccacgtgtcccggggcttttccaggaagcccgagcccaggacctgttggcagagttgccagggttacatttttgaagcacctgctccttttcttgcagtgtattttctacaaccagattgtattaatattttttactttgcccttttaaaaaatatacctaatacaatatatttaatttttaattaaactcttaaacttttcttccaagaa

SEQ ID NO: 198425 - protein, 917 aa, Artificial Sequence
  derived and/or modified sequence
MEGAGENAPESSSSAPGSEESARDPQVPPPEEESGDCARSLEAVPKKLCGYLSKFGGKGPIRGWKSRWFFYDERKCQLYYSRTAQDANPLDSIDLSSAVFDCKADAEEGIFEIKTPSRVITLKAATKQAMLYWLQQLQMKRWEFHNSPPAPPATPDAALAGNGPVLHLELGQEEAELEEFLCPVKTPPGLVGVAAALQPFPALQNISLKHLGTEIQNTMHNIRGNKQAQGTGHEPPGEDSPQSGEPQREEQPLASDASTPGREPEDSPKPAPKPSLTISFAQKAKRQNNTFPFFSEGITRNRTAQEKVAALEQQVLMLTKELKSQKELVKILHKALEAAQQEKRASSAYLAAAEDKDRLELVRHKVRQIAELGRRVEALEQERESLAHTASLREQQVQELQQHVQLLMDKNHAKQQVICKLSEKVTQDFTHPPDQSPLRPDAANRDFLSQQGKIEHLKDDMEAYRTQNCFLNSEIHQVTKIWRKVAEKEKALLTKCAYLQARNCQVESKYLAGLRRLQEALGDEASECSELLRQLVQEALQWEAGEASSDSIELSPISKYDEYGFLTVPDYEVEDLKLLAKIQALESRSHHLLGLEAVDRPLRERWAALGDLVPSAELKQLLRAGVPREHRPRVWRWLVHLRVQHLHTPGCYQELLSRGQAREHPAARQIELDLNRTFPNNKHFTCPTSSFPDKLRRVLLAFSWQNPTIGYCQGLNRLAAIALLVLEEEESAFWCLVAIVETIMPADYYCNTLTASQVDQRVLQDLLSEKLPRLMAHLGQHHVDLSLVTFNWFLVVFADSLISNILLRVWDAFLYEGTKYNEKEILRLQNGLEIYQYLRFFTKTISNSRKLMNIAFNDMNPFRMKQLRQLRMVHRERLEAELRELEQLKAEYLERRASRRRAVSEGCASEDEVEGEA

SEQ ID NO: 198426 - DNA, 2754 bp, Artificial Sequence
  derived and/or modified sequence
atggagggcgccggcgagaacgcccccgagagcagcagcagcgcccccggcagcgaggagagcgccagagacccccaggtgcccccccccgaggaggagagcggcgactgcgccagaagcctggaggccgtgcccaagaagctgtgcggctacctgagcaagttcggcggcaagggccccatcagaggctggaagagcagatggttcttctacgacgagagaaagtgccagctgtactacagcagaaccgcccaggacgccaaccccctggacagcatcgacctgagcagcgccgtgttcgactgcaaggccgacgccgaggagggcatcttcgagatcaagacccccagcagagtgatcaccctgaaggccgccaccaagcaggccatgctgtactggctgcagcagctgcagatgaagagatgggagttccacaacagcccccccgccccccccgccacccccgacgccgccctggccggcaacggccccgtgctgcacctggagctgggccaggaggaggccgagctggaggagttcctgtgccccgtgaagaccccccccggcctggtgggcgtggccgccgccctgcagcccttccccgccctgcagaacatcagcctgaagcacctgggcaccgagatccagaacaccatgcacaacatcagaggcaacaagcaggcccagggcaccggccacgagccccccggcgaggacagcccccagagcggcgagccccagagagaggagcagcccctggccagcgacgccagcacccccggcagagagcccgaggacagccccaagcccgcccccaagcccagcctgaccatcagcttcgcccagaaggccaagagacagaacaacaccttccccttcttcagcgagggcatcaccagaaacagaaccgcccaggagaaggtggccgccctggagcagcaggtgctgatgctgaccaaggagctgaagagccagaaggagctggtgaagatcctgcacaaggccctggaggccgcccagcaggagaagagagccagcagcgcctacctggccgccgccgaggacaaggacagactggagctggtgagacacaaggtgagacagatcgccgagctgggcagaagagtggaggccctggagcaggagagagagagcctggcccacaccgccagcctgagagagcagcaggtgcaggagctgcagcagcacgtgcagctgctgatggacaagaaccacgccaagcagcaggtgatctgcaagctgagcgagaaggtgacccaggacttcacccacccccccgaccagagccccctgagacccgacgccgccaacagagacttcctgagccagcagggcaagatcgagcacctgaaggacgacatggaggcctacagaacccagaactgcttcctgaacagcgagatccaccaggtgaccaagatctggagaaaggtggccgagaaggagaaggccctgctgaccaagtgcgcctacctgcaggccagaaactgccaggtggagagcaagtacctggccggcctgagaagactgcaggaggccctgggcgacgaggccagcgagtgcagcgagctgctgagacagctggtgcaggaggccctgcagtgggaggccggcgaggccagcagcgacagcatcgagctgagccccatcagcaagtacgacgagtacggcttcctgaccgtgcccgactacgaggtggaggacctgaagctgctggccaagatccaggccctggagagcagaagccaccacctgctgggcctggaggccgtggacagacccctgagagagagatgggccgccctgggcgacctggtgcccagcgccgagctgaagcagctgctgagagccggcgtgcccagagagcacagacccagagtgtggagatggctggtgcacctgagagtgcagcacctgcacacccccggctgctaccaggagctgctgagcagaggccaggccagagagcaccccgccgccagacagatcgagctggacctgaacagaaccttccccaacaacaagcacttcacctgccccaccagcagcttccccgacaagctgagaagagtgctgctggccttcagctggcagaaccccaccatcggctactgccagggcctgaacagactggccgccatcgccctgctggtgctggaggaggaggagagcgccttctggtgcctggtggccatcgtggagaccatcatgcccgccgactactactgcaacaccctgaccgccagccaggtggaccagagagtgctgcaggacctgctgagcgagaagctgcccagactgatggcccacctgggccagcaccacgtggacctgagcctggtgaccttcaactggttcctggtggtgttcgccgacagcctgatcagcaacatcctgctgagagtgtgggacgccttcctgtacgagggcaccaagtacaacgagaaggagatcctgagactgcagaacggcctggagatctaccagtacctgagattcttcaccaagaccatcagcaacagcagaaagctgatgaacatcgccttcaacgacatgaaccccttcagaatgaagcagctgagacagctgagaatggtgcacagagagagactggaggccgagctgagagagctggagcagctgaaggccgagtacctggagagaagagccagcagaagaagagccgtgagcgagggctgcgccagcgaggacgaggtggagggcgaggcctag

SEQ ID NO: 198427 - DNA, 2754 bp, Artificial Sequence
  derived and/or modified sequence
atggagggcgctggcgagaatgcccccgagtcctcatcttccgcacctggatctgaagagtccgctagggatcctcaggttccacccccggaggaagaaagcggagactgcgcacgatcactggaagctgtacccaagaaactgtgtggctacctttcgaagttcggtggaaaaggccctatccgagggtggaagtctaggtggtttttctacgacgaaaggaaatgtcagttgtattactctcggaccgcccaagacgccaacccactagattccatcgaccttagtagtgctgtcttcgattgcaaggccgacgccgaggaggggatcttcgagataaagaccccttcccgagtgataacgctgaaagctgccacgaagcaagcgatgctgtactggttgcagcagcttcagatgaaacgatgggagttccataattcacccccagctcctcctgctacccccgacgccgcgctggcgggaaacggccccgtccttcacttagaattgggccaggaagaggccgaactggaagaatttttatgtccagtgaaaaccccacccggtctggtgggagttgctgcagccctccaaccatttccagctctgcagaacatctctcttaaacatttgggcacagagattcagaatacgatgcataacattagggggaataaacaggcccaaggtactggtcacgagcctccgggcgaggattcccctcaatctggtgagcctcaacgtgaggaacaaccactggccagtgacgccagtacccctggccgtgaacccgaagactcccctaagcctgcccctaaaccaagtttgaccatctcatttgcgcagaaagccaagcggcagaacaacacattcccattttttagtgaaggtatcacccggaacagaacggcccaggagaaagtcgccgcattggaacagcaagtcctaatgctgaccaaggagctgaaatcccagaaagaactcgtcaagatactccataaggctctcgaagccgctcagcaggaaaaacgcgccagtagtgcctatttggctgccgccgaggataaagatcggctggaattagtacggcacaaggtcaggcaaattgcagagctcggccggcgtgtggaagcccttgaacaggagagggagtccttggcccataccgcttctttgagagaacaacaagtgcaggagcttcaacagcacgtacagttgctgatggacaaaaatcatgctaagcagcaggtgatctgcaagttgtctgagaaggtgacacaggatttcacccaccctccagatcagagcccacttcgtccggacgccgctaatagggatttcctgtcccagcaaggaaagattgagcacctgaaggacgacatggaagcctataggacccagaattgtttcctgaatagcgaaattcaccaggtgacgaagatatggcgcaaggtcgcagagaaagaaaaagcgcttctgacgaagtgcgcctatctccaggcacggaactgtcaggtagagtccaaatacctcgctgggctgaggcggctccaagaggccctgggggacgaggcttccgagtgttccgagctcttgcggcagcttgtccaggaggccttgcagtgggaagctggggaagcctcttccgactccatcgagttaagcccaatctcaaagtacgatgagtatggattcctaactgtgccggattacgaagtagaggacctcaagctcttagctaagatccaagctttagagtcccggtcacatcaccttcttggccttgaggctgtagaccgccctctaagggaaaggtgggcagccttaggagatctagtgccaagtgcagaacttaaacagctcctgcgggctggagttccaagagagcaccgcccacgggtgtggcgctggctcgtccaccttcgcgtgcagcacctgcacacacctgggtgttaccaggaactgttgagtcgaggccaggctcgcgagcatccagcagctcggcaaatagaactggatctaaacaggacctttcctaataataaacattttacatgtcctacgtctagcttccccgataaacttagacgggttctgcttgcatttagttggcagaacccgacaatcggttattgccagggactaaacagactggccgccatagccctgcttgtactggaagaagaagagtcagctttctggtgtctggttgcaattgtagaaacaatcatgccagctgattattactgtaacacgctgactgcttcccaggtggaccagagagtgctgcaggacctgttgtctgagaagctcccgcggttgatggcgcacctgggacagcatcacgtggacctctcgttggtcacctttaattggttcctggtagtattcgcagactctctaatttctaacattttgctgcgcgtatgggacgcttttctgtatgagggcacgaaatacaatgaaaaagaaatcttgagacttcagaacggtcttgaaatctaccaatacctgagattctttacaaagaccatcagtaattcccgtaagctgatgaatatagcattcaacgacatgaacccgtttcgtatgaagcagcttcggcaactcagaatggttcacagagaaaggctggaagctgagctcagggaactagagcagctgaaagctgaatacctggaaagacgtgccagccgtcggagagccgtctctgaaggctgtgcttcagaggacgaggtggagggggaggcttag

SEQ ID NO: 198428 - DNA, 2754 bp, Artificial Sequence
  derived and/or modified sequence
atggagggcgctggggagaatgcccctgagagcagcagcagcgcccctggcagcgaggagagcgcccgggacccccaggtgcccccacctgaggaggagagcggggactgtgcccggagcctggaggccgtgcccaagaagctgtgtggctacctgagcaagtttggaggcaagggccccatccggggctggaagagccgctggttcttctatgatgagaggaagtgccagctgtactacagcaggacagcccaggatgccaaccccctggacagcattgacctgagcagcgctgtgtttgactgcaaggcagatgctgaggagggcatctttgagatcaagacccccagcagggtcatcaccctgaaggccgccaccaagcaggccatgctgtactggctgcagcagctgcagatgaagcgctgggagttccacaacagccccccagcccccccagccaccccagatgctgccctggccggaaatggacctgtgctgcacctggagctgggccaggaggaggccgagctggaggagttcctgtgccctgtgaagaccccacctggcctggtgggcgtggccgccgccctgcagcccttccctgccctgcagaacatcagcctgaagcacctgggcacagagatccagaacaccatgcacaacatccggggcaacaagcaggcccagggcactggacatgagcccccaggagaggacagcccccagagcggggagccccagcgggaggagcagcccctggccagtgatgccagcaccccaggccgggagcctgaggacagccccaagccagcccccaagcccagcctgaccatcagctttgcccagaaggccaagaggcagaacaacaccttccccttcttcagcgagggcatcaccaggaacagaacagcccaggagaaggtggccgccctggagcagcaggtgctgatgctgaccaaggagctgaagagccagaaggagctggtgaagatcctgcacaaggccctggaggccgcccagcaggagaagagggccagcagcgcctacctggccgctgctgaggacaaggaccggctggagctggtgcgccacaaggtgcggcagattgctgagctgggccggcgggtggaggccctggagcaggagcgggagagcctggcccacacagccagcctgcgggagcagcaggtgcaggagctgcagcagcacgtgcagctgctgatggacaagaaccacgccaagcagcaggtgatctgcaagctgtctgagaaggtgacccaggacttcacccaccccccagaccagagccccctgcggccagatgctgccaacagagacttcctgagccagcagggcaagattgagcacctgaaggatgacatggaggcctaccgcacccagaactgcttcctgaacagcgagatccaccaggtgaccaagatctggaggaaggtggccgagaaggagaaggccctgctgaccaagtgtgcctacctgcaggccaggaactgccaggtggagagcaagtacctggccggcctgcggcggctgcaggaggccctgggagatgaggcctctgaatgttctgagctgctgcggcagctggtgcaggaggccctgcagtgggaggccggggaggccagcagtgacagcattgagctgagccccatcagcaaatatgatgaatatggcttcctgactgtgcctgactatgaggtggaggacctgaagctgctggccaagatccaggccctggagagccgcagccaccacctgctgggcctggaggccgtggaccggcccctgcgggagcgctgggccgccctgggggacctggtgcccagcgctgagctgaagcagctgctgcgggccggcgtgccccgggagcaccggccccgggtgtggcgctggctggtgcacctgcgggtgcagcacctgcacaccccaggctgctaccaggagctgctgagccggggccaggcccgggagcaccctgctgcccggcagatcgagctggacctgaacagaaccttccccaacaacaagcacttcacctgccccaccagcagcttcccagacaagctgcggcgggtgctgctggccttctcctggcagaaccccaccatcggctactgccagggcctgaaccggctggccgccatcgccctgctggtgctggaggaggaggagagcgccttctggtgcctggtggccatcgtggagaccatcatgcctgctgactactactgcaacaccctgacagccagccaggtggaccagagggtgctgcaggacctgctgtctgagaagctgccccggctgatggcccacctgggccagcaccacgtggacctgagcctggtgaccttcaactggttcctggtggtgtttgctgacagcctcatcagcaacatcctgctgcgggtgtgggatgccttcctgtatgagggcaccaagtacaatgagaaggagatcctgcggctgcagaatggcctggagatctaccagtacctgcgcttcttcaccaagaccatcagcaacagcaggaagctgatgaacatcgccttcaatgacatgaaccccttcaggatgaagcagctgcggcagctgaggatggtgcaccgggagcggctggaggccgagctgcgggagctggagcagctgaaggccgagtacctggagcggcgggccagcagaagaagagctgtgtctgagggctgtgcctctgaagatgaggtggagggggaggcctag

SEQ ID NO: 198429 - DNA, 2754 bp, Artificial Sequence
  derived and/or modified sequence
atggagggcgccggcgagaacgcccccgagagcagcagcagcgcccctggctctgaagaatccgcaagggacccacaagtacctcctcccgaggaagaaagcggtgattgtgctcgcagtttagaggcagtgccaaagaagctgtgcgggtacctttctaaattcggagggaaaggtccaatccgcggctggaagtcgcgctggttcttttacgacgaacgcaagtgccaactgtactatagccggaccgcccaggacgcaaaccctctcgattctatcgatctctctagtgccgtctttgattgtaaggcagatgccgaggaggggatcttcgagattaagaccccatccagagtgataacccttaaggccgctactaaacaggctatgctgtactggcttcagcagttacagatgaaacgatgggaatttcacaattcccccccagctccacctgctactcccgatgcagcactcgctggcaacggaccagttctgcacctcgagttgggccaggaggaagccgagctggaggagttcctctgccctgtcaagaccccacccgggttggtgggcgtcgcagcggctcttcagccatttccagcactccagaacatttccttaaaacacctgggcacagagatccagaacacaatgcacaatattcggggcaacaaacaggcccagggtaccggacatgaaccaccaggtgaagactccccacaatcaggggagcctcagcgggaggagcaacccctggctagcgatgccagcacacccggcagagagcccgaagatagccctaagcctgcacccaagccatctttaaccatctcctttgcccagaaagcaaaacggcaaaataataccttccccttcttcagtgaggggataactcggaatcggacagcccaggaaaaagtggccgcccttgagcagcaggtgctcatgctcacaaaggagctgaaaagccagaaggagctagtcaaaatactgcataaggccctagaggccgcgcagcaggagaaacgggcgtcgtccgcttaccttgcagctgcagaggacaaggaccggttggaattggtgcgccataaggtgaggcagatcgctgaactcggaaggcgcgtcgaggcactggaacaggagcgcgaatcccttgctcacacggcttccttacgggagcagcaggtccaagaattacagcagcatgtccaacttcttatggacaaaaatcatgcaaagcagcaggtgatttgcaagctcagcgagaaggttacacaggattttacacaccctcctgatcagtctcccctgcgcccagatgctgcaaatcgcgactttctgagtcagcaaggaaagatagagcatttgaaagacgatatggaagcttaccgcactcagaattgttttcttaatagcgaaattcaccaggtcacaaaaatctggcggaaagttgccgaaaaggagaaggcattgctgaccaaatgcgcttatctccaggcccgaaactgccaggttgagagcaagtacttagcgggattgcgacgcttacaggaagctctgggcgacgaagcctctgaatgttcagaattgcttcgccagctcgtacaggaggctctccaatgggaagccggggaggcaagtagtgactccatcgagctgtcccctatttccaagtacgatgagtatggcttcctgaccgtgcctgattacgaggtggaagatctgaagctcctggccaagatccaggctttggagtctcggagccatcatctcctaggcttagaagccgtcgatcggccacttagggagaggtgggcggcgctgggagatttggtccctagcgctgagctaaaacagcttctccgagcgggagtgccccgcgaacatagaccacgcgtgtggaggtggttggtacacctacgggtccagcatttgcacacaccaggttgttatcaggagttgcttagccggggtcaggcccgcgagcatccagcagctaggcagattgagctggacttaaatcggacatttccgaacaataagcattttacctgtccaacctcatcgtttcctgataaattgcgcagggtgcttctcgccttctcctggcagaatcctaccatcggctattgccagggactaaaccgcctcgctgcaatcgccctacttgtcctcgaagaagaagagagcgcgttctggtgcctggtagccatcgtggagaccatcatgcctgctgactattattgtaatactctgaccgcctcacaggtagaccagagggtgctgcaagacctcctctctgaaaagctgcccagactgatggcccaccttggccagcaccacgtggacctgtccttggtgaccttcaattggtttctggtggtgtttgccgatagcctcatttccaatatcttactgagagtctgggatgcttttttatatgaaggaacaaagtacaatgagaaagaaatactgcgcctgcaaaacgggcttgaaatctatcagtatctgcggttcttcactaaaaccatcagcaattcacgaaagctgatgaacattgcgttcaacgatatgaatcccttcaggatgaagcagctgcggcagctccgaatggtgcaccgggaacggcttgaagccgaactgcgggagctcgagcagcttaaggcggagtacctagaacgtcgagcttctaggaggcgggctgtctcggagggttgtgcctctgaagacgaggttgaaggagaagcatag

SEQ ID NO: 198430 - DNA, 2754 bp, Artificial Sequence
  derived and/or modified sequence
atggaaggagctggcgaaaacgccccagagtccagctctagcgccccaggctcagaggagtctgcccgtgacccccaggtccctccacctgaggaagaatctggagactgcgcaagaagtcttgaagccgtgcccaaaaaattatgtgggtacctgtccaagtttgggggtaagggacccattcgcggatggaagtcacggtggtttttctatgacgaacgcaagtgccagttgtattactccagaaccgcacaagatgctaaccccttggattcaatcgacttgtctagtgcagtttttgattgcaaagctgacgccgaagaagggattttcgagattaaaacccctagtcgtgtgatcacactaaaggcagccacaaagcaggcaatgctgtattggcttcaacagctccaaatgaagcggtgggagtttcataactctccacccgcacctccagccactcccgatgctgctctggcagggaatggtccagttctccatcttgagctgggccaggaggaggccgagctggaggagtttctgtgcccagtgaaaacccccccagggctggtgggcgtggctgcggctctgcaacccttccccgcacttcagaatattagcctgaagcatctgggaaccgagattcagaataccatgcataacatccggggaaacaaacaggcacagggcactggacacgagccccctggagaagactctcctcagtccggagaaccacagcgggaagaacagccgcttgcgtccgatgcctcaacccctggcagggaacctgaagactcgccaaagccagcacccaagccaagcttaactatctcgtttgctcagaaagccaaaagacaaaacaataccttcccgttcttcagcgaggggattacacgcaaccggacagctcaggaaaaggtagccgctttggagcaacaggtgctgatgttgaccaaggagctcaagtctcagaaggaactggtgaagatcctgcacaaggccttagaggccgctcagcaggagaaacgggcatctagcgcctacctggccgctgctgaggacaaagataggctggagttggttaggcacaaagtgagacagatcgctgagctcggtcggcgagtagaagccctggagcaagagagagagagcctggctcacaccgcctccttaagggagcaacaggtacaggagctgcagcagcacgtccagcttctaatggacaaaaaccacgctaaacaacaggtgatctgcaagttgtcggagaaagtcactcaggacttcacccaccctccagaccagtccccactcagacctgacgctgctaaccgcgactttctatcccagcagggaaagatcgagcatcttaaggatgacatggaggcgtatcgcacccaaaactgctttctcaattctgagattcatcaagtcacaaaaatctggcggaaggtggccgaaaaggagaaagcgctcctaacgaagtgtgcttacctgcaggcccgtaactgtcaggtggagtctaagtacctagctggcttgcggaggctgcaggaggctctaggggacgaggcaagtgaatgctctgagctactgagacagctcgtgcaggaggcgctgcagtgggaagctggggaagcgtcatcagattcaatcgagttgagccctatcagcaaatatgatgaatatggatttttgactgtgcccgactacgaagtggaagacctcaaacttttggctaaaatacaggcactggagagccgctcccatcatctactggggctggaagccgtcgatcggcctctgagggagcgttgggctgccttaggggatcttgtgccatctgccgagctgaaacagcttctgagagccggtgttcccagggaacatcgacccagagtctggcgctggctggttcacctcagagtgcagcaccttcacacccccggatgttatcaggaattactgtccagggggcaggctcgtgaacatccagcagccaggcagatcgagctcgacctcaatcgaacatttcccaataacaagcattttacctgtccgacaagttccttccctgataaacttcggagagtgcttctagctttcagctggcaaaaccccactattggatactgtcagggcctaaaccggctcgccgctattgcactactcgtccttgaggaggaggagtccgccttttggtgtctggtggccattgtggaaacaatcatgccggcagactattattgtaacacgttgactgcatcacaggttgaccagcgggtcctgcaggacctccttagcgaaaaacttccacgcctcatggcccacctggggcagcatcacgtagacctgagtcttgttacattcaattggtttcttgttgtattcgcagattcgctcatttctaacatactcttaagggtttgggacgccttcctgtacgaaggcactaagtataacgaaaaggagattctccgcttgcagaacgggcttgagatttaccagtacctgagattcttcactaagactatcagcaacagtcggaagctgatgaacatcgcatttaacgacatgaacccttttcgtatgaaacagctacgacagctcagaatggttcacagggaacggctcgaggcagagttaagagagcttgaacaactgaaagcagagtacctggagcggagggcaagccgcaggagagcagtctcggagggatgtgctagcgaagatgaggtcgaaggcgaggcatag

SEQ ID NO: 198431 - DNA, 3198 bp, Artificial Sequence
  derived and/or modified sequence
ctccctttgggaagctgcccgccgagtctccgagatttgtccctggtggtcccgcggacccctcgtccctccgcagtctccggctggcagcgatggagggcgctggggagaacgccccggagtccagctcctctgcccctgggtccgaagagtctgccagggatccacaggtgccgcctccggaggaagaatcgggggactgcgcccggtccctggaggcggtccccaagaaactctgtgggtatttaagtaagttcggcggcaaagggcccatccggggctggaaatcccgctggttcttctacgacgaaaggaaatgtcagctgtattactcgcggaccgctcaggatgccaatcccttggacagcatcgacctctccagtgcagtgtttgactgtaaggcggacgctgaggaggggatcttcgaaatcaagactcccagccgggttattaccctgaaggccgccaccaagcaagcgatgctgtactggctgcagcagctgcagatgaagcgctgggaattccacaacagcccgccggcacctcctgccacccctgatgccgccctggctgggaatgggcccgtcctgcacctcgagctagggcaagaagaggcagagctggaggagttcctgtgccctgtgaaaacaccccctgggctagtgggcgtggcagctgccttgcagcccttccctgcccttcagaatatttccctcaagcacctggggactgaaatacagaacacaatgcacaacatccgtggcaacaagcaggcccagggaacaggccatgaacctccaggggaagattctccacagagtggggagcctcagagggaggagcagcccttggcctctgacgccagcaccccagggagagagccagaggattctccaaagcctgcacccaagccttctctgaccatcagtttcgctcagaaagccaagcgccagaacaacaccttcccattcttttctgaaggaatcacacggaaccgaactgcccaggagaaagtggcagccttggagcaacaggttctgatgctcaccaaggagttaaagtctcagaaggagctagtgaagatcctgcacaaggcactggaggccgcccagcaggagaagcgggcgtccagcgcatacctggcggcggctgaggacaaggaccggctggagctggtgcggcacaaagtgcggcagatcgcggagctgggccggcgggtggaggccctggagcaggagcgggagagcctggcgcacacagcgagcctgcgggagcagcaggtgcaggagctacagcagcacgtgcagctgcttatggacaagaaccacgccaagcagcaggtcatctgcaagctctctgagaaggtcacccaggacttcacgcacccccctgaccagtctcctttgcgccccgacgctgccaacagggacttcctgagccagcaggggaagatagagcacctgaaggatgacatggaagcttaccggacccagaactgcttcctcaactccgagatccaccaggtcacaaagatctggagaaaggtggctgagaaggagaaggcccttctgacgaagtgcgcctacctccaagccagaaactgccaggtggaaagcaagtacctggccggtctgagaaggctgcaggaggccctgggggacgaagccagcgagtgctcagagctgctgaggcagcttgtccaggaggcactgcagtgggaagctggggaggcctcatctgacagcatcgagctgagccccatcagtaagtatgatgagtacggcttcctgacggtgcccgactatgaggtggaagacctgaagctgctggccaagatccaggcattggagtcacgatcccaccacctgctgggcctcgaggctgtggatcggccgctgagggagcgctgggctgccctgggcgatcttgtgccctcagccgagctcaagcagctactgcgggcaggagtaccccgtgaacaccggcctcgtgtctggaggtggctggtccacctccgtgtccagcacctgcacactccaggctgctaccaggaactgctgagccggggccaggcccgcgagcaccctgctgcccgccagattgagctggacctgaaccggaccttccccaacaacaaacacttcacctgccccacctccagcttccccgacaagctccgccgggtgctgctggccttctcctggcagaaccccaccatcggctactgccagggcctgaacaggctggcggccattgccctgctggtcctagaggaggaggagagcgccttctggtgcctggtggccattgtggagaccatcatgcccgctgattactactgcaacacgctgacggcatcccaggtggaccagcgggtgctccaggacctgctctcggagaagctgcccaggctgatggcccatctggggcagcaccacgtggatctctccctcgtcaccttcaactggttcctcgtggtctttgcggacagtctcattagcaacatcctccttcgggtctgggatgccttcctgtacgaggggacgaagtacaacgagaaggagatcttgaggctacagaatggcctggaaatctaccagtacctgcgcttcttcaccaagaccatctccaacagccggaagctgatgaacatcgccttcaatgacatgaaccccttccgcatgaaacagctgcggcagctgcgcatggtccaccgggagcggctggaggctgagctgcgggagctggagcagcttaaggcagagtacctggagaggcgggcatcccggcgcagagctgtgtccgagggctgtgccagcgaggacgaggtggagggggaagcctgacttggccacctcccctccccacagccttcctcacccttggctggcagacccactggaggtcaggcacggaccagtggcccagccctgggtgtcccatcaccatgtgaccttggacatgtcccttcccctctctggccctcagtttccccactgggacattgtgtgctgcaaagccattggttgggctacttcttcataggcacttacttacccagggatgccaccctttcgtcacctcttccacagagcactttggcatgtaaacaagcaagagcactgcctctatagggtaacctggaacattctctaggttatatcaatataaaacaatgtaaatggtggaaatcattca

SEQ ID NO: 198432 - protein, 440 aa, Artificial Sequence
  derived and/or modified sequence
MKFLLIKDAPGKKKRKNLMLSFKRKHAKGQDLFDQIVYHLDLVETDYFGLQFLDSAQVAHWLDHAKPIKKQMKIGPAYALHFRVKYYSSEPNNLREEFTRYLFVLQLRHDILSGKLKCPYETAVELAALCLQAELGECELPEHTPELVSEFRFIPNQTEAMEFDIFQRWKECRGKSPAQAELSYLNKAKWLEMYGVDMHVVRGRDGCEYSLGLTPTGILIFEGANKIGLFFWPKITKMDFKKSKLTLVVVEDDDQGREQEHTFVFRLDSARTCKHLWKCAVEHHAFFRLRTPGNSKSNRSDFIRLGSRFRFSGRTEYQATHGSRLRRTSTFERKPSKRYPSRRHSTFKASNPVIAAQLCSKTNPEVHNYQPQYHPNIHPSQPRWHPHSPNVRPSFQDDRSHWKASASGDDSHFDYVHDQNQKNLGGMQSMMYRDKLMTAL

SEQ ID NO: 198433 - protein, 518 aa, Artificial Sequence
  derived and/or modified sequence
MLRFLRRTFGRRSMQRYARGAAGRGAAGLGDERDGGPRGGPAAAASSSALPAAPGGSVFPAGGGPLLTGGAAVHISAAGAAKATLYCRVFLLDGTEVSVDLPKHAKGQDLFDQIVYHLDLVETDYFGLQFLDSAQVAHWLDHAKPIKKQMKIGPAYALHFRVKYYSSEPNNLREEFTRYLFVLQLRHDILSGKLKCPYETAVELAALCLQAELGECELPEHTPELVSEFRFIPNQTEAMEFDIFQRWKECRGKSPAQAELSYLNKAKWLEMYGVDMHVVRGRDGCEYSLGLTPTGILIFEGANKIGLFFWPKITKMDFKKSKLTLVVVEDDDQGREQEHTFVFRLDSARTCKHLWKCAVEHHAFFRLRTPGNSKSNRSDFIRLGSRFRFSGRTEYQATHGSRLRRTSTFERKPSKRYPSRRHSTFKASNPVIAAQLCSKTNPEVHNYQPQYHPNIHPSQPRWHPHSPNVRPSFQDDRSHWKASASGDDSHFDYVHDQNQKNLGGMQSMMYRDKLMTAL

SEQ ID NO: 198434 - DNA, 1323 bp, Artificial Sequence
  derived and/or modified sequence
atgaagtttctgctgatcaaagatgcccctggaaagaaaaagcgtaaaaatttgatgttgagcttcaaaagaaagcacgctaagggacaggacctctttgaccagatcgtctaccatctggatctcgtcgaaacagactactttggtttgcagttcttggattcggcccaagtcgcacattggcttgatcacgctaagcctattaaaaagcagatgaaaataggccctgcctacgcgcttcatttccgggtcaaatactatagcagcgagcccaataacctcagggaagagtttacccgctatctcttcgtgcttcagctgagacatgacatcctgtctggaaaactgaaatgcccctatgaaacagccgtagagctcgccgcactttgccttcaggccgagcttggagagtgtgagttacctgagcatacccccgaactcgtgagcgaattccgattcatccctaatcagacagaagcaatggagtttgatatttttcagcgatggaaggaatgtcggggaaaatccccggctcaagcggaactctcatacctgaacaaagcaaaatggctggagatgtatggtgttgatatgcacgtggtccgcggcagagacggctgcgaatatagtttagggctcacacccacaggcattctgatattcgagggcgctaacaagattggcctttttttctggccgaaaatcaccaaaatggacttcaagaaaagtaagctgaccctggtggttgtggaagatgatgatcagggccgcgagcaggagcacacattcgtctttagacttgattcggcgagaacatgcaagcatctctggaagtgcgccgttgaacaccatgcgttcttccggctgagaacgccaggcaattccaagtctaatcgatcggacttcatccggctgggatccagattccgtttctcagggagaacagagtatcaggcaacccacggtagtagactgcgcagaaccagtacattcgaacgcaaaccgtccaaacggtatcccagcaggaggcactcaacttttaaggctagtaatcctgtcattgccgcccagttgtgcagtaaaactaatcccgaggtgcataattatcagccacagtaccacccaaacattcatcctagtcagcctcgctggcacccgcactctccaaacgttcgtccaagtttccaggacgacagaagtcattggaaagcctcggcaagtggagacgattcacattttgattatgtacacgatcagaatcagaagaatttaggcggcatgcagtccatgatgtatagagataagctcatgaccgccctctag

SEQ ID NO: 198435 - DNA, 1557 bp, Artificial Sequence
  derived and/or modified sequence
atgttgcggttcctgcggaggactttcggcagaagatcaatgcagcgatatgcccggggtgcggccgggcgtggagcggccggcctgggcgacgagagagacggaggaccgcgcggggggcccgcagccgctgcctcaagtagcgcgttgccagccgcccctggcggaagtgtcttcccagctggaggcggtccgctgcttaccggaggggctgctgttcatatttctgccgccggagcagctaaagccaccctgtactgcagagtctttctgctcgatgggacggaggtgtctgtagacttgcctaaacacgctaaggggcaagatctgttcgatcagatcgtctaccacctggacctggtcgagactgactatttcggtctccaatttctcgattccgcccaagttgcgcattggctggaccacgcaaaaccaataaaaaaacagatgaagattggacccgcgtatgctctgcacttccgtgtaaagtattactcttctgaaccaaataatctgcgggaggagttcacgagatacttgtttgttctgcagctgcggcacgatattctttcgggaaagctaaagtgcccttacgagaccgccgtcgagctggctgctctctgcctccaagctgaactaggcgaatgtgaactgccagaacacactcctgaactggtgtccgaattccggttcattcctaaccaaaccgaagctatggagtttgacatttttcagcgatggaaggaatgccgcggcaagagtccggcccaggctgagctgtcctaccttaacaaagctaagtggttggagatgtatggggtggatatgcatgtcgtccgcggacgtgacgggtgcgaatactccctggggctgaccccgacaggtatactcatatttgagggtgcgaacaagattggcctgttcttttggccgaaaatcactaagatggacttcaaaaagtccaaacttacgttggtggtggtggaagacgacgatcaggggcgcgagcaagagcacacgttcgtctttcgcctggactctgcccgcacttgcaaacatctgtggaagtgcgctgtcgagcaccacgcgtttttccggctgcgcacgcccggtaattcaaagtcgaataggagtgactttatccgcctcggatcacgattcagattctcaggccggacagaatatcaggctactcacggaagtcggcttagaagaacaagtacgtttgagagaaaaccatctaaaagatacccttcaaggcgacattctacattcaaagcatcaaatcccgttattgctgctcagttgtgctctaagaccaatcccgaagtgcacaactaccagcctcaatatcatcctaacatccacccatcacagcctagatggcaccctcactcaccgaacgtgaggccaagctttcaggacgataggtctcactggaaagcttccgcgagcggagacgatagtcacttcgactacgttcacgaccaaaatcaaaagaatcttggcggaatgcagagcatgatgtacagggacaaactgatgacggctctttag

SEQ ID NO: 198436 - DNA, 1323 bp, Artificial Sequence
  derived and/or modified sequence
atgaagttcctgctgatcaaggatgcccctgggaagaagaagaggaagaacctgatgctgtccttcaagaggaagcacgccaagggccaggacctgtttgaccagatcgtgtaccacctggacctggtggagacagactacttcggcctgcagttcctggacagcgcccaggtggcccactggctggaccacgccaagcccatcaagaagcagatgaagattggccctgcctatgccctgcacttccgggtgaagtactacagcagcgagcccaacaacctgcgggaggagttcacccgctacctgtttgtgctgcagctgcggcatgacatcctgagcggcaagctgaagtgcccctatgaaacagctgtggagctggccgccctgtgcctgcaggccgagctgggagaatgtgagctgcctgagcacaccccagagctggtgtctgagttccgcttcatccccaaccagacagaggccatggagtttgacatcttccagcgctggaaggaatgtcggggcaagagccctgcccaggccgagctgagctacctgaacaaggccaagtggctggagatgtatggagtggacatgcacgtggtgcggggcagagatggctgtgagtacagcctgggcctgacccccaccggcatcctgatctttgaaggagccaacaagattggcctcttcttctggcccaagatcaccaagatggacttcaagaagagcaagctgaccctggtggtggtggaggatgatgaccagggccgggagcaggagcacacctttgtgttccggctggacagcgcccggacctgcaagcacctgtggaagtgtgctgtggagcaccacgccttcttccggctgcggaccccaggcaacagcaagagcaacagaagtgacttcatccggctgggcagccgcttccgcttcagcggccgcacagagtaccaggccacccacggcagccggctgcggaggaccagcacctttgagaggaagcccagcaagcgctaccccagccgccgccacagcaccttcaaggccagcaaccctgtgattgctgcccagctgtgcagcaagaccaaccctgaggtgcacaactaccagccccagtaccaccccaacatccaccccagccagccccgctggcacccccacagccccaacgtgcggcccagcttccaggatgacaggagccactggaaggccagcgccagcggagatgacagccactttgattatgtgcatgaccagaaccagaagaacctgggcggcatgcagagcatgatgtacagagacaagctgatgacagccctgtag

SEQ ID NO: 198437 - DNA, 1557 bp, Artificial Sequence
  derived and/or modified sequence
atgctgcgcttcctgcggaggacctttggaagaagatccatgcagagatatgcccggggagctgctggccgcggggctgctggcctgggagatgaaagagatggcggcccccggggcggccctgctgctgctgccagcagcagcgccctgcctgctgcccctgggggctctgtgtttcctgctgggggcggccccctgctgaccggcggcgctgctgtgcacatctctgctgctggggccgccaaggccaccctgtactgcagggtcttcctgctggatggaacagaggtgtctgtggacctgcccaagcacgccaagggccaggacctgtttgaccagatcgtgtaccacctggacctggtggagacagactacttcggcctgcagttcctggacagcgcccaggtggcccactggctggaccacgccaagcccatcaagaagcagatgaagattggccctgcctatgccctgcacttccgggtgaagtactacagcagcgagcccaacaacctgcgggaggagttcacccgctacctgtttgtgctgcagctgcggcatgacatcctgagcggcaagctgaagtgcccctatgaaacagctgtggagctggccgccctgtgcctgcaggccgagctgggagaatgtgagctgcctgagcacaccccagagctggtgtctgagttccgcttcatccccaaccagacagaggccatggagtttgacatcttccagcgctggaaggaatgtcggggcaagagccctgcccaggccgagctgagctacctgaacaaggccaagtggctggagatgtatggagtggacatgcacgtggtgcggggcagagatggctgtgagtacagcctgggcctgacccccaccggcatcctgatctttgaaggagccaacaagattggcctcttcttctggcccaagatcaccaagatggacttcaagaagagcaagctgaccctggtggtggtggaggatgatgaccagggccgggagcaggagcacacctttgtgttccggctggacagcgcccggacctgcaagcacctgtggaagtgtgctgtggagcaccacgccttcttccggctgcggaccccaggcaacagcaagagcaacagaagtgacttcatccggctgggcagccgcttccgcttcagcggccgcacagagtaccaggccacccacggcagccggctgcggaggaccagcacctttgagaggaagcccagcaagcgctaccccagccgccgccacagcaccttcaaggccagcaaccctgtgattgctgcccagctgtgcagcaagaccaaccctgaggtgcacaactaccagccccagtaccaccccaacatccaccccagccagccccgctggcacccccacagccccaacgtgcggcccagcttccaggatgacaggagccactggaaggccagcgccagcggagatgacagccactttgattatgtgcatgaccagaaccagaagaacctgggcggcatgcagagcatgatgtacagagacaagctgatgacagccctgtag

SEQ ID NO: 198438 - DNA, 1323 bp, Artificial Sequence
  derived and/or modified sequence
atgaagttcctgctgatcaaggacgcccccggcaagaagaagcggaagaatctcatgctttccttcaaacggaaacacgccaagggacaggacctgtttgaccagatagtataccacctcgatctcgtggaaactgattatttcggcctgcagtttctggactcggctcaggtagcccactggctggaccacgctaaacctattaaaaaacagatgaagatcgggccagcctatgcgctgcatttcagagtgaagtactattccagcgaacctaacaaccttcgtgaagagtttaccaggtatttgtttgtgctacagctgagacatgatatcctgagcggcaaacttaagtgcccttacgaaaccgccgtggagttggctgcactttgcctgcaggcggaacttggcgaatgcgaacttcccgagcatacgccggagctagtgtccgaattccgctttatcccaaaccagacagaagccatggaatttgatatttttcaacgttggaaggaatgtcgcggaaaatcccccgcccaggctgagctgagctacctgaacaaagccaaatggctggaaatgtacggagtagacatgcatgtcgtccgagggcgggatggctgtgagtactcactcgggctaacgcctacaggcatcctgatcttcgagggagctaacaagatagggctattcttctggcccaagatcacaaagatggactttaaaaagtctaaactgaccttggttgtagtggaggacgatgatcagggacgcgagcaggaacataccttcgtgttccgtctggactctgcgagaacttgcaaacacctgtggaagtgtgccgtggaacaccacgcattcttcaggcttcgcacgcccggcaattctaaatctaataggagcgattttatcaggctcggaagtaggtttcgattttcagggaggaccgaatatcaggcaacccatggttcccgccttcgacggacatccacattcgaacgtaaaccatctaaaagatacccttcacgtagacatagcaccttcaaggcaagcaaccctgtgatagcagcccagctatgctccaagaccaaccccgaagtgcataactaccagccacaatatcatcctaatattcatccgtcacagccacgctggcacccccactcccccaacgttagacctagttttcaggacgacagaagtcactggaaagccagtgcctctggcgatgatagtcattttgattacgtgcatgaccagaaccagaagaatttgggtggaatgcagtcaatgatgtatagagacaagctgatgaccgcactatag

SEQ ID NO: 198439 - DNA, 1557 bp, Artificial Sequence
  derived and/or modified sequence
atgctgcggttcctgcggcggaccttcggccggcggagcatgcagcgttatgctagaggcgccgccgggcggggcgccgcaggcctaggcgatgaaagggatggcgggcccaggggcggacctgcagccgccgcctccagcagcgcccttcctgccgcccctggcggcagcgtgttccctgccggaggcggaccgcttctgaccggaggagcggccgtccacatttccgctgccggggccgcaaaagccaccctgtactgccgggttttcctgttggatggtactgaagtatcagtggacctgcccaagcatgctaaaggtcaggacctatttgaccagatcgtctaccacctagacttagtcgagactgactattttggcctgcaattcttggactcagcccaggtcgcacattggttggatcatgctaaaccaatcaagaagcaaatgaaaatcggaccggcgtatgcgctacattttagagtaaagtactattcttccgagcccaataatctgcgggaggagttcacccgttacctgtttgtgctgcagttgcgccacgacatcctgtcagggaaactgaaatgcccctatgaaacggccgtagagctggcagctttatgcctgcaggcagagcttggcgaatgcgaactcccagagcataccccggaactggtgtccgagttccggtttattccaaaccagaccgaagcgatggagtttgacatcttccagaggtggaaagagtgcagaggcaagtcccccgcccaggctgagctgtcctatcttaataaggctaaatggctagaaatgtacggagttgatatgcacgtggtgaggggccgtgacggctgtgagtactcgttaggcctcacccccaccggaatcctcatcttcgagggggcaaataaaatcggactttttttctggcccaagatcaccaagatggattttaagaaatccaagttgaccttagtggtcgtcgaggacgacgatcagggcagggaacaggagcacacgttcgttttccgcctggattccgcaagaacttgcaaacacctgtggaaatgcgccgtcgaacaccatgctttcttcagactgaggacacctggaaactcaaagtcaaaccgatccgacttcatcaggctcggttcaaggttccggttttcaggtcgcacagagtaccaggcgactcatggctcccggctgcgccggacctctacctttgaacgtaagccatcaaagaggtacccttcaaggcggcatagcactttcaaggcttcaaaccccgtgatcgctgcacagctgtgttctaagacgaacccggaagttcataattaccagcctcaatatcatccaaatattcatccttcccagccccgctggcatccccacagtccaaatgtccgcccctcctttcaggacgaccgtagccattggaaggcctcagctagcggggacgactctcacttcgactatgtccacgaccaaaatcaaaagaaccttggcggaatgcagtcaatgatgtatagagataaactgatgacagctctttag

SEQ ID NO: 198440 - DNA, 1323 bp, Artificial Sequence
  derived and/or modified sequence
atgaaattcttgcttatcaaggatgccccagggaaaaagaaacggaagaacctgatgctgagtttcaaaagaaagcatgcgaaggggcaggaccttttcgaccagattgtgtaccatctggatctcgtggagaccgattactttggcttgcaattcctagactctgcccaggttgcgcactggctcgaccacgcaaagccgattaagaagcagatgaagatcgggcctgcctacgccttgcatttcagagtcaagtactattcgagcgagccaaacaatttacgcgaggaattcacccggtatctgtttgttcttcagttaaggcatgatattctgtctggtaagctgaagtgtccttatgagactgcagtggagctggcggcactgtgtctccaggcagaactgggcgaatgcgagctacccgagcatactccagaattggtgtccgaatttaggttcatcccgaaccagacagaggccatggaattcgacattttccagcggtggaaggagtgtagagggaagagcccagcccaggccgagttgtcttacctgaataaggccaaatggctggaaatgtatggcgtcgatatgcacgtcgtccgaggtagagatggatgtgaatattccctgggcctgacccctaccggcatccttatctttgagggcgctaataaaatcggccttttcttctggccaaaaattactaaaatggactttaagaagtccaagctgaccttggtggtcgtagaggatgacgaccagggcagagaacaagaacatacgttcgtgttccgcctagattctgcacggacatgcaagcacttatggaagtgtgccgtggaacatcacgcgttttttcgactacgcacacccggaaactcaaagagtaacagaagcgatttcatccgcttaggaagccgctttcggttcagcggtcgaactgaatatcaggccacacacggcagccggttgcgacggacctcaaccttcgagcggaagccctctaagcgataccctagtagaaggcactcaaccttcaaggctagcaatccagttatcgcagcgcagctgtgcagcaaaacaaacccggaagtgcacaattaccagccccagtaccaccctaacatccatcctagtcagccacgttggcacccccacagcccaaacgtcaggccctcttttcaggatgatagaagccactggaaagcaagcgccagtggagatgacagccatttcgattatgttcacgatcagaatcagaaaaatcttgggggtatgcagtcaatgatgtatagagacaagctcatgaccgctctgtag

SEQ ID NO: 198441 - DNA, 1557 bp, Artificial Sequence
  derived and/or modified sequence
atgctgcgtttcctgaggcgcaccttcgggaggcggtctatgcaacggtacgctagaggcgctgcaggtagaggagctgctggcttaggtgacgaaagggatggcggtccacgcggtggtccagctgcagccgcaagttctagcgccctgcccgcagcaccaggcggaagcgtgttccccgcaggcggtgggccactccttaccgggggtgccgctgttcacatttcagcagccggagcggcaaaagctacattatactgtcgggtttttttgctcgatggcaccgaagtctctgtggacctcccaaagcatgctaaaggacaggacttgttcgatcagatcgtctaccatttggaccttgtggaaacggactactttggactccagttcctggactctgcacaagtagcccattggctggatcatgccaaaccaattaagaagcagatgaaaatcgggcctgcatacgctctccacttcagggtcaaatattattcaagcgagcccaataacctgcgggaggaattcactcggtacctgttcgtgctccaattgaggcatgacatcctttcaggtaagctcaaatgcccctatgaaactgcggtagaattagccgcactgtgcctgcaggcagagttaggcgagtgtgaactgcctgaacacacccctgaacttgtttccgaattccgtttcataccgaatcagacggaagctatggaatttgatatcttccagcgctggaaagaatgcagagggaaatctcctgcgcaggctgagctcagttatctcaacaaggccaagtggctggagatgtatggggtggacatgcatgtagtgagagggagagatggatgcgagtacagcttggggctcacccctaccggtatcctaatatttgagggggctaacaaaattggactgtttttttggccaaagataactaaaatggatttcaagaagtccaagctcactctggtggtggtggaagatgacgaccagggaagagaacaggaacacaccttcgtgtttagactggattctgctagaacgtgtaaacatttatggaagtgcgccgtggaacatcacgcttttttcagactcagaacccctggaaactcaaaaagcaatagatcggactttatacgccttgggtctcgatttaggttttccggccgtacagaataccaggccacccacggttcccggttgagacgaaccagtactttcgaaaggaaaccatctaagcggtatccctcacgcagacactccacttttaaagcgagtaacccagtcatcgccgctcaattgtgttcaaaaaccaatcccgaagtgcacaattatcagccccagtatcatcccaacatacaccccagccagcccagatggcaccctcattctccgaatgtgcgccctagtttccaggatgacaggtctcattggaaagcatcagcctccggcgacgactcgcatttcgactacgtacacgatcagaatcagaagaaccttgggggaatgcagtcaatgatgtacagagataaactcatgactgccttgtag

SEQ ID NO: 198442 - DNA, 1323 bp, Artificial Sequence
  derived and/or modified sequence
atgaagttcctgctgatcaaggacgcccccggcaagaagaagagaaagaacctgatgctgagcttcaagagaaagcacgccaagggccaggacctgttcgaccagatcgtgtaccacctggacctggtggagaccgactacttcggcctgcagttcctggacagcgcccaggtggcccactggctggaccacgccaagcccatcaagaagcagatgaagatcggccccgcctacgccctgcacttcagagtgaagtactacagcagcgagcccaacaacctgagagaggagttcaccagatacctgttcgtgctgcagctgagacacgacatcctgagcggcaagctgaagtgcccctacgagaccgccgtggagctggccgccctgtgcctgcaggccgagctgggcgagtgcgagctgcccgagcacacccccgagctggtgagcgagttcagattcatccccaaccagaccgaggccatggagttcgacatcttccagagatggaaggagtgcagaggcaagagccccgcccaggccgagctgagctacctgaacaaggccaagtggctggagatgtacggcgtggacatgcacgtggtgagaggcagagacggctgcgagtacagcctgggcctgacccccaccggcatcctgatcttcgagggcgccaacaagatcggcctgttcttctggcccaagatcaccaagatggacttcaagaagagcaagctgaccctggtggtggtggaggacgacgaccagggcagagagcaggagcacaccttcgtgttcagactggacagcgccagaacctgcaagcacctgtggaagtgcgccgtggagcaccacgccttcttcagactgagaacccccggcaacagcaagagcaacagaagcgacttcatcagactgggcagcagattcagattcagcggcagaaccgagtaccaggccacccacggcagcagactgagaagaaccagcaccttcgagagaaagcccagcaagagataccccagcagaagacacagcaccttcaaggccagcaaccccgtgatcgccgcccagctgtgcagcaagaccaaccccgaggtgcacaactaccagccccagtaccaccccaacatccaccccagccagcccagatggcacccccacagccccaacgtgagacccagcttccaggacgacagaagccactggaaggccagcgccagcggcgacgacagccacttcgactacgtgcacgaccagaaccagaagaacctgggcggcatgcagagcatgatgtacagagacaagctgatgaccgccctgtag

SEQ ID NO: 198443 - DNA, 1557 bp, Artificial Sequence
  derived and/or modified sequence
atgctgagattcctgagaagaaccttcggcagaagaagcatgcagagatacgccagaggcgccgccggcagaggcgccgccggcctgggcgacgagagagacggcggccccagaggcggccccgccgccgccgccagcagcagcgccctgcccgccgcccccggcggcagcgtgttccccgccggcggcggccccctgctgaccggcggcgccgccgtgcacatcagcgccgccggcgccgccaaggccaccctgtactgcagagtgttcctgctggacggcaccgaggtgagcgtggacctgcccaagcacgccaagggccaggacctgttcgaccagatcgtgtaccacctggacctggtggagaccgactacttcggcctgcagttcctggacagcgcccaggtggcccactggctggaccacgccaagcccatcaagaagcagatgaagatcggccccgcctacgccctgcacttcagagtgaagtactacagcagcgagcccaacaacctgagagaggagttcaccagatacctgttcgtgctgcagctgagacacgacatcctgagcggcaagctgaagtgcccctacgagaccgccgtggagctggccgccctgtgcctgcaggccgagctgggcgagtgcgagctgcccgagcacacccccgagctggtgagcgagttcagattcatccccaaccagaccgaggccatggagttcgacatcttccagagatggaaggagtgcagaggcaagagccccgcccaggccgagctgagctacctgaacaaggccaagtggctggagatgtacggcgtggacatgcacgtggtgagaggcagagacggctgcgagtacagcctgggcctgacccccaccggcatcctgatcttcgagggcgccaacaagatcggcctgttcttctggcccaagatcaccaagatggacttcaagaagagcaagctgaccctggtggtggtggaggacgacgaccagggcagagagcaggagcacaccttcgtgttcagactggacagcgccagaacctgcaagcacctgtggaagtgcgccgtggagcaccacgccttcttcagactgagaacccccggcaacagcaagagcaacagaagcgacttcatcagactgggcagcagattcagattcagcggcagaaccgagtaccaggccacccacggcagcagactgagaagaaccagcaccttcgagagaaagcccagcaagagataccccagcagaagacacagcaccttcaaggccagcaaccccgtgatcgccgcccagctgtgcagcaagaccaaccccgaggtgcacaactaccagccccagtaccaccccaacatccaccccagccagcccagatggcacccccacagccccaacgtgagacccagcttccaggacgacagaagccactggaaggccagcgccagcggcgacgacagccacttcgactacgtgcacgaccagaaccagaagaacctgggcggcatgcagagcatgatgtacagagacaagctgatgaccgccctgtag

SEQ ID NO: 198444 - DNA, 2962 bp, Artificial Sequence
  derived and/or modified sequence
tgggatatgggatattgtaatgggagagcaggaaatttaaggtcggaggtatttgtttaggatacctcagtattctagagctatgggatttattttgctttgaagtccagaggtatttagctttattctaaaagcgatgaagttcctcttaattaaagacgctcctggaaaaaaaaaaaggaaaaatttaatgctgtcttttaaaaggaaacatgccaaaggccaggatttgtttgatcagattgtgtaccacttggaccttgtggaaacagattactttggcctccagttcctcgactctgcccaggttgcgcactggctggatcatgccaaacccataaaaaagcagatgaaaattggacctgcttatgctttacactttcgagttaaatactattcttcagaaccaaacaaccttcgtgaggagtttacaaggtacctgtttgttttacaactcaggcatgacattctttctggaaaattgaaatgcccttatgaaacagctgtggaattagctgctctctgtctacaagcggagcttggggagtgcgagcttccagaacacacaccagagcttgtgtctgagtttcggttcattccaaatcagacagaagcaatggaatttgatatcttccagagatggaaagagtgcaggggaaagagccctgcccaggcggaactctcctatctgaataaagcgaagtggctggaaatgtatggggtagacatgcacgttgtcaggggaagagatggctgtgaatattctcttggactgaccccgacaggcatattaatctttgaaggagctaacaaaataggcttattcttttggcctaaaattaccaaaatggattttaaaaagagcaaattgacactcgtggtggtcgaggatgatgatcagggacgtgagcaagagcacacgtttgtgttccggttagacagtgccaggacctgcaaacacctttggaagtgtgcagttgagcaccacgcattcttccgactgcggacgccaggaaacagcaaatccaatagatccgactttatcaggctgggctctcgcttcagattcagtgggcggacagaatatcaagctacacatggctccaggttacgaagaaccagcacctttgagaggaagcctagtaaacgttatccatcccggagacattcaacgttcaaagcaagcaacccagtgatagcagcccagctctgctctaaaacaaatccagaagtccataattaccagcctcaatatcatcctaatatccatcccagccagccccggtggcatcctcactctccaaatgtcaggccatcctttcaggatgacaggtcgcattggaaagcatcggccagtggagatgacagccattttgattatgtccacgaccagaaccagaagaacttaggagggatgcaaagtatgatgtatcgagataaactcatgactgcactttgagagactgaagcatctctcttccattcaccttcatagtttcattgcattccatgaaaagtgtcttggcctcagatggatggatgtgtttggacgagtgtctttaaggagtagtcctgaaaggtgtttttggtgtccatgtaaatatttgaagataaaaccactatagcttgtcataatttactgttgactgcattctcattaaaatgaaggtaaaggctcaggaatcatattgatgttctgattttaaaattggagtcaaagtctatgtttatcattttactatgttcctgatgttctttgttatttaattaatgggagcaaataaaaccagaagagcttgggaagattgctcagcatatattcctgtcgtagaagttgagattgctagggtccagtttccctagtgtggcctggacgagtcatttccccttcattgacctcattttccccatctgaaaagagagggttggactaagtgatctccaaggtcctttccaactctaaaattctgcaatttgttaacatttcattttgtttaggttgaggacatacattcaaactaattttatcacaaggaaaactgcaatacccacttccttgacagagttactcctttcagaagctaaataaagtatataacttattagatgttatatagatacagggggactttgaatttcacatcttaaagcagttgagctactttgaatttaagcagtcgtactaatcttaaattgcatagcatttgttttgatcgaatttgctgctcaagtatgggaataatttttaatgtcttaatgattggtgctgctaacttgcgtgatttcagaagacataattgtgaatacacactgtcagaattgggggattggtttttaccctagacttcactcttaaaaagcaacgtgcaatcaagatcatttatggctcaaatgaaagcatataaggttttcttgaagttgtgccaaagcattctgtagagtaggatgagatggttgttgccctagtctgttggtagaaccagaaatcaatatgttgtcttttaggttaaagcttgtaccaaaatatttatttcccccatttcaagccctgagtcaaacatttttttctcttaataatagacctgaaatgttttattagtatttctgtgaaatcagttgattcttgtgccatttttgtatatgtaattgtaattttgcccatgttaggccctctaaaaaatgtttgacatcctttgagatattttattactaaaatctgatcttttttggctactgcaaaaatctattcagcaagaaggtatcagctgcataccttgcacagtggagctgactacctataaactctccctaaggcatttgtttacaggtgtattccattttagcagacgttctgatgctcagtgtatgtgctgcatacaaataaatgtgttctgaatcttttcatcttattgatagcatttttacaaatgtgtttccaaggaataaagattattcttgcttt

SEQ ID NO: 198445 - DNA, 3843 bp, Artificial Sequence
  derived and/or modified sequence
ggaaaaggcgccttgggagcgggcgctcggcggggcctcctcgggccccgggcgcggcgcggcgagtgggagcgagcgcgccaggaccacgcaggcgccctgctccggctggccctcggccggcgcgcggcgcgggagcagcccgcagcccgcctcccgcgcccccggcagccccctggcagcccgcagccgcccgtccggagcagcccctcggcagcccgcgcaggccgccggcccgggagagcgcgcggcggcggcggcggcgggacggccccgagcgcgccctcccgcctgcggccactcgcagccggcgctggccgggccggcgcgccccgcaggcggctagagcgcggcctcggcctcggcgcgggcttgccccgggccgtagcccgcgagaggcggcgcgggcggccgagggcactgacggcgtcgcgggacgctcccgggcggcggcgcagcggcagcggcagcggcagcggcagcgcagggggcggaggcagggggcgcccccagccaggatgctgcggttcctgcgccggacctttggccgccgctccatgcagcgctacgcgcggggcgcggcggggcgcggggccgccgggctgggggacgagcgcgatggggggccacgggggggcccggccgccgccgcctcctcctcggcgctgcccgccgcgcccgggggcagcgtgttcccggcgggcggcgggcccctgctcaccggcggcgcggccgtgcacatctccgccgccggcgccgccaaggccaccctctactgccgcgtcttcctgctcgacgggaccgaagtgagcgtggacctgccgaaacatgccaaaggccaggatttgtttgatcagattgtgtaccacttggaccttgtggaaacagattactttggcctccagttcctcgactctgcccaggttgcgcactggctggatcatgccaaacccataaaaaagcagatgaaaattggacctgcttatgctttacactttcgagttaaatactattcttcagaaccaaacaaccttcgtgaggagtttacaaggtacctgtttgttttacaactcaggcatgacattctttctggaaaattgaaatgcccttatgaaacagctgtggaattagctgctctctgtctacaagcggagcttggggagtgcgagcttccagaacacacaccagagcttgtgtctgagtttcggttcattccaaatcagacagaagcaatggaatttgatatcttccagagatggaaagagtgcaggggaaagagccctgcccaggcggaactctcctatctgaataaagcgaagtggctggaaatgtatggggtagacatgcacgttgtcaggggaagagatggctgtgaatattctcttggactgaccccgacaggcatattaatctttgaaggagctaacaaaataggcttattcttttggcctaaaattaccaaaatggattttaaaaagagcaaattgacactcgtggtggtcgaggatgatgatcagggacgtgagcaagagcacacgtttgtgttccggttagacagtgccaggacctgcaaacacctttggaagtgtgcagttgagcaccacgcattcttccgactgcggacgccaggaaacagcaaatccaatagatccgactttatcaggctgggctctcgcttcagattcagtgggcggacagaatatcaagctacacatggctccaggttacgaagaaccagcacctttgagaggaagcctagtaaacgttatccatcccggagacattcaacgttcaaagcaagcaacccagtgatagcagcccagctctgctctaaaacaaatccagaagtccataattaccagcctcaatatcatcctaatatccatcccagccagccccggtggcatcctcactctccaaatgtcaggccatcctttcaggatgacaggtcgcattggaaagcatcggccagtggagatgacagccattttgattatgtccacgaccagaaccagaagaacttaggagggatgcaaagtatgatgtatcgagataaactcatgactgcactttgagagactgaagcatctctcttccattcaccttcatagtttcattgcattccatgaaaagtgtcttggcctcagatggatggatgtgtttggacgagtgtctttaaggagtagtcctgaaaggtgtttttggtgtccatgtaaatatttgaagataaaaccactatagcttgtcataatttactgttgactgcattctcattaaaatgaaggtaaaggctcaggaatcatattgatgttctgattttaaaattggagtcaaagtctatgtttatcattttactatgttcctgatgttctttgttatttaattaatgggagcaaataaaaccagaagagcttgggaagattgctcagcatatattcctgtcgtagaagttgagattgctagggtccagtttccctagtgtggcctggacgagtcatttccccttcattgacctcattttccccatctgaaaagagagggttggactaagtgatctccaaggtcctttccaactctaaaattctgcaatttgttaacatttcattttgtttaggttgaggacatacattcaaactaattttatcacaaggaaaactgcaatacccacttccttgacagagttactcctttcagaagctaaataaagtatataacttattagatgttatatagatacagggggactttgaatttcacatcttaaagcagttgagctactttgaatttaagcagtcgtactaatcttaaattgcatagcatttgttttgatcgaatttgctgctcaagtatgggaataatttttaatgtcttaatgattggtgctgctaacttgcgtgatttcagaagacataattgtgaatacacactgtcagaattgggggattggtttttaccctagacttcactcttaaaaagcaacgtgcaatcaagatcatttatggctcaaatgaaagcatataaggttttcttgaagttgtgccaaagcattctgtagagtaggatgagatggttgttgccctagtctgttggtagaaccagaaatcaatatgttgtcttttaggttaaagcttgtaccaaaatatttatttcccccatttcaagccctgagtcaaacatttttttctcttaataatagacctgaaatgttttattagtatttctgtgaaatcagttgattcttgtgccatttttgtatatgtaattgtaattttgcccatgttaggccctctaaaaaatgtttgacatcctttgagatattttattactaaaatctgatcttttttggctactgcaaaaatctattcagcaagaaggtatcagctgcataccttgcacagtggagctgactacctataaactctccctaaggcatttgtttacaggtgtattccattttagcagacgttctgatgctcagtgtatgtgctgcatacaaataaatgtgttctgaatcttttcatcttattgatagcatttttacaaatgtgtttccaaggaataaagattattcttgctttttttttgactccatcttcattttttttaaattgattcttgttgctatgcagaagtctcatttgtgaatgaccttggtaacagaacagttggcttttggaagtctgaaggtgagcattcagttaggtgggtggagcaagatcatcctagaatgaggctgctcttggcaagagtggatcttataggcacagcagctgatgcctttcttcatctggggcaactctggtgaaggttgtcctgcctgtcacaggtgctgagtagagagaa

SEQ ID NO: 198446 - protein, 479 aa, Artificial Sequence
  derived and/or modified sequence
MDETSPLVSPERAQPPDYTFPSGSGAHFPQVPGGAVRVAAAAGSGPSPPGSPGHDRERQPLLDRARGAAAQGQTQTVAAQAQALAAQAAAAAHAAQAHRERNEFPEDPEFEAVVRQAELAIERCIFPERIYQGSSGSYFVKDPQGRIIAVFKPKNEEPYGHLNPKWTKWLQKLCCPCCFGRDCLVLNQGYLSEAGASLVDQKLELNIVPRTKVVYLASETFNYSAIDRVKSRGKRLALEKVPKVGQRFNRIGLPPKVGSFQLFVEGYKDADYWLRRFEAEPLPENTNRQLLLQFERLVVLDYIIRNTDRGNDNWLIKYDCPMDSSSSRDTDWVVVKEPVIKVAAIDNGLAFPLKHPDSWRAYPFYWAWLPQAKVPFSQEIKDLILPKISDPNFVKDLEEDLYELFKKDPGFDRGQFHKQIAVMRGQILNLTQALKDNKSPLHLVQMPPVIVETARSHQRSSSESYTQSFQSRKPFFSWW

SEQ ID NO: 198447 - protein, 449 aa, Artificial Sequence
  derived and/or modified sequence
MLGPQVWSSVRQGLSRSLSRNVGVWASGEGKKVDIAGIYPPVTTPFTATAEVDYGKLEENLHKLGTFPFRGAVGGVCALANVLGAQVCQLERLCCTGQWEDAQKLQHRLIEPNAARIIAVFKPKNEEPYGHLNPKWTKWLQKLCCPCCFGRDCLVLNQGYLSEAGASLVDQKLELNIVPRTKVVYLASETFNYSAIDRVKSRGKRLALEKVPKVGQRFNRIGLPPKVGSFQLFVEGYKDADYWLRRFEAEPLPENTNRQLLLQFERLVVLDYIIRNTDRGNDNWLIKYDCPMDSSSSRDTDWVVVKEPVIKVAAIDNGLAFPLKHPDSWRAYPFYWAWLPQAKVPFSQEIKDLILPKISDPNFVKDLEEDLYELFKKDPGFDRGQFHKQIAVMRGQILNLTQALKDNKSPLHLVQMPPVIVETARSHQRSSSESYTQSFQSRKPFFSWW

SEQ ID NO: 198448 - DNA, 1440 bp, Artificial Sequence
  derived and/or modified sequence
atggacgaaacttctccactggttagccctgaaagagcacagcctcctgactacacatttcccagtggctcaggcgcccactttcctcaagtgccagggggtgccgtgagggtggccgctgcagctggatccgggccttcgccaccaggctcaccgggacacgatagggagcgccagcccctcctggaccgagctaggggcgccgcagcccagggccaaacccaaacagtagcggcccaggcccaagccctggccgcacaggcggcggccgctgcgcacgccgcccaagcgcaccgcgagagaaacgaatttcccgaagatcctgagtttgaagcagtggtgaggcaggccgagctggccatcgagagatgtatatttccagaacggatttaccaggggtcatctggatcctattttgtcaaggatccccaggggaggatcatcgctgtttttaagcccaagaacgaagagccgtacggccacttgaacccaaagtggacaaagtggctgcaaaagctctgctgtccatgctgcttcggcagggattgcctcgtgctcaaccaaggatatctgtcagaagctggagccagccttgtggaccaaaaactggagctgaatattgtgccccggaccaaagttgtttacctcgccagtgagacattcaactattcggctatcgatagggtgaaaagtcggggcaagcgcttggcactcgagaaggtgcccaaggttggacagcgcttcaataggatcggactgccgcctaaagtcggttccttccagttgtttgttgaaggatataaagacgcagactattggctacgccggtttgaggccgagcccttgcctgaaaacacaaaccggcaattactgttacagtttgaaagacttgtcgtgttggattatataatccgtaacacagacaggggaaatgacaattggctgatcaagtacgattgccccatggatagcagcagttcccgggacacggactgggttgtggtgaaggagcccgtcataaaagtcgcggcgatcgacaacggacttgcatttccattgaagcacccagattcctggagagcctaccctttctactgggcctggctgccacaagccaaggtccccttcagccaggagattaaagacctgattcttccgaaaatttcagaccccaactttgtgaaggacttggaagaagacttatacgaactgttcaagaaggacccgggattcgataggggccagttccacaaacagatcgcggtgatgagagggcagatactcaacctcactcaggctttaaaagacaacaagtcgccattgcatttagtccagatgccccctgtgatcgtggagacagccaggtcccaccaacgatcctctagcgagagctatacacagagtttccagagcaggaagcctttcttttcctggtggtag

SEQ ID NO: 198449 - DNA, 1350 bp, Artificial Sequence
  derived and/or modified sequence
atgctgggcccccaggtgtggtccagcgtgcggcagggactcagccgaagtttgagccggaacgtgggagtctgggctagcggcgaagggaagaaggtagatattgctggaatctatccgccagtcaccaccccctttacagcaacggcagaagtcgactacggaaaactggaggaaaacctccacaaacttggtactttcccgttccgaggcgcagtaggtggggtgtgtgcactggcaaacgtgttgggggcacaggtatgtcaacttgagcggctctgttgcacagggcagtgggaagatgcccagaagctacagcatcgcctaatcgaacctaacgccgcacgaatcatcgccgtgtttaaaccgaagaacgaagagccctacggccacttgaaccccaaatggaccaagtggcttcagaagctttgctgcccctgttgttttgggcgggactgcttggttctcaaccaaggttacttgtccgaggccggggcatcactggtggatcagaaactcgagctgaacatcgtgcccagaactaaggtagtttatctggcctcggagacattcaattactccgcgattgatagagtaaagtcaaggggaaagcgcctcgctttagagaaggttcccaaagtcggacagcgatttaaccggattggtctgccaccaaaggttggctctttccaactgttcgtcgaagggtataaggacgctgattattggttaaggaggtttgaagctgagcccctccccgaaaacaccaatcgccagctgttacttcagtttgaacgcctggtggttctggattacattattcggaacactgaccgcgggaacgacaattggcttattaagtacgactgccccatggatagctcttctagtagggatacggactgggtggtcgtaaaagagcctgtgataaaagttgccgccattgataacggcctggccttcccgcttaagcatccagatagctggcgggcctatcccttctattgggcctggctccctcaggcgaaggtgcctttctctcaagaaattaaggatctgattctgcccaagatatcagaccccaatttcgtgaaggaccttgaggaggacctgtatgaactctttaaaaaagatcctgggttcgatcgcggccagttccataagcagattgccgttatgagaggacagatattgaatctcacacaggcgctcaaggacaataaatcccctcttcacttggtccagatgcccccagtgattgtcgaaaccgctaggagtcaccagcgatcaagctccgagtcctatacccagtcttttcaatctcgcaagccattcttctcctggtggtag

SEQ ID NO: 198450 - DNA, 1440 bp, Artificial Sequence
  derived and/or modified sequence
atggatgagaccagccccctggtgtccccagagcgggcccagcccccagactacaccttccccagcggcagcggggcccacttcccccaggtgcctgggggcgctgtgcgggtggccgctgctgctggcagcggccccagccccccaggcagccctggccatgaccgggagcggcagcccctgctggaccgggcccggggagctgctgcccagggccagacccagacagtggccgcccaggcccaggccctggccgcccaggccgctgctgctgcccacgccgcccaggcccaccgggagagaaatgagttccctgaggaccctgagtttgaggccgtggtgcggcaggccgagctggccatcgagcgctgcatcttccctgagcgcatctaccagggcagcagcggcagctactttgtgaaggacccccagggccgcatcatcgctgtgttcaagcccaagaatgaggagccctacggccacctgaaccccaagtggaccaagtggctgcagaagctgtgctgcccctgctgcttcggccgggactgcctggtgctgaaccagggctacctgtctgaggccggggccagcctggtggaccagaagctggagctgaacatcgtgcccaggaccaaggtggtgtacctggccagcgagaccttcaactacagcgccatcgacagagtgaagagccggggcaagaggctggccctggagaaggtgcccaaggtgggccagcgcttcaacagaattggcctgccccccaaggtgggcagcttccagctgtttgtggagggctacaaggatgctgactactggctgcggagatttgaagctgagcccctgcctgagaacaccaaccggcagctgctgctgcagtttgagcggctggtggtgctggactacatcatccggaacacagacagaggaaatgacaactggctgatcaagtatgactgccccatggacagcagcagcagccgggacacagactgggtggtggtgaaggagcccgtcatcaaggtggccgccatcgacaatggcctggccttccccctgaagcacccagacagctggagggcctaccccttctactgggcctggctgccccaggccaaggtgcccttcagccaggagatcaaggacctgatcctgcccaagatcagtgaccccaactttgtgaaggacctggaggaggacctgtatgagctgttcaagaaggaccccggctttgaccggggccagttccacaagcagattgctgtgatgaggggccagatcctgaacctgacccaggccctgaaggacaacaagagccccctgcacctggtgcagatgcctcctgtgattgtggagacagcccggagccaccagaggagcagcagcgagagctacacccagagcttccagagcaggaagcccttcttctcctggtggtag

SEQ ID NO: 198451 - DNA, 1350 bp, Artificial Sequence
  derived and/or modified sequence
atgctgggcccccaggtgtggagctctgtgcggcagggcctgagccgcagcctgagcagaaatgtgggcgtgtgggccagcggggagggcaagaaggtggacattgctggcatctacccacctgtgaccacccccttcaccgccacagctgaggtggactatggcaagctggaggagaacctgcacaagctgggcaccttccccttcagaggagctgtgggcggcgtgtgtgccctggccaacgtgctgggcgcccaggtgtgccagctggagcggctgtgctgcaccggccagtgggaggatgcccagaagctgcagcacaggctcatcgagcccaatgctgcccgcatcatcgctgtgttcaagcccaagaatgaggagccctacggccacctgaaccccaagtggaccaagtggctgcagaagctgtgctgcccctgctgcttcggccgggactgcctggtgctgaaccagggctacctgtctgaggccggggccagcctggtggaccagaagctggagctgaacatcgtgcccaggaccaaggtggtgtacctggccagcgagaccttcaactacagcgccatcgacagagtgaagagccggggcaagaggctggccctggagaaggtgcccaaggtgggccagcgcttcaacagaattggcctgccccccaaggtgggcagcttccagctgtttgtggagggctacaaggatgctgactactggctgcggagatttgaagctgagcccctgcctgagaacaccaaccggcagctgctgctgcagtttgagcggctggtggtgctggactacatcatccggaacacagacagaggaaatgacaactggctgatcaagtatgactgccccatggacagcagcagcagccgggacacagactgggtggtggtgaaggagcccgtcatcaaggtggccgccatcgacaatggcctggccttccccctgaagcacccagacagctggagggcctaccccttctactgggcctggctgccccaggccaaggtgcccttcagccaggagatcaaggacctgatcctgcccaagatcagtgaccccaactttgtgaaggacctggaggaggacctgtatgagctgttcaagaaggaccccggctttgaccggggccagttccacaagcagattgctgtgatgaggggccagatcctgaacctgacccaggccctgaaggacaacaagagccccctgcacctggtgcagatgcctcctgtgattgtggagacagcccggagccaccagaggagcagcagcgagagctacacccagagcttccagagcaggaagcccttcttctcctggtggtag

SEQ ID NO: 198452 - DNA, 1440 bp, Artificial Sequence
  derived and/or modified sequence
atggacgagaccagccccctggtgagccccgagcgggcccagcccccggattatacatttccaagcggcagcggcgctcatttccctcaggtacctggcggagccgtacgggtcgcagctgctgccggatctggaccgtccccaccaggatcaccgggacatgatcgagaacgccagcccttgctcgatagagcacggggagctgctgcccagggccagacacaaacagtggcagcacaggcccaggcccttgcggcccaggccgctgccgccgcacacgccgcccaggcacatagagagagaaatgaatttcccgaggaccccgaatttgaagcagtggtccgacaggccgagctggctatagagcgctgcatattccctgagcgtatctatcaaggcagtagcggatcctatttcgtgaaagacccacagggacgaatcatcgccgtgttcaagcctaaaaacgaggagccatacggccatcttaatccaaaatggaccaagtggctgcagaaactctgttgcccatgttgcttcggtagggactgcctggtgctaaatcaaggatatctgtccgaggcgggcgcgtccttagtggatcagaagctagagctcaacattgtgccccgcacaaaagtcgtttatctggcctctgagactttcaattattccgcgattgaccgtgtgaagtccagaggaaagcggctggcactggaaaaagtgccaaaagtggggcaacggtttaatagaattggactgcccccaaaagttggatctttccagctctttgttgagggttacaaggatgccgactactggctgcgaagatttgaggcggagcccttgcccgaaaacacgaaccggcagctgctacttcagttcgagagactggtcgtcctagactacattatcagaaacactgataggggaaacgacaactggttgattaagtacgactgtcccatggatagcagcagcagccgtgatactgactgggtcgtggttaaggagcccgtcatcaaagtggcggctatcgacaacgggctggctttcccgcttaaacatccggactcatggcgcgcgtatcctttctactgggcatggctcccccaggcaaaggtccctttttcccaggagattaaggatctgatcctgcccaaaatttctgacccaaacttcgtgaaggacctcgaggaggacctttatgagctgttcaaaaaggaccctggctttgaccggggccagtttcataagcagatagccgtgatgagggggcagatccttaatctgacccaggccctgaaggacaacaaaagccccctgcacttggtccagatgcctcccgtgatcgtggagaccgccagaagtcatcaacggagcagcagtgaatcttacacacagagctttcaaagcaggaagccattcttcagctggtggtag

SEQ ID NO: 198453 - DNA, 1350 bp, Artificial Sequence
  derived and/or modified sequence
atgctgggcccccaggtgtggagcagcgtgcggcagggcctgagccgttctctgagtcgcaacgtgggagtgtgggcctcaggagaaggcaaaaaggttgatatcgctggtatataccctcccgtaaccacccccttcaccgcaacggcggaggtcgactacggaaagttagaagagaacttacacaagcttggaacttttccctttcgtggggctgtcgggggcgtatgcgcgctcgcaaacgtgctgggcgcccaggtgtgtcagcttgagcggctttgctgcaccgggcagtgggaggacgcccagaaacttcaacatagattaattgagcctaacgctgccagaattattgctgtgtttaaacccaagaacgaggaaccctatggacatctgaatcctaagtggacgaagtggctgcaaaaattgtgttgtccttgttgctttggccgggactgcctcgtgctcaaccaggggtatctatccgaggccggcgcttccctggtggaccagaagctggagttgaatattgttccccgcacaaaggtggtgtacctagccagtgagacgttcaactacagcgccatcgacagagtaaagtcacgcggtaaacgtctcgctctcgagaaagtcccaaaggtcgggcaacgctttaatcgcatcggcttgcccccaaaggtcggaagttttcagctctttgttgagggatacaaggacgccgattactggctgagacggttcgaggcggagccactaccggaaaatacgaaccggcagttgttgctccagttcgagaggctggtggtgctcgactacatcattcggaacacagacagggggaacgataattggctcataaagtacgactgccctatggattctagtagctcgcgtgacaccgactgggtagttgtgaaggaacctgtgataaaggttgctgcaattgataacggacttgcctttcctctgaagcaccccgattcgtggagagcctaccctttctattgggcctggctgccgcaagccaaagtcccgttcagccaggaaatcaaagatctcatactgcctaagatctccgatcccaattttgtcaaggacctggaggaagatctctacgagttatttaagaaggatcccggctttgaccgcggacagttccacaagcagattgcagtgatgcggggccagattctcaacctcacacaggcccttaaggataacaaatcccctttacacttagtgcagatgcccccagtgattgtggagacagcgagaagccaccagcgaagcagctctgaatcatatactcagagtttccagtccaggaagccctttttctcgtggtggtag

SEQ ID NO: 198454 - DNA, 4189 bp, Artificial Sequence
  derived and/or modified sequence
cggccgcgagcgcagtggtgtggagcgcgccgggtcccggagccggctgtctgagggatggacgagacgagcccactagtgtcccccgagcgggcccaacccccggactacaccttcccgtcgggctcgggcgctcactttccgcaggtgcccgggggcgcggtccgagtggcggcggcggccggctcgggcccctctccgccgggctcgccgggccacgaccgcgagcggcagccactgttggatcgggcccggggcgcggcggcccagggccagacccaaaccgtggcggcgcaggcccaggctctggccgctcaggccgcggcggcagcccacgccgctcaggcccaccgcgagcggaacgagttcccggaggatcctgagttcgaggcggtggtgcggcaggccgagctggccatcgagcgctgcatctttcccgagcgcatctaccagggctccagcggaagctacttcgtcaaggaccctcaggggaggatcattgctgtcttcaaacccaagaatgaagagccctatgggcatcttaatcctaagtggaccaagtggctgcagaagctgtgctgtccttgctgctttggccgtgactgccttgtccttaaccagggctatctctcagaagcaggggccagcctggtggaccaaaaactggaactcaacattgttccccgtacaaaggtagtatacctggccagtgagaccttcaactatagtgccattgaccgagtgaagtccaggggcaagcggcttgcactagagaaagtgccaaaagttggacagcggtttaaccgcatcgggctaccaccaaaggttggttcattccagctctttgttgaaggctacaaagatgcagactattggctgcggcgttttgaagcagaacctcttcctgagaacactaaccggcaactactgctccagtttgagcggttggtggtgctggattacatcatccgcaacactgatcgaggcaatgacaactggctgattaaatatgactgtccaatggatagttctagctctcgggacacagactgggtggtggtgaaggagcctgttatcaaggtggctgccatagacaatgggctggccttcccactgaagcatcctgactcctggagggcatatcctttttactgggcctggttgccccaggcgaaagtcccattttctcaggagatcaaagatctgatccttccaaagatatcggaccctaacttcgtcaaggacttggaagaggacctatatgaactcttcaagaaagatcctggtttcgacaggggccagttccataagcagattgctgtcatgcggggccagatcttaaatctgacccaggccttgaaagacaacaagagtcccctgcacctcgtccagatgccacctgtgattgtcgagacggcccgttcccaccagcggtcttctagcgagtcctacacacagagctttcagagccggaagcccttcttttcatggtggtagctccagaggcaggcagaggaaatattgtcagagactggtgggaggaagcctggggagtggggtgcaggaaaagccagagaagccggtggagagcagcacctttaagagccctctctctctgcttgccaccctgctcagagctttccacccacagggagaagcacaatcaggaacagtgagtgctcctcgcccttctgatgtgggggaggctggagctccatgcacgtagtccagatgcctgggaaggaacatctcccttccagcatctgctggtagcaggctgggacagtcccttccttccctgaaaccctgctctattgcaattccctattatattctgcatcagaaaaacaaacaaaacaaaaacaactttaaatgcttgtagcagaaccccgggtcatctcatgtcagaaacctttaatccaggcctaaatttgcatagacctgacattcagctgccttgcagttgcttcctcccatgagccaaggtggtgtcagagggcaactggatgactcgcagtaccacagcactgggacagacagaagccacacctttcttttgggtttttgccaagcctcctccatctcccatcagtgctgtgggctggctgcaagcctcgaaacagttctcctggaagggaggtttttgctttacccccgccagcacttccgcacacaatcatagagaacctctctgctctctgctggcctacagcttgtctgtttctcaagcagaggcaggaagagctagtcttagcatttatattttaataggaagttgactcccagcatgtaaaagtgatccacgcagccggagtgtatgccgggagctaagtggtctatgggtgaacatatcccaccttgcttcctgagtccttggtcccaatcttctcatttgttcctctcgttttaaattttttccccccaactcttttgatgtaagagttcagtttgtcttcgggagtgggtctctgcaagggctctgggatgagtcttggcttccaagaggacaggctattaggttcttggacttttttctgtgctaccgctgctgcttggtggaagtaacaggacgtggattctgcctcataagtggcagtttcccttttctctctgacttgtcctaggccgatttctctatggcttccctgagaaaggtgaggcccaaaggagagaggccttcaaactgtcccaggtcctgcgcagctcagtgcgtatcttcttgcttccatgtgtcttttcccctgctgcctcactccccacccccacttgccaggtgtttgagccatttctacaccaaagcaaagtacggcctcaggagggagtaaaaagggtgccatctgtgtctggaggggcagctgtgttcatgccctgtgctactggacatttcacaattctggcaccttgcgattggtcagtcaacctcagaaagtaactatcttgaaggtttgaaaaacaaccaaagaaagggagtgaggactatggctgcatgtcctctgcttgcccggctgcagagcagagatgtgcagccctctggtcagctggtccaggctggtccccgccggtccccttccagtccagccaccaagagtccacttgtcccgggcttccacctggctgacaggaagaatttctgagagctggatgtgcatgccctgtggacgaaggtacagctcgcctgcctgccccaatcccagccccgacaatcacatgcagctgactcggacactggccttgggaacaatgttcgagagaacacttgccccttgactgtaggagccagaaggggacccaggtgtgcatagctctctgtagacatttttacccaaacctgttggtaaagtgcccatctggtgctcaagagagcctgggggtctaacagggagcccggctgcctcacctggccacagcctccacaccagatctccacattgtcttgatccagaccagctctgtgatcagaaggaaattgggtccagtgtaggagagagctggtcctgggcctggcaggcaagagtgtgggcatcctttcctggcctttctccactctccctcaagcctgtgctcaggttgccttgaatgtggactctggaagagccaggggcccagaatgccgggggaggcttctgagtggcactcatggaacaccgtccctctgccagccataggccctgcctccagtgtcagggaatggaggctgggctgcgagagtgttgctgccccctgtgtcattcttctaatccaatgtagaaattgtacgtaatgtatttaaatcaacgcaaatgtatgaataacaaatacagttctgaccttttttgtccagtttctttgggggaaggaagacaaagaaggtaggaacggaattttgagggcaaagaaacctgtgtttccatggaattgctgagacgtggctcctggggctatttctccctaataaaggatgatccaggtcctcatttccaaagtcccaatgctctgaaaaccaaaagtattttcataacccatttgaaaccaaacctgacctgaacttacactgataggaagctatgggtaattatgatgtgttccttttagtgtgattctttgttgcagaaatgtcaatatattttatgacatggttccctactagggattatacagtatttgctgactacttcctaagagccaaaaataaaaaatctgaattccaaaa

SEQ ID NO: 198455 - DNA, 1848 bp, Artificial Sequence
  derived and/or modified sequence
gtgggaggagggcccagatcccactggagataccgaaggagatactctttagtattgggatcccagaaaccagtcctatatctggccagagggacactgggttgtggcatctctctagctgctacccagaaggaacagggccccctggggcctataggccttgcccctgaccctgggaacacccagctcaggcctgccccagtggccacaagtcagggaggccgcaaatttttaactagaaacattgatcattaatagggggttagaaagagttcaaactaagtctcactctgggacatagaccaattgtgcttcaggcctcctgcagagatgctgggtccccaagtctggtcttctgtgaggcaggggctaagcaggagcttgtccaggaatgtgggggtctgggcctcaggggaggggaagaaggtggacattgcgggtatctacccccctgtgaccacccccttcactgccactgcagaggtggactatgggaaactggaggagaatctgcacaaactgggcaccttccccttccgaggagctgtggggggcgtctgcgccctggccaatgtcctgggggctcaggtgtgccagctggagcgactgtgctgcacggggcaatgggaagatgcccagaaactgcagcaccgcctcattgagccaaacgctgcgaggatcattgctgtcttcaaacccaagaatgaagagccctatgggcatcttaatcctaagtggaccaagtggctgcagaagctgtgctgtccttgctgctttggccgtgactgccttgtccttaaccagggctatctctcagaagcaggggccagcctggtggaccaaaaactggaactcaacattgttccccgtacaaaggtagtatacctggccagtgagaccttcaactatagtgccattgaccgagtgaagtccaggggcaagcggcttgcactagagaaagtgccaaaagttggacagcggtttaaccgcatcgggctaccaccaaaggttggttcattccagctctttgttgaaggctacaaagatgcagactattggctgcggcgttttgaagcagaacctcttcctgagaacactaaccggcaactactgctccagtttgagcggttggtggtgctggattacatcatccgcaacactgatcgaggcaatgacaactggctgattaaatatgactgtccaatggatagttctagctctcgggacacagactgggtggtggtgaaggagcctgttatcaaggtggctgccatagacaatgggctggccttcccactgaagcatcctgactcctggagggcatatcctttttactgggcctggttgccccaggcgaaagtcccattttctcaggagatcaaagatctgatccttccaaagatatcggaccctaacttcgtcaaggacttggaagaggacctatatgaactcttcaagaaagatcctggtttcgacaggggccagttccataagcagattgctgtcatgcggggccagatcttaaatctgacccaggccttgaaagacaacaagagtcccctgcacctcgtccagatgccacctgtgattgtcgagacggcccgttcccaccagcggtcttctagcgagtcctacacacagagctttcagagccggaagcccttcttttcatggtggtagctccagaggcaggcagaggaaatattgtcagagactggtgggaggaagcctggggagtggggtgcaggaaaagccagagaagccggtggagagcagcacctttaagagccctctctctctgcttgccaccctgctcagagctttccacccacagggagaagcacaatc

SEQ ID NO: 198456 - DNA, 1440 bp, Artificial Sequence
  derived and/or modified sequence
atggacgaaactagcccactggtaagtccggaaagggcacagcccccagactatacctttccctccggatccggggctcactttccacaggtgcctgggggagcggttcgcgtcgcagcggctgcgggaagcggtccctctccacccggttcaccaggccacgatcgggaaaggcagcccctcctggacagagcacgcggagccgctgcgcaggggcagacacaaaccgtggccgctcaggcccaggccctcgccgctcaggctgcagcagccgctcatgcagcgcaggctcaccgcgagagaaacgagtttccggaagatcctgagttcgaagccgtagttcgtcaggctgagcttgcaattgagagatgcattttcccagagagaatctaccagggcagtagcggctcctattttgttaaggatccacagggcagaatcattgctgtatttaaaccaaaaaacgaggagccctacgggcacctgaacccaaagtggactaaatggcttcaaaaattgtgctgcccttgttgctttgggagagactgtctggttctgaaccaggggtatctgtccgaagccggtgcctccctagtagatcagaaattagagctgaacattgtgcctagaacaaaggttgtgtatctggccagtgagaccttcaattactcggccatagaccgggtaaaaagccgcggaaagcgcctggcccttgagaaagtacccaaggtgggccagcgatttaataggatcggacttccgccaaaggttggatcttttcagctgtttgtggaaggttataaagatgccgactactggctgcgcaggtttgaagctgagcccctcccggagaatactaatcgccaacttcttctccaattcgagcgattggtggtcctggactatataatccgtaacaccgaccgcggtaacgataattggctgattaaatacgactgtccgatggattcatcctctagcagggacacggattgggtagtggtgaaagaaccagtcatcaaggtggccgcaatcgacaatggcttggcctttccactcaagcatcccgactcatggagagcataccctttttattgggcctggctcccccaggctaaggtgcccttctcacaggaaataaaggacctgatcctgcctaagatttctgatcccaactttgtgaaggatcttgaggaagacctctacgagctgtttaagaaagaccccggttttgaccgtgggcagttccataaacagattgctgttatgcgaggccagattctcaatctcacccaggcccttaaagacaacaagagtccactgcacctagttcagatgcctcccgtgattgttgagacagcaagaagccatcagcgtagtagtagcgagtcctacacccagagcttccagtccagaaagccgtttttttcctggtggtag

SEQ ID NO: 198457 - DNA, 1350 bp, Artificial Sequence
  derived and/or modified sequence
atgttaggtccccaagtctggtcatctgttaggcaggggctgtctaggtctctgagcaggaacgtgggagtctgggcaagcggtgaaggtaagaaagtagacatcgccggaatttatcccccagttactaccccttttaccgccactgccgaagtcgactacggaaaactggaggaaaatcttcataaattgggcacttttccctttcgtggggctgtcggcggagtttgcgcgctcgccaacgtcctgggagcccaggtctgccagctggaaagactttgctgtaccggacagtgggaggatgcccagaaattgcagcatcggctgatcgaaccaaacgccgctcgtatcatagcagtgttcaaaccaaaaaatgaagaaccctatggccatcttaaccccaagtggactaagtggttgcagaagctttgctgtccatgctgtttcggacgcgactgccttgtgctcaaccaggggtatctgtcagaagccggagcttccctggttgaccaaaaattggaactgaacatcgtcccaaggaccaaggtggtatacctggcatcggagacgttcaattattctgccatcgaccgagtcaagtctaggggtaagaggctggccttggagaaggtccccaaggttggccagagatttaacaggatcggcctgccgccaaaagtgggttcttttcagttgttcgttgagggatacaaggatgccgactattggctgcggagattcgaagctgaacctctccccgaaaataccaatcggcagctgctgcttcaattcgagcgattagttgttctcgattacataatccgtaatacagatcgcggtaatgataattggctgataaagtatgactgtcccatggattcctctagttcgagagatacagattgggtcgtggtcaaggagcccgtgatcaaagtagccgctatcgataacggactcgccttccctttaaaacatcctgactcctggcgcgcttacccattctactgggcctggctgccacaggccaaggttcctttctctcaggaaattaaggatctgattctgccgaaaatcagtgacccaaacttcgtgaaggatctggaagaggacctgtatgagctatttaaaaaggaccccggtttcgacagaggacagttccataagcaaattgcggtgatgaggggccagattctaaatcttacacaagctttgaaggataacaagtctcctcttcacttggtgcagatgcctcccgtgatcgtggagacagcaagatctcaccagcggtccagcagcgagtcctacacccagtcgtttcagtcccgaaagccattcttttcctggtggtag

SEQ ID NO: 198458 - DNA, 1440 bp, Artificial Sequence
  derived and/or modified sequence
atggacgagaccagccccctggtgagccccgagagagcccagccccccgactacaccttccccagcggcagcggcgcccacttcccccaggtgcccggcggcgccgtgagagtggccgccgccgccggcagcggccccagcccccccggcagccccggccacgacagagagagacagcccctgctggacagagccagaggcgccgccgcccagggccagacccagaccgtggccgcccaggcccaggccctggccgcccaggccgccgccgccgcccacgccgcccaggcccacagagagagaaacgagttccccgaggaccccgagttcgaggccgtggtgagacaggccgagctggccatcgagagatgcatcttccccgagagaatctaccagggcagcagcggcagctacttcgtgaaggacccccagggcagaatcatcgccgtgttcaagcccaagaacgaggagccctacggccacctgaaccccaagtggaccaagtggctgcagaagctgtgctgcccctgctgcttcggcagagactgcctggtgctgaaccagggctacctgagcgaggccggcgccagcctggtggaccagaagctggagctgaacatcgtgcccagaaccaaggtggtgtacctggccagcgagaccttcaactacagcgccatcgacagagtgaagagcagaggcaagagactggccctggagaaggtgcccaaggtgggccagagattcaacagaatcggcctgccccccaaggtgggcagcttccagctgttcgtggagggctacaaggacgccgactactggctgagaagattcgaggccgagcccctgcccgagaacaccaacagacagctgctgctgcagttcgagagactggtggtgctggactacatcatcagaaacaccgacagaggcaacgacaactggctgatcaagtacgactgccccatggacagcagcagcagcagagacaccgactgggtggtggtgaaggagcccgtgatcaaggtggccgccatcgacaacggcctggccttccccctgaagcaccccgacagctggagagcctaccccttctactgggcctggctgccccaggccaaggtgcccttcagccaggagatcaaggacctgatcctgcccaagatcagcgaccccaacttcgtgaaggacctggaggaggacctgtacgagctgttcaagaaggaccccggcttcgacagaggccagttccacaagcagatcgccgtgatgagaggccagatcctgaacctgacccaggccctgaaggacaacaagagccccctgcacctggtgcagatgccccccgtgatcgtggagaccgccagaagccaccagagaagcagcagcgagagctacacccagagcttccagagcagaaagcccttcttcagctggtggtag

SEQ ID NO: 198459 - DNA, 1350 bp, Artificial Sequence
  derived and/or modified sequence
atgctgggcccccaggtgtggagcagcgtgagacagggcctgagcagaagcctgagcagaaacgtgggcgtgtgggccagcggcgagggcaagaaggtggacatcgccggcatctacccccccgtgaccacccccttcaccgccaccgccgaggtggactacggcaagctggaggagaacctgcacaagctgggcaccttccccttcagaggcgccgtgggcggcgtgtgcgccctggccaacgtgctgggcgcccaggtgtgccagctggagagactgtgctgcaccggccagtgggaggacgcccagaagctgcagcacagactgatcgagcccaacgccgccagaatcatcgccgtgttcaagcccaagaacgaggagccctacggccacctgaaccccaagtggaccaagtggctgcagaagctgtgctgcccctgctgcttcggcagagactgcctggtgctgaaccagggctacctgagcgaggccggcgccagcctggtggaccagaagctggagctgaacatcgtgcccagaaccaaggtggtgtacctggccagcgagaccttcaactacagcgccatcgacagagtgaagagcagaggcaagagactggccctggagaaggtgcccaaggtgggccagagattcaacagaatcggcctgccccccaaggtgggcagcttccagctgttcgtggagggctacaaggacgccgactactggctgagaagattcgaggccgagcccctgcccgagaacaccaacagacagctgctgctgcagttcgagagactggtggtgctggactacatcatcagaaacaccgacagaggcaacgacaactggctgatcaagtacgactgccccatggacagcagcagcagcagagacaccgactgggtggtggtgaaggagcccgtgatcaaggtggccgccatcgacaacggcctggccttccccctgaagcaccccgacagctggagagcctaccccttctactgggcctggctgccccaggccaaggtgcccttcagccaggagatcaaggacctgatcctgcccaagatcagcgaccccaacttcgtgaaggacctggaggaggacctgtacgagctgttcaagaaggaccccggcttcgacagaggccagttccacaagcagatcgccgtgatgagaggccagatcctgaacctgacccaggccctgaaggacaacaagagccccctgcacctggtgcagatgccccccgtgatcgtggagaccgccagaagccaccagagaagcagcagcgagagctacacccagagcttccagagcagaaagcccttcttcagctggtggtag

SEQ ID NO: 198460 - protein, 226 aa, Artificial Sequence
  derived and/or modified sequence
MAAPLLHTRLPGDAAASPSAVKMLGASRTGISNMRALENDFFNSPPRKTVQFGGTVTEVLLKYKTGETNDFELLKNQLLDPDIKDDQIINWLLEFRSSIMYLTKDFEQLISIILRLPWLNRSQTVVEEYLAFLGNLVSAQTVFLRPCLSMIASHFVPPRVIIKEGDVDVSDSDDEDDNLPANFDTSQSLANNSKICTIDTVVSHANTGGKISICSKIRENTGMLRS

SEQ ID NO: 198461 - protein, 340 aa, Artificial Sequence
  derived and/or modified sequence
MAAPLLHTRLPGDAAASPSAVKMLGASRTGISNMRALENDFFNSPPRKTVQFGGTVTEVLLKYKTGETNDFELLKNQLLDPDIKDDQIINWLLEFRSSIMYLTKDFEQLISIILRLPWLNRSQTVVEEYLAFLGNLVSAQTVFLRPCLSMIASHFVPPRVIIKEGDVDVSDSDDEDDNLPANFDTSQSLANNSKICTIECYVHNLLRISVYFPTLRHEILELIIEKLLKLDVNASRQGIEDAEETANQTCGGTDSTEGLCNMGFAEAFLEPLWKKLQDPSNPAIIRQAAGNYIGSFLARAKFIPLMIREQRHSAMLLSMDHFTQPAKLCSTPLFLDTSSF

SEQ ID NO: 198462 - protein, 486 aa, Artificial Sequence
  derived and/or modified sequence
MAAPLLHTRLPGDAAASPSAVKMLGASRTGISNMRALENDFFNSPPRKTVQFGGTVTEVLLKYKTGETNDFELLKNQLLDPDIKRLPWLNRSQTVVEEYLAFLGNLVSAQTVFLRPCLSMIASHFVPPRVIIKEGDVDVSDSDDEDDNLPANFDTSQSLANNSKICTIECYVHNLLRISVYFPTLRHEILELIIEKLLKLDVNASRQGIEDAEETANQTCGGTDSTEGLCNMVSSLLMKVEMKFIIIKGWKQLVLLIFGFAEAFLEPLWKKLQDPSNPAIIRQAAGNYIGSFLARAKFIPLITVKSCLDLLVNWLHIYLNNQDSGTKAFCDVALHGPFYSACQAVFYTFVFRHKQLLSGNLKEGLQYLQSLNFEWIVMSQLNPLKICLPSVVNFFAAITNKYQLVFCYTIIERNNRQMLPVIRSTTGGDSVQTCTNPLDTFFPFDPCVLKRSKKFIDPIYQVWEDMSAEELQEFKKPMKKLFWRIM

SEQ ID NO: 198463 - protein, 651 aa, Artificial Sequence
  derived and/or modified sequence
MAAPLLHTRLPGDAAASSSAVKKLGASRTGISNMRALENDFFNSPPRKTVRFGGTVTEVLLKYKKGETNDFELLKNQLLDPDIKDDQIINWLLEFRSSIMYLTKDFEQLISIILRLPWLNRSQTVVEEYLAFLGNLVSAQTVFLRPCLSMIASHFVPPRVIIKEGDVDVSDSDDEDDNLPANFDTCHRALQIIARYVPSTPWFLMPILVEKFPFVRKSERTLECYVHNLLRISVYFPTLRHEILELIIEKLLKLDVNASRQGIEDAEETATQTCGGTDSTEGLFNMDEDEETEHETKAGPERLDQMVHPVAERLDILMSLVLSYMKDVCYVDGKVDNGKTKDLYRDLINIFDKLLLPTHASCHVQFFMFYLCSFKLGFAEAFLEHLWKKLQDPSNPAIIRQAAGNYIGSFLARAKFIPLITVKSCLDLLVNWLHIYLNNQDSGTKAFCDVALHGPFYSACQAVFYTFVFRHKQLLSGNLKEGLQYLQSLNFERIVMSQLNPLKICLPSVVNFFAAITNKYQLVFCYTIIERNNRQMLPVIRSTAGGDSVQICTNPLDTFFPFDPCVLKRSKKFIDPIYQVWEDMSAEELQEFKKPMKKDIVEDEDDDFLKGEVPQNDTVIGITPSSFDTHFRSPSSSVGSPPVLYMQPSPL

SEQ ID NO: 198464 - protein, 618 aa, Artificial Sequence
  derived and/or modified sequence
MRALENDFFNSPPRKTVRFGGTVTEVLLKYKKGETNDFELLKNQLLDPDIKDDQIINWLLEFRSSIMYLTKDFEQLISIILRLPWLNRSQTVVEEYLAFLGNLVSAQTVFLRPCLSMIASHFVPPRVIIKEGDVDVSDSDDEDDNLPANFDTCHRALQIIARYVPSTPWFLMPILVEKFPFVRKSERTLECYVHNLLRISVYFPTLRHEILELIIEKLLKLDVNASRQGIEDAEETATQTCGGTDSTEGLFNMDEDEETEHETKAGPERLDQMVHPVAERLDILMSLVLSYMKDVCYVDGKVDNGKTKDLYRDLINIFDKLLLPTHASCHVQFFMFYLCSFKLGFAEAFLEHLWKKLQDPSNPAIIRQAAGNYIGSFLARAKFIPLITVKSCLDLLVNWLHIYLNNQDSGTKAFCDVALHGPFYSACQAVFYTFVFRHKQLLSGNLKEGLQYLQSLNFERIVMSQLNPLKICLPSVVNFFAAITNKYQLVFCYTIIERNNRQMLPVIRSTAGGDSVQICTNPLDTFFPFDPCVLKRSKKFIDPIYQVWEDMSAEELQEFKKPMKKDIVEDEDDDFLKGEVPQNDTVIGITPSSFDTHFRSPSSSVGSPPVLYMQPSPL

SEQ ID NO: 198465 - protein, 469 aa, Artificial Sequence
  derived and/or modified sequence
MIASHFVPPRVIIKEGDVDVSDSDDEDDNLPANFDTCHRALQIIARYVPSTPWFLMPILVEKFPFVRKSERTLVNASRQGIEDAEETATQTCGGTDSTEGLFNMDEDEETEHETKAGPERLDQMVHPVAERLDILMSLVLSYMKDVCYVDGKVDNGKTKDLYRDLINIFDKLLLPTHASCHVQFFMFYLCSFKLGFAEAFLEHLWKKLQDPSNPAIIRQAAGNYIGSFLARAKFIPLITVKSCLDLLVNWLHIYLNNQDSGTKAFCDVALHGPFYSACQAVFYTFVFRHKQLLSGNLKEGLQYLQSLNFERIVMSQLNPLKICLPSVVNFFAAITNKYQLVFCYTIIERNNRQMLPVIRSTAGGDSVQICTNPLDTFFPFDPCVLKRSKKFIDPIYQVWEDMSAEELQEFKKPMKKDIVEDEDDDFLKGEVPQNDTVIGITPSSFDTHFRSPSSSVGSPPVLYMQPSPL

SEQ ID NO: 198466 - DNA, 1023 bp, Artificial Sequence
  derived and/or modified sequence
atggccgcccccctgctgcacaccagactgcccggcgacgccgccgccagccccagcgccgtgaagatgctgggcgccagcagaaccggcatcagcaacatgagagccctggagaacgacttcttcaacagcccccccagaaagaccgtgcagttcggcggcaccgtgaccgaggtgctgctgaagtacaagaccggcgagaccaacgacttcgagctgctgaagaaccagctgctggaccccgacatcaaggacgaccagatcatcaactggctgctggagttcagaagcagcatcatgtacctgaccaaggacttcgagcagctgatcagcatcatcctgagactgccctggctgaacagaagccagaccgtggtggaggagtacctggccttcctgggcaacctggtgagcgcccagaccgtgttcctgagaccctgcctgagcatgatcgccagccacttcgtgccccccagagtgatcatcaaggagggcgacgtggacgtgagcgacagcgacgacgaggacgacaacctgcccgccaacttcgacaccagccagagcctggccaacaacagcaagatctgcaccatcgagtgctacgtgcacaacctgctgagaatcagcgtgtacttccccaccctgagacacgagatcctggagctgatcatcgagaagctgctgaagctggacgtgaacgccagcagacagggcatcgaggacgccgaggagaccgccaaccagacctgcggcggcaccgacagcaccgagggcctgtgcaacatgggcttcgccgaggccttcctggagcccctgtggaagaagctgcaggaccccagcaaccccgccatcatcagacaggccgccggcaactacatcggcagcttcctggccagagccaagttcatccccctgatgatcagagagcagagacacagcgccatgctgctgagcatggaccacttcacccagcccgccaagctgtgcagcacccccctgttcctggacaccagcagcttctag

SEQ ID NO: 198467 - DNA, 1023 bp, Artificial Sequence
  derived and/or modified sequence
atggctgccccgctgctgcatacacgtttacccggtgatgccgccgcctctccttcagcagtcaaaatgctgggtgcgagcaggacaggcatcagtaatatgagagccctggagaatgatttcttcaacagcccacccagaaagacagtccaattcggtggtacagtgactgaggtgctgctgaagtataaaacaggagagactaatgacttcgagctgctaaagaatcagttgttagacccggacattaaagacgatcagatcatcaactggctcctggaatttaggtcatcaattatgtacttgactaaagattttgagcagttgatcagcattattctccgcctgccctggctgaacagatcgcagaccgttgttgaagagtatttggccttcctgggcaatctggtcagcgcccaaacggtgtttcttagaccatgcctgagtatgatcgcttctcactttgtgcctccgagagtgattatcaaggagggagatgtcgacgtttcagatagcgacgacgaggacgacaatctgcctgccaacttcgatacgtcgcaatccctggcaaacaattctaaaatctgcaccatcgagtgctatgtgcacaatctcctcaggattagcgtctattttcctacactgaggcatgaaatcctggagctgataatcgagaagttactgaaactggatgtaaatgcctctaggcagggtattgaagatgctgaggaaacggctaaccagacttgtgggggcacagatagcacagaaggcctctgcaatatgggtttcgctgaggcttttctggaaccgctttggaagaagcttcaggacccttccaatcctgcgatcattaggcaggctgccggcaactacatcggcagttttttagcaagggccaaatttattcctctcatgatacgggagcagcgacactccgccatgcttctctctatggatcactttacccagcccgcaaagctttgttcaacaccattgttcctggataccagctctttctag

SEQ ID NO: 198468 - DNA, 1023 bp, Artificial Sequence
  derived and/or modified sequence
atggccgcccccctgctgcacacccggctgcctggagatgctgctgccagccccagcgctgtgaagatgctgggcgccagcaggacaggcatcagcaacatgagggccctggagaatgacttcttcaacagcccccccaggaagacagtgcagtttggaggcaccgtgacagaggtgctgctgaagtacaagacaggagagaccaatgactttgagctgctgaagaaccagctgctggaccctgacatcaaggatgaccagatcatcaactggctgctggagttccgcagcagcatcatgtacctgaccaaggactttgagcagctgatcagcatcatcctgcggctgccctggctgaacagaagccagacagtggtggaggagtacctggccttcctgggcaacctggtgtctgcccagacagtgttcctgcggccctgcctgtccatgattgccagccactttgtgccccccagggtcatcatcaaggagggagatgtggatgtgtctgacagtgatgatgaagatgacaacctgcctgccaactttgacaccagccagagcctggccaacaacagcaagatctgcaccattgaatgttatgtgcacaacctgctgcgcatctctgtgtacttccccaccctgcggcatgagatcctggagctgatcatcgagaagctgctgaagctggatgtgaatgccagccggcagggcattgaagatgctgaggagacagccaaccagacctgtggcggcacagacagcacagagggcctgtgcaacatgggctttgctgaggccttcctggagcccctgtggaagaagctgcaggaccccagcaacccagccatcatccggcaggccgccggcaactacatcggcagcttcctggcccgggccaagttcatccccctgatgatccgggagcagaggcacagcgccatgctgctgtccatggaccacttcacccagcctgccaagctgtgcagcacccccctcttcctggacaccagcagcttctag

SEQ ID NO: 198469 - DNA, 1023 bp, Artificial Sequence
  derived and/or modified sequence
atggccgcccccctgctgcacacccggctgcccggcgacgccgccgcctcacctagcgccgttaagatgctgggtgcatccaggaccggcatctcaaacatgcgggccctcgaaaatgactttttcaatagtccaccccgtaagacagtccagtttggaggaacggtgactgaggttctactaaagtataagaccggcgagaccaatgacttcgagctgctgaagaaccagctgttggaccctgatattaaagacgaccagatcatcaattggctcctggaatttcggagcagcatcatgtacctgacaaaagactttgagcaattgatatcaataattttgcgtttgccatggttgaacaggtcccaaaccgtagtggaggagtacctggcattcctgggcaatctagtgagtgctcagaccgttttcctcaggccctgtctgtctatgattgcttctcatttcgtacctcccagagttataatcaaggagggtgacgtcgacgtctcagactcagacgatgaggatgacaacctacccgccaacttcgataccagtcagtccctggccaacaactctaaaatctgcaccatcgaatgctacgtgcacaacctgctgcgcataagcgtttatttcccaacccttcgccacgaaattttggaattgattattgagaagctgctgaaactggacgtgaatgcctctaggcagggaatcgaggacgctgaggagaccgccaatcagacctgtggtggaactgatagcacagaggggttatgcaacatgggatttgctgaggctttcctggaaccactctggaagaaacttcaagatccaagcaaccctgccatcatccggcaagcggcaggtaattacatcggttctttcctcgcgcgggccaaatttatcccactcatgattcgcgagcagcgccatagcgctatgctccttagcatggatcactttacccagccggcaaagctctgttcaacaccacttttcctggataccagtagtttctag

SEQ ID NO: 198470 - DNA, 1023 bp, Artificial Sequence
  derived and/or modified sequence
atggccgctccattgctgcacacgcggcttcctggcgatgcagcagcaagtccatcggcagtcaaaatgttgggtgccagcaggaccgggattagcaacatgcgcgctctggaaaatgacttcttcaacagcccccctaggaagactgtgcaatttggcggaaccgtgacagaagtgttgctgaagtacaagaccggcgagacaaacgactttgagctgctgaaaaaccagctgttggacccggacatcaaagatgaccagatcatcaattggctgctggagtttaggagttccataatgtacttgaccaaggacttcgaacagctgatatcgatcattctgcgcttaccatggctaaacagatctcagacggtcgtagaagaatatcttgccttcctggggaatctcgtttcagcccagacagtcttcttgcgcccttgtctcagcatgatcgccagtcatttcgtgcccccaagggtcataatcaaagaaggcgatgttgacgtgtccgacagcgacgatgaggacgataatcttccggcaaacttcgacacaagccagagtctggccaacaactccaagatctgcaccattgagtgttatgtccataatcttctgcgcattagtgtgtattttccaacacttagacacgaaatactggagcttatcatcgaaaaactgctgaaactggatgtgaatgccagtagacaaggcattgaggatgctgaagaaactgccaatcagacatgcgggggtaccgattccacggaaggattgtgtaatatgggttttgcagaggcatttctggaaccactctggaagaaacttcaggacccgtctaaccccgctattattagacaggccgctggtaactacataggtagcttcctggctcgcgcaaaattcatccccctgatgattagggagcagaggcattcggctatgttgctctcgatggatcacttcacccagcccgcaaagctgtgctctactcccttatttcttgacacgtcttccttctag

SEQ ID NO: 198471 - DNA, 978 bp, Artificial Sequence
  derived and/or modified sequence
agttcggcccaatggcggcaccgctgcttcacacgcgtttgccgggagatgcggccgcttcgccctctgcagtcaagatgctgggcgcgtcgaggactgggatttcaaatatgcgtgcattagagaatgattttttcaattctcccccaagaaaaactgttcagtttggtggaactgtgacagaagtcttgctgaagtacaaaacgggtgaaacaaatgactttgagttgttgaagaaccagctgttagatccagacataaaggatgaccagatcatcaactggctgctagaattccgttcttctatcatgtacttgacaaaagactttgagcaacttatcagtattatattgagattgccttggttgaatagaagtcaaacagtagtggaagagtatttggcttttcttggtaatcttgtatcagcacagactgttttcctcagaccgtgtctcagcatgattgcttcccattttgtgcctccccgagtgatcattaaggaaggcgatgtagatgtttcagattctgatgatgaagatgataatcttcctgcaaattttgacacgtcacagagccttgcaaataatagcaagatatgtaccattgacaccgtggtttctcatgccaatactggtggaaaaatttccatttgttcgaaaatcagagagaacactggaatgttacgttcataacttactaaggattagtgtatattttccaaccttgaggcatgaaattctggagcttattattgaaaaactactcaagttggatgtgaatgcatcccggcagggtattgaagatgctgaagaaacagcaaatcaaacttgtggtgggacagattccacggaaggattgtgtaatatggttagcagtttattaatgaaagtggagatgaagtttatcataatcaaagggtggaaacagctagtgctgctcatctttggattcgcagaggcatttttggaacctctttgg

SEQ ID NO: 198472 - DNA, 1214 bp, Artificial Sequence
  derived and/or modified sequence
gtcgctcttttgttggtctggctgacttctgttcctcttttaaaaatttaagtttggccgggtgcggtggctcacggggcccctgattgtctgaaggttgcgctggcacgcgcaacttccgggacagaggctgtggctggaaggagctgggcatccggcctgaggcgcagcggtcgcgttagttcggcccaatggcggcaccgctgcttcacacgcgtttgccgggagatgcggccgcttcgccctctgcagtcaagatgctgggcgcgtcgaggactgggatttcaaatatgcgtgcattagagaatgattttttcaattctcccccaagaaaaactgttcagtttggtggaactgtgacagaagtcttgctgaagtacaaaacgggtgaaacaaatgactttgagttgttgaagaaccagctgttagatccagacataaaggatgaccagatcatcaactggctgctagaattccgttcttctatcatgtacttgacaaaagactttgagcaacttatcagtattatattgagattgccttggttgaatagaagtcaaacagtagtggaagagtatttggcttttcttggtaatcttgtatcagcacagactgttttcctcagaccgtgtctcagcatgattgcttcccattttgtgcctccccgagtgatcattaaggaaggcgatgtagatgtttcagattctgatgatgaagatgataatcttcctgcaaattttgacacgtcacagagccttgcaaataatagcaagatatgtaccattgaatgttacgttcataacttactaaggattagtgtatattttccaaccttgaggcatgaaattctggagcttattattgaaaaactactcaagttggatgtgaatgcatcccggcagggtattgaagatgctgaagaaacagcaaatcaaacttgtggtgggacagattccacggaaggattgtgtaatatgggattcgcagaggcatttttggaacctctttggaaaaaattgcaggatccaagtaatcctgccatcatcaggcaggctgctggaaattatattggaagctttttggcaagagctaaatttattcctcttatgattcgggaacaaaggcattctgcgatgttgctctccatggaccattttactcagcctgccaagctgtgttctacacctttgtttttagacacaagcagcttttga

SEQ ID NO: 198473 - DNA, 681 bp, Artificial Sequence
  derived and/or modified sequence
atggccgctccactgcttcatacccgactcccaggagacgctgccgctagcccttcagccgtgaaaatgctgggagcctctcgcactgggatttctaacatgcgagctctcgagaatgactttttcaattcgcctccaaggaagactgtgcagtttgggggcaccgtgacagaggtgctcttgaaatataagaccggcgaaactaacgatttcgaacttctgaaaaaccaattgctggacccggacatcaaagacgatcagatcatcaattggctgctggaattccgtagctccatcatgtatctcacgaaagatttcgagcaattgatttccatcattcttcgtctgccttggttaaataggtcccagactgtagtggaggagtatttagcatttctgggaaatctggtgtcagcccagacagtgtttctcagaccatgcttgagcatgattgctagccacttcgtaccccccagagtaattattaaggagggggacgtcgacgtcagcgatagcgacgatgaagacgataacttgccggccaactttgacacctcacagtctctcgccaataatagcaagatttgtacaattgacaccgtggtctctcacgctaatacaggtggaaaaatctccatctgttccaagatccgggaaaatacagggatgttgcgatcttag

SEQ ID NO: 198474 - DNA, 1956 bp, Artificial Sequence
  derived and/or modified sequence
atggcagcccctctcctacatacacgactgcctggcgacgccgccgcgagctcttcagctgtaaaaaaacttggggcctctcgcaccggtatttcaaacatgagggccctagagaacgatttttttaattctccccccaggaagaccgtgcggttcggcggaaccgtaacagaagtgctgctcaagtacaagaagggcgaaactaacgattttgaactattgaagaaccaacttttagatccagatataaaggatgatcagattatcaactggcttctcgagtttagatcctcgattatgtatctgactaaagattttgagcagctcatatcaatcatcttgagattaccatggcttaaccggtcccaaacagtggttgaggaatatctcgctttcctgggcaatttggtgtcagctcagacagtattcctgcgcccctgtctgagtatgatcgcaagccactttgtgcccccgagagtgataattaaggagggggacgttgacgtgagcgactccgacgatgaggacgataaccttccagcaaacttcgacacctgtcatcgagcgctacaaatcatcgcacggtatgtgccctcaacaccctggttcctgatgcctatattagtagagaagtttcctttcgtgcgaaaatccgagagaacccttgagtgctacgttcacaatcttctcaggatatcagtttatttcccgacactacgtcatgagatattggagctaattatcgagaaactgctgaagttggacgttaacgcaagcagacagggtatcgaagacgccgaagaaactgcaactcaaacgtgcggtggcacagactcgaccgagggattattcaatatggatgaagacgaggaaacagagcacgagacaaaggcaggacccgaaaggctggaccagatggtgcacccagttgcggagcgccttgacattttaatgtcccttgtgttatcttacatgaaagatgtctgctatgtcgacgggaaagtcgataacggcaagaccaaggatttgtatcgcgaccttatcaatatctttgacaaactcctgctgccgactcatgctagctgccacgttcagttcttcatgttttatctatgttcgttcaaactagggtttgcagaagcttttcttgagcacctgtggaaaaaactgcaagatccctcaaaccccgcgatcatcaggcaggccgccggaaattatataggctcattcctggccagggcaaaattcattcctctgatcacggtaaagagctgcctggatctgttggtgaactggctgcacatctacctgaacaatcaggactctgggacgaaggcattttgcgacgtagccctccatggtcccttctattctgcttgtcaagccgtgttctacacattcgtgtttcgccacaaacaactgctatctggtaacctgaaagaaggcctccagtacctgcagagcttaaactttgagcgtatagtcatgagccaactgaacccactgaaaatttgcctcccatccgtggtgaacttttttgccgctataacaaataagtaccagctcgtgttctgctacaccattattgagaggaataacagacagatgcttccagttatcagaagcacagctggaggtgattctgtgcagatatgcacaaaccccctggatacctttttcccttttgatccatgcgtgcttaagagatccaagaagtttatcgatccaatataccaggtctgggaagacatgtctgccgaagagctgcaggagttcaaaaagcccatgaagaaggacatcgtggaggacgaggatgatgatttcctgaaaggcgaagtgcctcaaaacgacaccgtgattgggataaccccgagctcgttcgatactcactttcgctccccatcctccagcgtggggtcacctccagttctatatatgcagccctctcccctatag

SEQ ID NO: 198475 - DNA, 1857 bp, Artificial Sequence
  derived and/or modified sequence
atgagagccctggaaaacgatttcttcaactcccctccaagaaagaccgtgcgctttggcggtacagtgactgaggtcctgctgaaatataagaagggcgaaactaacgatttcgaactgctgaaaaatcagttactcgaccctgacattaaagatgatcagattatcaattggcttctcgaatttagaagcagcattatgtaccttacaaaggacttcgaacaactgattagtatcattctacgacttccttggctaaaccggtctcagacagtggttgaggagtacctggcgttccttggcaatctggtctccgcccagacagtgtttttaaggccttgtctgtctatgatagcttcacattttgtgcccccacgagtaataatcaaagaaggggacgtggatgttagtgacagtgacgacgaggatgataatcttcccgcaaatttcgatacgtgccacagagcactgcagattatcgcacgctatgtccctagcactccctggtttctgatgccgattctggtggaaaaatttccttttgtgcggaagtctgagcggacactggagtgctatgtgcataatctactgcgaatttccgtctattttcctactctgcgacacgagatcctggagctcatcatcgaaaagttgctcaaactagatgtaaatgcttcccggcagggaattgaggacgccgaggaaaccgccacccagacctgcggcggaaccgactcaaccgaagggctgttcaatatggatgaggacgaagaaacagagcatgaaactaaggctggtcctgaacgcttggatcagatggtgcacccggtggcggagagactcgatatactcatgagtttggtgctgagctacatgaaagacgtttgctacgtggacggaaaggtggataatggcaagactaaggatctgtatcgcgacctgattaatatctttgacaaacttctgctacctacgcatgcgtcttgtcacgttcagttctttatgttttatctctgcagcttcaagctcggcttcgctgaggcgtttcttgagcacctgtggaaaaagctgcaggaccctagtaatccagcaatcatccgacaggctgccggaaattacatcggctctttcttggctagggcaaaatttatccccctgataaccgttaaatcgtgtcttgatttgctcgtgaactggctacatatatacttaaacaatcaagacagcgggactaaggccttctgtgacgtggccctgcatggcccattttactcagcctgccaggcagttttttacacttttgtctttcgtcataaacagctgctctctggtaacttgaaggaaggtcttcagtatttgcagagtcttaactttgaaaggatagtgatgtctcagcttaatcctctgaagatatgcttgcctagcgtggtgaatttctttgctgcgattacaaataagtaccagctggtgttctgctacaccatcatcgaaaggaataaccgccagatgctgcctgtaataaggtccaccgcagggggggattccgtgcagatctgcactaacccactggacactttttttccattcgacccctgcgttctaaaaaggtcgaagaaatttatcgaccccatctaccaggtgtgggaagacatgtctgccgaggaactccaggagttcaaaaagccgatgaaaaaagatatcgttgaggatgaggatgatgactttttgaaaggagaagtcccccagaacgacaccgtaataggcatcacgccatcttcttttgacacccactttaggagcccttcttcttcagtgggctcaccgccagttctttatatgcagccctcccctctttag

SEQ ID NO: 198476 - DNA, 681 bp, Artificial Sequence
  derived and/or modified sequence
atggccgcccccctgctgcacacccggctgcctggagatgctgctgccagccccagcgctgtgaagatgctgggcgccagcaggacaggcatcagcaacatgagggccctggagaatgacttcttcaacagcccccccaggaagacagtgcagtttggaggcaccgtgacagaggtgctgctgaagtacaagacaggagagaccaatgactttgagctgctgaagaaccagctgctggaccctgacatcaaggatgaccagatcatcaactggctgctggagttccgcagcagcatcatgtacctgaccaaggactttgagcagctgatcagcatcatcctgcggctgccctggctgaacagaagccagacagtggtggaggagtacctggccttcctgggcaacctggtgtctgcccagacagtgttcctgcggccctgcctgtccatgattgccagccactttgtgccccccagggtcatcatcaaggagggagatgtggatgtgtctgacagtgatgatgaagatgacaacctgcctgccaactttgacaccagccagagcctggccaacaacagcaagatctgcaccatcgacacagtggtgagccacgccaacacaggaggcaagatcagcatctgcagcaagatcagagaaaatacaggcatgctgcggagctag

SEQ ID NO: 198477 - DNA, 1956 bp, Artificial Sequence
  derived and/or modified sequence
atggccgcccccctgctgcacacccggctgcctggagatgctgctgccagcagcagcgctgtgaagaagctgggcgccagcaggacaggcatcagcaacatgagggccctggagaatgacttcttcaacagcccccccaggaagacagtgcgctttggaggcaccgtgacagaggtgctgctgaagtacaagaagggggagaccaatgactttgagctgctgaagaaccagctgctggaccctgacatcaaggatgaccagatcatcaactggctgctggagttccgcagcagcatcatgtacctgaccaaggactttgagcagctgatcagcatcatcctgcggctgccctggctgaacagaagccagacagtggtggaggagtacctggccttcctgggcaacctggtgtctgcccagacagtgttcctgcggccctgcctgtccatgattgccagccactttgtgccccccagggtcatcatcaaggagggagatgtggatgtgtctgacagtgatgatgaagatgacaacctgcctgccaactttgacacctgccaccgggccctgcagatcatcgcccgctacgtgcccagcaccccctggttcctgatgcccatcctggtggagaagttcccctttgtgaggaagtctgagaggaccctggagtgctacgtgcacaacctgctgcgcatctctgtgtacttccccaccctgcggcatgagatcctggagctgatcatcgagaagctgctgaagctggatgtgaatgccagccggcagggcattgaagatgctgaggagacagccacccagacctgtggcggcacagacagcacagagggcctcttcaacatggatgaagatgaggagacagagcacgagaccaaggccggccctgagcggctggaccagatggtgcaccctgtggccgagcggctggacatcctgatgagcctggtgctgagctacatgaaggatgtgtgctacgtggatggcaaggtggacaatggcaagaccaaggacctgtacagagacctgatcaacatctttgacaagctgctgctgcccacccacgccagctgccacgtgcagttcttcatgttctacctgtgcagcttcaagctgggctttgctgaggccttcctggagcacctgtggaagaagctgcaggaccccagcaacccagccatcatccggcaggccgccggcaactacatcggcagcttcctggcccgggccaagttcatccccctcatcaccgtgaagagctgcctggacctgctggtgaactggctgcacatctacctgaacaaccaggacagcggcaccaaggccttctgtgatgtggccctgcacggccccttctacagcgcctgccaggccgtgttctacacctttgtgttccgccacaagcagctgctgagcggcaacctgaaggagggcctgcagtacctgcagagcctgaactttgagcgcatcgtgatgagccagctgaaccccctgaagatctgcctgcccagcgtggtgaacttctttgctgccatcaccaacaagtaccagctggtgttctgctacaccatcattgaaagaaacaaccggcagatgctgcccgtcatccgcagcacagctggaggagacagcgtgcagatctgcaccaaccccctggacaccttcttcccctttgacccctgtgtgctgaagaggagcaagaagttcatcgaccccatctaccaggtgtgggaggacatgtctgctgaggagctgcaggagttcaagaagcccatgaagaaggacatcgtggaggatgaagatgatgacttcctgaagggggaggtgccccagaatgacaccgtcatcggcatcacccccagcagctttgacacccacttccgcagccccagcagctctgtgggcagcccccctgtgctgtacatgcagcccagccccctgtag

SEQ ID NO: 198478 - DNA, 1857 bp, Artificial Sequence
  derived and/or modified sequence
atgagggccctggagaatgacttcttcaacagcccccccaggaagacagtgcgctttggaggcaccgtgacagaggtgctgctgaagtacaagaagggggagaccaatgactttgagctgctgaagaaccagctgctggaccctgacatcaaggatgaccagatcatcaactggctgctggagttccgcagcagcatcatgtacctgaccaaggactttgagcagctgatcagcatcatcctgcggctgccctggctgaacagaagccagacagtggtggaggagtacctggccttcctgggcaacctggtgtctgcccagaccgtcttcctgcggccctgcctgtccatgattgccagccactttgtgccccccagggtcatcatcaaggagggagatgtggatgtgtctgacagtgatgatgaagatgacaacctgcctgccaactttgacacctgccaccgggccctgcagatcatcgcccgctacgtgcccagcaccccctggttcctgatgcccatcctggtggagaagttcccctttgtgaggaagtctgagaggaccctggagtgctacgtgcacaacctgctgcgcatctctgtgtacttccccaccctgcggcatgagatcctggagctgatcatcgagaagctgctgaagctggatgtgaatgccagccggcagggcattgaagatgctgaggagacagccacccagacctgtggcggcacagacagcacagagggcctcttcaacatggatgaagatgaggagacagaacatgagaccaaggccggccctgagcggctggaccagatggtgcaccctgtggccgagcggctggacatcctgatgagcctggtgctgagctacatgaaggatgtgtgctacgtggatggcaaggtggacaacgggaagaccaaggacctgtacagagacctgatcaacatctttgacaagctgctgctgcccacccacgccagctgccacgtgcagttcttcatgttctacctgtgcagcttcaagctgggctttgctgaggccttcctggagcacctgtggaagaagctgcaggaccccagcaacccagccatcatccggcaggccgccggcaactacatcggcagcttcctggcccgggccaagttcatccccctcatcaccgtgaagagctgcctggacctgctggtgaactggctgcacatctacctgaacaaccaggacagcggcaccaaggccttctgtgatgtggccctgcacggccccttctacagcgcctgccaggccgtgttctacacctttgtgttccgccacaagcagctgctgagcggcaacctgaaggagggcctgcagtacctgcagagcctgaactttgaaagaattgtgatgagccagctgaaccccctgaagatctgcctgcccagcgtggtgaacttctttgctgccatcaccaacaagtaccagctggtgttctgctacaccatcatcgagaggaacaaccggcagatgctgcctgtgatccgcagcacagctggaggagacagcgtgcagatctgcaccaaccccctggacaccttcttcccctttgacccctgtgtgctgaagaggagcaagaagttcatcgaccccatctaccaggtgtgggaggacatgtctgctgaggagctgcaggagttcaagaagcccatgaagaaggacatcgtggaggatgaagatgatgacttcctgaagggggaggtgccccagaatgacacagtgattggcatcacccccagcagctttgacacccacttccgcagccccagcagctctgtgggcagcccccctgtgctgtacatgcagcccagccccctgtag

SEQ ID NO: 198479 - DNA, 681 bp, Artificial Sequence
  derived and/or modified sequence
atggccgcccccctgctgcacacccggctgcccggcgacgccgccgcaagtcccagcgccgtcaaaatgttgggcgcatcaaggaccggcatctctaacatgcgcgctttagaaaacgatttctttaactcccctccaaggaagactgtacagtttggaggaactgtaacagaagtgttgctcaagtacaagacaggcgaaactaatgacttcgaactcctgaagaatcagctcttggaccccgacattaaggacgaccagatcatcaactggctattagagttcagatcctccatcatgtatctcaccaaagactttgagcagctgatctctatcattctgaggctaccttggctgaacagaagtcaaacagtcgtggaagagtacttggcttttttaggcaacctcgtgtcggcccaaactgtgttccttcgaccttgtctgagtatgattgccagtcacttcgttccaccacgggtcatcattaaagagggagacgtcgacgtgtcagattcagacgatgaggacgacaacctgccagctaatttcgatacttcccagtccttagcgaacaattccaaaatttgtactatagacacggtggtgtcccatgctaatactggcggaaaaattagtatttgttccaaaatccgcgaaaacacaggaatgctccgatcgtag

SEQ ID NO: 198480 - DNA, 1956 bp, Artificial Sequence
  derived and/or modified sequence
atggccgcccccctgctgcacacccggctgcccggcgacgccgccgcatcatcaagcgctgtgaagaaattgggagccagccgcaccgggatttcaaatatgcgcgcattggagaacgacttctttaatagtccccccagaaagactgtgaggtttggggggaccgtcacggaggtgctccttaagtataaaaagggtgagacaaacgattttgagctgctgaagaatcagttacttgatccagacatcaaggacgaccagatcataaactggttgttggaattccggtcatctatcatgtatctaaccaaagattttgaacaactgatctctatcatcctaaggctgccgtggctcaataggtcccagaccgtagtggaggagtacttagcatttctggggaatttggtctccgcacagaccgtcttcttgcggccgtgtttgtccatgatcgcctcccacttcgtccctcccagagtgatcatcaaggaaggcgatgtcgacgtgagtgattccgatgacgaagacgacaatctgcccgcgaactttgatacctgccatcgcgccctgcaaattatagcacgctatgtgccgagtactccctggtttcttatgccaatattggtggaaaagttccctttcgtgcggaagtcggagcgcacgctggaatgctacgtgcacaacttactgaggatctcagtgtacttccccacattaagacacgaaatccttgagctgatcatcgaaaagctgttgaagctcgacgtcaacgcaagcagacagggcatagaagacgccgaagaaacggctacgcagacctgtgggggtaccgatagcactgaaggtctgtttaatatggatgaggatgaggagacagagcatgaaaccaaggctggccctgaaaggctggaccagatggtgcaccccgtcgctgagcggctagatattctgatgtcactggtgctgtcttatatgaaagatgtctgttatgttgacgggaaagttgacaacgggaagaccaaagacttgtacagagacctgattaacatattcgacaaattgctgcttcctacacacgcctcctgccatgtccagtttttcatgttctatttgtgctcatttaagttgggatttgctgaagcttttctggagcacctgtggaaaaaactgcaggatccttctaatcccgccatcatccgacaggcagcaggaaactacattggttcatttttagctagagctaagtttattcctctgattactgttaaatcttgtctggacctactggtgaactggctgcatatctatctgaacaatcaagactctgggactaaggctttctgcgacgttgccctccatggtcccttctattcagcgtgtcaagcggtcttctacacgtttgtattcaggcacaagcagttgctgagtggtaatctgaaggagggactgcaatatctgcagagcctgaatttcgagaggattgtcatgtcgcagcttaaccctttgaaaatctgtctgccctcagtggtaaatttcttcgcagcgataaccaacaaataccaactggtcttctgttatacaatcatagagcggaacaaccggcagatgctccctgtgataagatccacggcaggaggtgattctgtgcagatctgtactaaccccctggatacctttttccctttcgacccatgcgtgctaaagcgaagcaagaagtttatcgacccaatttatcaggtctgggaggacatgtctgccgaagaattacaggaatttaaaaagccaatgaaaaaggacatcgtggaagacgaggacgacgactttcttaagggggaagtgcctcagaatgacacggtgatagggatcacaccgtcctcattcgatactcactttcgctccccttcaagctccgtgggctccccaccagtgttgtacatgcagccctccccattgtag

SEQ ID NO: 198481 - DNA, 1857 bp, Artificial Sequence
  derived and/or modified sequence
atgcgggccctggagaacgacttcttcaacagccccccccggaagaccgtacgttttggcggaacggtcacggaagttctgctgaagtacaaaaagggagagactaatgatttcgaactactgaagaatcagttgctggatccagatattaaagatgaccagatcataaactggctcctggaattccggtctagcatcatgtatcttacgaaagactttgaacagctgatctcaataattttaagactcccttggctaaaccgcagccaaacagtggtcgaggagtacctggctttcctcggtaatctggtttctgcccagaccgtttttctacgcccctgccttagtatgatcgcttctcacttcgttccccctcgggtgatcatcaaggagggagacgtcgatgtgtctgattcagatgacgaggacgacaacctgccggcaaactttgacacctgccaccgcgcgttgcagatcatagcccgatacgtgccaagcaccccatggttccttatgccaatcctcgtggaaaagttcccctttgtccgaaaatctgagagaaccctagagtgttacgtgcacaatctgttgcgaatctccgtgtatttccctacccttaggcatgagattctggaattaattattgagaaacttttaaaactggatgtgaatgccagcagacagggcattgaggatgctgaggagacagcgacccagacatgcggtgggacagactctactgagggtctgttcaatatggatgaggatgaggagaccgaacatgagaccaaggcaggcccagaaagattagatcagatggtccatcctgtggccgaacgcctagatatcttaatgtccctagtgctgagttacatgaaagatgtttgctatgtcgatggtaaagtggataacggtaaaacaaaagatctgtaccgggacctcatcaatattttcgacaaactgcttctccctacccacgcttcctgccacgttcagttctttatgttctacctttgttcttttaaactgggttttgccgaagctttccttgaacacttgtggaagaagctacaggacccttctaatcctgctataattcgtcaagcagccggcaattatataggcagcttcctggctcgggcaaaattcatcccacttatcactgtgaaaagttgtctcgatctcctggtcaactggctgcacatctacctcaacaatcaggatagtggaactaaggcgttctgcgacgtcgcattgcatggccccttttacagtgcatgtcaggccgtgttctacacttttgtgttccggcataaacagctgctgtctggtaatctgaaggagggcctgcagtacttgcagagcctgaacttcgagcggattgtgatgagccagctcaacccgctaaaaatctgccttccatcagtggtgaacttcttcgcagcaataacaaataagtatcagcttgttttttgttacaccattattgagcgcaataaccggcagatgttaccagtcattaggtctacagccggcggcgactctgtgcaaatctgcactaaccctctcgacacctttttcccattcgacccatgcgtgctgaaaagatcaaagaagtttatcgatcccatctaccaggtatgggaagacatgtccgcagaagagctgcaggagtttaagaaacccatgaagaaagatatagtcgaagatgaagatgacgacttcctgaagggagaagttccccagaatgacaccgtgatcggcattactcccagtagttttgacacacacttccgctccccctccagttcagtgggatctccacctgtgctgtatatgcaaccctccccactctag

SEQ ID NO: 198482 - DNA, 681 bp, Artificial Sequence
  derived and/or modified sequence
atggctgccccactgctccacacccgactgcctggggatgctgccgcttctccaagcgcagtgaagatgttgggagctagccgaacaggcatctcaaatatgagagctctggaaaatgatttttttaactctcctcccagaaaaacagtacaattcgggggaaccgtaactgaagttctgctcaagtataaaaccggagagacaaacgatttcgagctccttaaaaatcagctcttggacccagacatcaaggatgaccaaattatcaattggctattagagttccggagctctatcatgtacctgacgaaggatttcgagcagctcatttctattattctgcgcctcccttggctgaatagatcccagacagtggtggaggagtatcttgcttttcttggtaacctggtgtctgcccaaacagtttttttgcgaccctgcctgagtatgatcgctagtcattttgttcctcccagagtaatcattaaagagggggacgtcgacgtgagcgactccgatgacgaagatgataacctgccagcaaacttcgacacaagtcagagcctcgctaacaactccaagatctgtacaatcgataccgtagtaagccacgcaaataccggaggcaagatcagcatctgttcgaagataagggagaataccggcatgttgaggagctag

SEQ ID NO: 198483 - DNA, 1956 bp, Artificial Sequence
  derived and/or modified sequence
atggccgctcccctgctgcatactagattacccggagacgccgcagcaagttctagcgcagtaaaaaagttgggggcatctaggactgggattagtaacatgagggcccttgaaaatgacttcttcaatagtccaccccgtaaaactgttcgctttggcggaacagtaaccgaggtgcttttgaagtataaaaaaggcgaaacaaatgacttcgagcttctgaagaaccagctcctcgatcccgacatcaaggatgatcagatcatcaactggttactggagttccgctcctcaatcatgtacctcacgaaggattttgagcagctcataagtatcatactcaggctcccctggctgaaccggagccaaaccgtcgtggaggagtatctggctttcctcggtaacctggtgtccgcacagacagtattcctgcgcccttgtttaagtatgatcgcttcgcatttcgtccccccacgagtgatcatcaaagaaggggacgtggacgtgtctgattctgatgacgaggacgacaatctaccagccaattttgacacctgccacagggccctgcaaattatcgctcggtatgtgcccagtactccctggttccttatgccaatcttagttgagaaatttccctttgtccgcaagtcagaacgcacacttgagtgttacgttcataatttgctgcggatatctgtgtacttccctactctcagacacgaaatactcgaacttataatcgaaaagcttttgaaacttgatgtgaatgccagcaggcagggcattgaagatgcggaggagaccgccacccaaacttgcggaggcaccgattcaaccgaaggactatttaatatggacgaagatgaggagaccgagcacgaaaccaaggccggtcctgaaaggctcgatcaaatggtgcaccctgtggcagagagactggacatcctcatgtccctcgtcctgtcctatatgaaggatgtctgctacgtcgatggaaaagttgataatggcaagacgaaggacttgtacagagacctcataaacatcttcgataagctgctcttgcccacgcatgcttcatgccacgttcagtttttcatgttctatttgtgttcttttaagcttggcttcgccgaggcgtttttggagcacctctggaagaaacttcaagatccatcaaaccccgcaatcattcgccaggcagctggcaactatattggctcatttctggcccgtgctaaatttataccactgatcacagtgaagagctgcctggaccttcttgtcaactggctgcacatttacttgaacaatcaagattctgggactaaagccttttgcgacgtcgcactgcatggtcccttttactccgcctgtcaagccgtcttttataccttcgtgttccggcataagcagttgctgtctgggaacctcaaagagggcttgcaatatctccaaagcctcaactttgaaagaatcgtgatgtctcagttgaaccctctgaagatctgtctgccaagtgttgtgaatttctttgcagccatcaccaataagtaccagctggttttttgttataccatcatcgagcgtaacaatagacaaatgctgccggttattcggtccactgccggtggagatagtgtgcagatctgtacaaatccactagacactttctttccttttgacccttgtgtgcttaagcggagcaaaaaatttatcgaccctatctaccaggtctgggaagacatgtccgctgaggaactgcaggaatttaaaaagcccatgaagaaggacatcgtcgaggacgaagacgacgatttcttaaagggagaggtacctcagaacgacacggtaatcggcattacgccttcctccttcgacacgcacttccgatcaccttcgagctcggtgggctcgcctccagtcttatatatgcaaccctcccccctctag

SEQ ID NO: 198484 - DNA, 1857 bp, Artificial Sequence
  derived and/or modified sequence
atgcgtgctttggagaacgatttcttcaactctcctcccagaaagacagtacgtttcgggggtaccgtgactgaggttctcctcaaatacaagaaaggcgagactaatgatttcgagctgttgaagaaccaactgcttgaccccgacataaaagacgatcagatcatcaactggttactggagttccgatcctccattatgtatctgactaaggactttgaacagctgatctccattatccttcgcctcccctggctcaacagatcacagactgtcgtcgaagaatatctcgccttcttaggaaacttagttagcgcacagactgtttttctgagaccttgcttaagtatgatagcctcccatttcgtcccccctcgcgttattattaaggaaggagacgtcgatgtgtcagatagcgacgatgaggacgataacctaccagccaatttcgacacctgtcatagggcgctgcaaatcatcgcccgatacgtcccttcaactccttggtttctgatgcccatcctggtggagaagttcccttttgttaggaaatcagagcggaccctcgaatgttacgtacacaacctgctacgcatttcagtgtacttccccactctgaggcatgaaattctggagcttatcatcgagaagcttctgaaactggatgtcaatgcttccaggcaagggatagaggacgcagaggagaccgcaactcagacatgcggcggaaccgattctacagagggcctgttcaacatggacgaagacgaagaaactgaacacgagaccaaagcaggtcccgagcggcttgatcaaatggtgcatccggtggccgaaagactggatattttaatgtccctggtgctttcttatatgaaggacgtgtgctatgttgacgggaaagttgacaacgggaagaccaaagacctctacagagatctgataaacatcttcgataagctgttactgcctacccacgcatcctgccatgtacagttcttcatgttctatctttgctcgttcaaactgggctttgctgaagcttttctggagcacctatggaaaaagctacaagatccctcaaatcccgctatcatcagacaggccgcaggaaattacataggaagctttctcgctcgtgctaaattcatcccgctcataacagtaaaatcatgtctagatcttctggtgaactggttacacatttacctaaacaatcaggactccggcaccaaagccttctgtgatgtcgctctgcatgggcctttctattccgcgtgccaagctgttttctacactttcgtgttccggcacaagcaactacttagcggcaacctgaaagagggactccagtatttgcagagtctaaattttgaacgaattgttatgtcccagttgaatcccttgaaaatctgtttgccctccgttgtgaatttctttgccgcaattaccaataaatatcagttagtgttctgttataccatcatcgagagaaacaaccggcagatgttgcccgtcatcagatctaccgctggaggggattccgtccaaatttgtactaatcccctcgacacattctttcccttcgacccatgtgtgctgaagcgaagcaagaaattcattgatcctatttatcaggtgtgggaagatatgagcgccgaagagctccaggaattcaaaaagcctatgaagaaggatatcgtggaggatgaagacgatgactttctcaaaggagaggtcccacaaaatgacacggtgatcgggattaccccctcatccttcgatacccattttagatctccatcctccagcgtcgggagtcccccagtcttgtatatgcagccaagcccactttag

SEQ ID NO: 198485 - DNA, 3759 bp, Artificial Sequence
  derived and/or modified sequence
cgcaacttccgggacagaggctgtggctggaaggagctgggcatccggcctgaggcgcagcggtcgcgttagttcggcccaatggcggcaccgctgcttcacacgcgtttgccgggagatgcggccgcttcgtcctctgcagttaagaagctgggcgcgtcgaggactgggatttcaaatatgcgtgcattagagaatgactttttcaattctcccccaagaaaaactgttcggtttggtggaactgtgacagaagtcttgctgaagtacaaaaagggtgaaacaaatgactttgagttgttgaagaaccagctgttagatccagacataaaggatgaccagatcatcaactggctgctagaattccgttcttctatcatgtacttgacaaaagactttgagcaacttatcagtattatattaagattgccttggttgaatagaagtcaaacagtagtggaagagtatttggcttttcttggtaatcttgtatcagcacagactgttttcctcagaccgtgtctcagcatgattgcttcccattttgtgcctccccgagtgatcattaaggaaggcgatgtagatgtttcagattctgatgatgaagatgataatcttcctgcaaattttgacacatgtcacagagccttgcaaataatagcaagatatgtaccatcgacaccgtggtttctcatgccaatactggtggaaaaatttccatttgttcgaaaatcagagagaacactggaatgttacgttcataacttactaaggattagtgtatattttccaaccttgaggcatgaaattctggagcttattattgaaaaactactcaagttggatgtgaatgcatcccggcagggtattgaagatgctgaagaaacagcaactcaaacttgtggtgggacagattccacggaaggattgtttaatatggatgaagatgaagaaactgaacatgaaacaaaggctggtcctgaacggctcgaccagatggtgcatcctgtagccgagcgcctggacatcctgatgtctttggttttgtcctacatgaaggatgtctgctatgtagatggtaaggttgataacggcaaaacaaaggatctatatcgcgacctgataaacatctttgacaaactcctgttgcccacccatgcctcctgccatgtacagtttttcatgttttacctctgtagtttcaaattgggattcgcagaggcatttttggaacatctctggaaaaaattgcaggacccaagtaatcctgccatcatcaggcaggctgctggaaattatattggaagctttttggcaagagctaaatttattcctcttattactgtaaaatcatgcctagatcttttggttaactggctgcacatataccttaataaccaggattcgggaacaaaggcattctgcgatgttgctctccatggaccattttactcagcctgccaagctgtgttctacacctttgtttttagacacaagcagcttttgagcggaaacctgaaagaaggtttgcagtatcttcagagtctgaattttgagcggatagtgatgagccagctaaatcccctgaagatttgcctgccctcagtggttaacttttttgctgcaatcacaaataagtaccagctcgtcttctgctacaccatcattgagaggaacaatcgccagatgctgccagtcattaggagtaccgctggaggagactcagtgcagatctgcacaaacccgctggacaccttcttcccctttgatccctgtgtgctgaagaggtcaaagaaattcattgatcctatttatcaggtgtgggaagacatgagtgctgaagagctacaggagttcaagaaacccatgaaaaaggacatagtggaagatgaagatgatgactttctgaaaggcgaagtgccccagaatgataccgtgattgggatcacaccaagctcctttgacacgcatttccgaagtccttcaagtagtgtgggctccccacccgtgttgtacatgcaacccagtcccctctgacggcagaaatttgtgactgagatgtgacatttgggattccccatcacttgtcatgccctcagcacccagcttgtgccattgggcattgatggcattgaactagagcgagtgcctgcctcggctgtggcacttccaggttcgactgaatcaagcatctgaagactgggtttttttgttgttgttgttccccttacagacaaaatgaagactatcatgtgcaatcttttacagtggggttgatgatacatttggaaggatttgcttgtttaatatgtacattttttgtgttaacagctttttgacacaattactgggtaatttctaatataggcagcagactgttttacgggttgctgttttaacatgggtttttgtcagatccatggtcttaggacttgactgatgagctttcagtgaagaatcctctaagataaaacttctatttaaagactttaactagaaagtgtttattttggctacattgttcaccttctgctgtattggtatttgtctgttgggatttcaagggagtgtagagaagacagaaggaaagctgagagctggcccgacatggtctgggacacagagttggagctggcactgaagatctccagggacttcagagaccaataaaagcccatagggaagagagagaggatatagggaaacagaatcagatgtgtaatatacttggcacagcgaaaaaatggatttaaaagacaaaaatggaggtccaggtagatgtaattcacacagactgaaagtgagttcgggcttgtgtaaaacacatgagattggatttgaccccttggctctcaagtgtccccttagatctagaactgctccttggtggccattagatcgagtcagttttgatctgcatcacttagttattgggaatttctttgttggaaacaggaaaatttttttagattatttggtgtacggttttgctcacaacaataggtggaagttgctagtgcagtcttggtctgatggctgtgtgcatcgcacattcggcttggtgaaatccttctctaaagcctctttttgtatttttataactaaacagaggaagtcttcagaagacctcgctttaaaacaaatttgtgcaaacactgctagagtcattttgaagctcaagcattttcactttgtttcttacatgtgtacttttttgtttacttgtgaaaatggccatctttaagcatatttattttctgccactttatttaaaggcaagcaatattttcttgatcataaatattttgtaatgaaatacttcctcttttccagggctttgtatgcacttgtataattacattgatggcaatgtagagtttgaatttcagtctgtaaatacttttttggaaaatagaaatttttattgctttaaagttttggatatgggtggttttcttttccgggtttggtggaaagtaatttgagaactttaaggttgtctttttaactgctggcaaaatgttgattttttaatattagataaaacgagtaaacgaaattccccagaaattagtagtaagtggggtctttgtgggttgggaagtagttttaatgtagaaagacatttacatataagtctgtttaatttcaaaggagtttgtgaaaaaaaatccatggtgaaaatgaaacaatgacatggttaatctggaacttacgttcttataccaataaaaggtacctcaatacatgttctttcaa

SEQ ID NO: 198486 - DNA, 2039 bp, Artificial Sequence
  derived and/or modified sequence
acagaaatgagctcattcctcctaactgggtaatagacatgggtggggcctggaaaagatttcaaatatgcgtgcattagagaatgactttttcaattctcccccaagaaaaactgttcggtttggtggaactgtgacagaagtcttgctgaagtacaaaaagggtgaaacaaatgactttgagttgttgaagaaccagctgttagatccagacataaaggatgaccagatcatcaactggctgctagaattccgttcttctatcatgtacttgacaaaagactttgagcaacttatcagtattatattaagattgccttggttgaatagaagtcaaacagtagtggaagagtatttggcttttcttggtaatcttgtatcagcacagactgttttcctcagaccgtgtctcagcatgattgcttcccattttgtgcctccccgagtgatcattaaggaaggcgatgtagatgtttcagattctgatgatgaagatgataatcttcctgcaaattttgacacatgtcacagagccttgcaaataatagcaagatatgtaccatcgacaccgtggtttctcatgccaatactggtggaaaaatttccatttgttcgaaaatcagagagaacactggaatgttacgttcataacttactaaggattagtgtatattttccaaccttgaggcatgaaattctggagcttattattgaaaaactactcaagttggatgtgaatgcatcccggcagggtattgaagatgctgaagaaacagcaactcaaacttgtggtgggacagattccacggaaggattgtttaatatggatgaagatgaagaaactgaacatgaaacaaaggctggtcctgaacggctcgaccagatggtgcatcctgtagccgagcgcctggacatcctgatgtctttggttttgtcctacatgaaggatgtctgctatgtagatggtaaggttgataacggcaaaacaaaggatctatatcgcgacctgataaacatctttgacaaactcctgttgcccacccatgcctcctgccatgtacagtttttcatgttttacctctgtagtttcaaattgggattcgcagaggcatttttggaacatctctggaaaaaattgcaggacccaagtaatcctgccatcatcaggcaggctgctggaaattatattggaagctttttggcaagagctaaatttattcctcttattactgtaaaatcatgcctagatcttttggttaactggctgcacatataccttaataaccaggattcgggaacaaaggcattctgcgatgttgctctccatggaccattttactcagcctgccaagctgtgttctacacctttgtttttagacacaagcagcttttgagcggaaacctgaaagaaggtttgcagtatcttcagagtctgaattttgagcggatagtgatgagccagctaaatcccctgaagatttgcctgccctcagtggttaacttttttgctgcaatcacaaataagtaccagctcgtcttctgctacaccatcattgagaggaacaatcgccagatgctgccagtcattaggagtaccgctggaggagactcagtgcagatctgcacaaacccgctggacaccttcttcccctttgatccctgtgtgctgaagaggtcaaagaaattcattgatcctatttatcaggtgtgggaagacatgagtgctgaagagctacaggagttcaagaaacccatgaaaaaggacatagtggaagatgaagatgatgactttctgaaaggcgaagtgccccagaatgataccgtgattgggatcacaccaagctcctttgacacgcatttccgaagtccttcaagtagtgtgggctccccacccgtgttgtacatgcaacccagtcccctctgacggcagaaatttgtgactgagatgtgacatttgggattccccatcacttgtcatgccctcagcacccagcttgtgccattgggcattgatggcattgaactagagcgagtgcctg

SEQ ID NO: 198487 - DNA, 1557 bp, Artificial Sequence
  derived and/or modified sequence
acaaaagactttgagcaacttatcagtattatattaagattgccttggttgaatagaagtcaaacagtagtggaagagtatttggcttttcttggtaatcttgtatcagcacagactgttttcctcagaccgtgtctcagcatgattgcttcccattttgtgcctccccgagtgatcattaaggaaggcgatgtagatgtttcagattctgatgatgaagatgataatcttcctgcaaattttgacacatgtcacagagccttgcaaataatagcaagatatgtaccatcgacaccgtggtttctcatgccaatactggtggaaaaatttccatttgttcgaaaatcagagagaacactggtgaatgcatcccggcagggtattgaagatgctgaagaaacagcaactcaaacttgtggtgggacagattccacggaaggattgtttaatatggatgaagatgaagaaactgaacatgaaacaaaggctggtcctgaacggctcgaccagatggtgcatcctgtagccgagcgcctggacatcctgatgtctttggttttgtcctacatgaaggatgtctgctatgtagatggtaaggttgataacggcaaaacaaaggatctatatcgcgacctgataaacatctttgacaaactcctgttgcccacccatgcctcctgccatgtacagtttttcatgttttacctctgtagtttcaaattgggattcgcagaggcatttttggaacatctctggaaaaaattgcaggacccaagtaatcctgccatcatcaggcaggctgctggaaattatattggaagctttttggcaagagctaaatttattcctcttattactgtaaaatcatgcctagatcttttggttaactggctgcacatataccttaataaccaggattcgggaacaaaggcattctgcgatgttgctctccatggaccattttactcagcctgccaagctgtgttctacacctttgtttttagacacaagcagcttttgagcggaaacctgaaagaaggtttgcagtatcttcagagtctgaattttgagcggatagtgatgagccagctaaatcccctgaagatttgcctgccctcagtggttaacttttttgctgcaatcacaaataagtaccagctcgtcttctgctacaccatcattgagaggaacaatcgccagatgctgccagtcattaggagtaccgctggaggagactcagtgcagatctgcacaaacccgctggacaccttcttcccctttgatccctgtgtgctgaagaggtcaaagaaattcattgatcctatttatcaggtgtgggaagacatgagtgctgaagagctacaggagttcaagaaacccatgaaaaaggacatagtggaagatgaagatgatgactttctgaaaggcgaagtgccccagaatgataccgtgattgggatcacaccaagctcctttgacacgcatttccgaagtccttcaagtagtgtgggctccccacccgtgttgtacatgcaacccagtcccctctgacggcag

SEQ ID NO: 198488 - DNA, 681 bp, Artificial Sequence
  derived and/or modified sequence
atggccgcccccctgctgcacaccagactgcccggcgacgccgccgccagccccagcgccgtgaagatgctgggcgccagcagaaccggcatcagcaacatgagagccctggagaacgacttcttcaacagcccccccagaaagaccgtgcagttcggcggcaccgtgaccgaggtgctgctgaagtacaagaccggcgagaccaacgacttcgagctgctgaagaaccagctgctggaccccgacatcaaggacgaccagatcatcaactggctgctggagttcagaagcagcatcatgtacctgaccaaggacttcgagcagctgatcagcatcatcctgagactgccctggctgaacagaagccagaccgtggtggaggagtacctggccttcctgggcaacctggtgagcgcccagaccgtgttcctgagaccctgcctgagcatgatcgccagccacttcgtgccccccagagtgatcatcaaggagggcgacgtggacgtgagcgacagcgacgacgaggacgacaacctgcccgccaacttcgacaccagccagagcctggccaacaacagcaagatctgcaccatcgacaccgtggtgagccacgccaacaccggcggcaagatcagcatctgcagcaagatcagagagaacaccggcatgctgagaagctag

SEQ ID NO: 198489 - DNA, 1956 bp, Artificial Sequence
  derived and/or modified sequence
atggccgcccccctgctgcacaccagactgcccggcgacgccgccgccagcagcagcgccgtgaagaagctgggcgccagcagaaccggcatcagcaacatgagagccctggagaacgacttcttcaacagcccccccagaaagaccgtgagattcggcggcaccgtgaccgaggtgctgctgaagtacaagaagggcgagaccaacgacttcgagctgctgaagaaccagctgctggaccccgacatcaaggacgaccagatcatcaactggctgctggagttcagaagcagcatcatgtacctgaccaaggacttcgagcagctgatcagcatcatcctgagactgccctggctgaacagaagccagaccgtggtggaggagtacctggccttcctgggcaacctggtgagcgcccagaccgtgttcctgagaccctgcctgagcatgatcgccagccacttcgtgccccccagagtgatcatcaaggagggcgacgtggacgtgagcgacagcgacgacgaggacgacaacctgcccgccaacttcgacacctgccacagagccctgcagatcatcgccagatacgtgcccagcaccccctggttcctgatgcccatcctggtggagaagttccccttcgtgagaaagagcgagagaaccctggagtgctacgtgcacaacctgctgagaatcagcgtgtacttccccaccctgagacacgagatcctggagctgatcatcgagaagctgctgaagctggacgtgaacgccagcagacagggcatcgaggacgccgaggagaccgccacccagacctgcggcggcaccgacagcaccgagggcctgttcaacatggacgaggacgaggagaccgagcacgagaccaaggccggccccgagagactggaccagatggtgcaccccgtggccgagagactggacatcctgatgagcctggtgctgagctacatgaaggacgtgtgctacgtggacggcaaggtggacaacggcaagaccaaggacctgtacagagacctgatcaacatcttcgacaagctgctgctgcccacccacgccagctgccacgtgcagttcttcatgttctacctgtgcagcttcaagctgggcttcgccgaggccttcctggagcacctgtggaagaagctgcaggaccccagcaaccccgccatcatcagacaggccgccggcaactacatcggcagcttcctggccagagccaagttcatccccctgatcaccgtgaagagctgcctggacctgctggtgaactggctgcacatctacctgaacaaccaggacagcggcaccaaggccttctgcgacgtggccctgcacggccccttctacagcgcctgccaggccgtgttctacaccttcgtgttcagacacaagcagctgctgagcggcaacctgaaggagggcctgcagtacctgcagagcctgaacttcgagagaatcgtgatgagccagctgaaccccctgaagatctgcctgcccagcgtggtgaacttcttcgccgccatcaccaacaagtaccagctggtgttctgctacaccatcatcgagagaaacaacagacagatgctgcccgtgatcagaagcaccgccggcggcgacagcgtgcagatctgcaccaaccccctggacaccttcttccccttcgacccctgcgtgctgaagagaagcaagaagttcatcgaccccatctaccaggtgtgggaggacatgagcgccgaggagctgcaggagttcaagaagcccatgaagaaggacatcgtggaggacgaggacgacgacttcctgaagggcgaggtgccccagaacgacaccgtgatcggcatcacccccagcagcttcgacacccacttcagaagccccagcagcagcgtgggcagcccccccgtgctgtacatgcagcccagccccctgtag

SEQ ID NO: 198490 - DNA, 1857 bp, Artificial Sequence
  derived and/or modified sequence
atgagagccctggagaacgacttcttcaacagcccccccagaaagaccgtgagattcggcggcaccgtgaccgaggtgctgctgaagtacaagaagggcgagaccaacgacttcgagctgctgaagaaccagctgctggaccccgacatcaaggacgaccagatcatcaactggctgctggagttcagaagcagcatcatgtacctgaccaaggacttcgagcagctgatcagcatcatcctgagactgccctggctgaacagaagccagaccgtggtggaggagtacctggccttcctgggcaacctggtgagcgcccagaccgtgttcctgagaccctgcctgagcatgatcgccagccacttcgtgccccccagagtgatcatcaaggagggcgacgtggacgtgagcgacagcgacgacgaggacgacaacctgcccgccaacttcgacacctgccacagagccctgcagatcatcgccagatacgtgcccagcaccccctggttcctgatgcccatcctggtggagaagttccccttcgtgagaaagagcgagagaaccctggagtgctacgtgcacaacctgctgagaatcagcgtgtacttccccaccctgagacacgagatcctggagctgatcatcgagaagctgctgaagctggacgtgaacgccagcagacagggcatcgaggacgccgaggagaccgccacccagacctgcggcggcaccgacagcaccgagggcctgttcaacatggacgaggacgaggagaccgagcacgagaccaaggccggccccgagagactggaccagatggtgcaccccgtggccgagagactggacatcctgatgagcctggtgctgagctacatgaaggacgtgtgctacgtggacggcaaggtggacaacggcaagaccaaggacctgtacagagacctgatcaacatcttcgacaagctgctgctgcccacccacgccagctgccacgtgcagttcttcatgttctacctgtgcagcttcaagctgggcttcgccgaggccttcctggagcacctgtggaagaagctgcaggaccccagcaaccccgccatcatcagacaggccgccggcaactacatcggcagcttcctggccagagccaagttcatccccctgatcaccgtgaagagctgcctggacctgctggtgaactggctgcacatctacctgaacaaccaggacagcggcaccaaggccttctgcgacgtggccctgcacggccccttctacagcgcctgccaggccgtgttctacaccttcgtgttcagacacaagcagctgctgagcggcaacctgaaggagggcctgcagtacctgcagagcctgaacttcgagagaatcgtgatgagccagctgaaccccctgaagatctgcctgcccagcgtggtgaacttcttcgccgccatcaccaacaagtaccagctggtgttctgctacaccatcatcgagagaaacaacagacagatgctgcccgtgatcagaagcaccgccggcggcgacagcgtgcagatctgcaccaaccccctggacaccttcttccccttcgacccctgcgtgctgaagagaagcaagaagttcatcgaccccatctaccaggtgtgggaggacatgagcgccgaggagctgcaggagttcaagaagcccatgaagaaggacatcgtggaggacgaggacgacgacttcctgaagggcgaggtgccccagaacgacaccgtgatcggcatcacccccagcagcttcgacacccacttcagaagccccagcagcagcgtgggcagcccccccgtgctgtacatgcagcccagccccctgtag

SEQ ID NO: 198491 - protein, 2624 aa, Artificial Sequence
  derived and/or modified sequence
MFRRARLSVKPNVRPGVGARGSTASNPQRGRESPRPPDPATDSASKPAEPTDVPTVDFGGAEPQEKAPRSSTEKTGGDNDVEESSRSSSTVSQRRKRISSTSSLVKSSVSVPSESHPLSTINQEAPQPTATSTKEKQPCSDRYRIYKAQKLREMLKEELRKEKKQWKNKYAINESQRPPDRSKMTMRDFIYYLPDNNPMTSSLEQEKKTEKPSTPVQTREQEGKSTPNAEDNEMEEETDDGPLLVPRVKVAEDGSIILDEESLTVEVLRTKGPCVVEENDPIFERGSTTTYSSFRKNYYSKPWSNKETDMFFLAISMVGTDFSMIGQLFPHRARIEIKNKFKREEKTNGWRIDKAFQEKRPFDFDFFAHLLQKVLAEEEKRKQKSVKNHSLKEKKSTKPRKNVKVKKVACEGVNNDPDESMSSRISDTERSQKDAQTVEEESLTLSREDAEQVALEVDLNQKKRRRKKQDGANELGVNNLLENATVQAGPSKGEKHKNKCQAIRPELKEGECSKEQMLSCTQNIDGIVGFASTEKVEKRTDPILSLSNQQDATSVATESSESSTSDLPSFEVGIRALCEVNNAEGSCIEERNVDLKNNSLEIDQTENVKPMLRGRFQRPKPNLSRAGKKSVLSQGKTESESKNSHSKTSVEKNHVEKDKMNTLDILRMETTERENPEAETVSVLGEKNCLQEGSQLKALRPVQVRGRLQKPKPNAGKAAERKEILISQEEIGANVEKNENESCADRDTPQHMEDQSRKDFEEEDVILQPEKNDSFQNVQPDEPKVLNECLSVQENNKANKLNQVPILRTRFQKPKPNIGRGTGRREISSKEEVLEKILVSGEMAAALRETVRLDTSPKEMVPAEINTKEMQSDLKETGRRAISPREKILDVIDDTIEMETGLKAMGREICLREKTPEVIDATEEIDKDLEEAGRREISPQKNGPEEVKPLGEVETDLKATGNESSPREKTPEVTDATEEIDKNLEETGRRKISPRENGPEEVKPVDEMETDLNATGRESSPREKTPEVIDATEEIDLEETEREVSPQENGLEEVKPLGEMETDLKATGRDSFPRGKTPEVIDAIEEIEIDLEETEREISPQENGLEEVKPLGEMQTDLKATGREISPREKTPEVIDATEEIDKDLEETGRREISPEENGPEEVKPVDEMETDLKTTGREGSSREKTREVIDAAEVIETDLEETEREISPQENGPEEVKPVGKMETDLKEIREEISQREKVLAEFSAIREKEIDLKETGKRDIPIMEKVSGKMAVVEEMEADLKETGKENFRERGSEEICVTEEKVAELKQTGKTDISPRENELEETSTSRQTDTHLMQSGSNDFSAVPSLDIQNISSEVLSMMHTPVEEKRNSEKEVSSHFSHFKISSQTHESDKTEVQGIQSPDVPEQFSDINLSKSLPQEQKPLEIKPAPFVRSRFKRPKPNLARAALKRETTESEKYIYEKKSETKKMETIVMQENNEQTDTLPSQHDEASLMISREKDTLGHRNEEAVILPCTQTERNLSPSNSCEPKEESQSAPVQKNDSVVSVGTNNVNTFQQEMKESVIQTARQVRGRLQRPRPNIRKTGQRQIVDKGEAKGIIKEGRTILPKDETEKKVLTVSNSQIETEIEVPSSAVPEHRMYENQSQVVLVENLHVNKTNETIRHENKPYVPSSAQMTRRKFQKAKPNLGRAHSKKEEPVLEKVTTDQSKEGKPEDHLLQKGASNTQLLLKEKAELLTSLEVSARKDCVGSKESALAKIDAELEEVGPSRRVGEETVGDNSPSSVVEEQYLNKLTSCPQPLNETSYSKIALDGKTTISSTSEYERNRGERRSHKKFKPNVTRGRGSKRVRGKTSKKEPRASKAMLVTLRASQEEDDDADDFESDYEEESYHLAPEEVNKAPVFVPVGLRSPEPVSAQIEETMEELEITVNVPDVGCIAVVEHELPNTDVTTEEMKQEENLSVPFEMTTSEHIQDEPGTNDGSTEAAITLLTMGDLVLQSEISSEQGDVGVCIIPHVHSKDKSHIPSSLDNVNHKIVHECQELSSPVITTSPASFEENKIVLEEQSSREEISLMEKVKENATPTRNTISKVTSNLRIRSRLAKPKPNLEKTLGTNRLDDYQEVSSLCVTKGAEMETQRETEKNASKATELENKNLGPVTTAENKDQSKLACVHGIKGTSISSEVNLTERNENQEESSQEVHMLSVAPVASSETGPCTLGLDRGLGENSVEEPQIKDSKGDSVLTLPVPEYTPTSIPEVQQENIINPQDLTVNLVANVPQDGEDEQAFILTLVEIPANAVEEFTDATAQFMPNPLLPAPILVKSVNTEERGDMSICLPATSVGQDAMGLSISGRDNSKKPPDNLDLVSRKRFQCRLDKNDHIPPAKKRSLTLRDDCQEYTTEVHSKELTNVFEETGESHKGQDIFLTSGSTLTTPEPQRQQVEAAFQSRGSRSPDACMDKNVPQLPQDEMIVSDKEERTDAAPKSQQMDSRTSSSKASLSRPGRRPLGFLSLICSKNSLESDEPMQVHSKKRLKPLIPGLRKKLKRSNPFNESQEKNRESSDLLPSPSVITTQSENISSSATQVSCDQPLLKEGYKSAQKRAPQGEATTVSEYFFNDIFIEVDETE

SEQ ID NO: 198492 - DNA, 7875 bp, Artificial Sequence
  derived and/or modified sequence
atgttcagacgcgcccgcttgtcagttaaacccaatgtcaggcccggcgtcggcgcccgaggcagtacagctagcaacccccagcggggccgggagtcacctcgccctcccgaccctgccacagattccgccagcaaacccgcagagccgactgacgtgccgaccgtggatttcggtggtgcggaaccccaggaaaaggcaccccgctcatcgaccgagaaaacaggcggcgataatgacgtggaagaatcttctcgttcaagtagcactgtatctcagcgcaggaaacgcattagcagtacttcaagcctcgttaagtcttcagtctccgtgccttctgagtcacacccactctccaccataaaccaggaggccccccagccgaccgcaacaagtaccaaagagaagcagccttgctcagataggtaccgcatttataaagcccagaagctgcgtgagatgctgaaagaggagctgcgcaaggagaagaaacagtggaagaataagtatgcaattaatgaaagccagcgtccaccggacagaagcaaaatgaccatgcgagatttcatttattacttgccagacaacaatcctatgaccagctcgctggagcaggagaagaagactgaaaaaccttcaacgccggtccagactcgggagcaagaaggcaagagtactcccaacgccgaagataacgaaatggaagaggagacggacgacggaccactgctggtgcctagagtcaaggttgccgaagacggctcgatcatcctggatgaagagtcccttacagttgaggtgctaaggacaaaagggccatgtgtggtggaggaaaacgaccccatcttcgagcgaggttctactactacctatagttcttttcggaaaaactactatagtaagccctggtctaacaaggaaacagatatgtttttcctggctattagcatggtcgggaccgacttctcaatgatcggccaactgttcccgcaccgcgcgcgaattgagatcaaaaataaatttaagagggaagaaaagaccaatggctggcggattgataaagccttccaggagaaacgcccattcgatttcgacttctttgcccatcttctgcagaaggtcctcgccgaggaagagaaacgaaaacagaaaagcgtgaagaatcatagcttgaaagaaaagaaatccactaagcctaggaagaatgttaaagtcaaaaaggtggcctgtgagggcgttaataacgacccagacgagagcatgagctcgcgcataagtgacactgaacgtagccagaaagatgctcagacagttgaggaagagtcactgaccctgtcaagggaggacgccgaacaagtggcactggaagtggatctgaaccagaagaaaaggcggcgtaagaagcaagacggagcgaacgagctgggagtgaacaatttactggagaacgcgaccgtgcaggccgggcccagcaagggcgagaagcataagaacaaatgccaagcaatcaggccggaactgaaggagggagagtgcagcaaagaacagatgctgtcttgtactcagaatatcgacggcatcgtcggcttcgcctctactgagaaggttgagaaacggaccgaccctatcctgtctctctcaaaccagcaggatgcaacttcagtggccacagagtcttctgagtcatccacgtccgatctgcccagcttcgaagttgggatacgggcactgtgtgaagtaaataatgcggaaggctcttgtatcgaagagagaaatgtggacctgaaaaacaacagtcttgaaattgatcagacggagaatgtgaagccgatgctccgggggcgcttccaacgccctaagccaaacctgtcaagggctgggaaaaagagcgtcctcagccaaggtaagaccgaaagcgagagtaaaaattcacatagtaagacctccgtggaaaagaaccacgtggagaaggataagatgaatacactggatattctgagaatggagacaaccgagagggaaaacccagaggctgaaaccgtgtcagttctgggagaaaaaaattgtcttcaggaaggaagtcagctcaaagctttgcgcccagttcaggttcggggtcggttacaaaagcccaaacctaatgctggaaaggccgctgaacggaaggagatccttatcagccaggaggaaattggggccaacgtagaaaaaaatgagaatgaaagctgtgcagatcgcgacaccccacagcacatggaagatcaatctaggaaggattttgaagaagaggatgtgatactccagccagaaaaaaatgacagtttccagaatgtgcagccggacgagcccaaagtgctgaacgagtgcctctctgtgcaggagaacaataaggctaataagttgaaccaggttccaattttgcgtaccaggttccagaagccgaagccaaacataggtagagggaccggcagacgcgaaatatcatctaaagaggaggtcctggagaagatcctggtcagcggcgaaatggccgctgccttgcgggaaacagttcgtttagacacgtctcctaaagaaatggtgcctgcggaaattaatacaaaagaaatgcagagtgacctgaaagagacagggcgtcgcgctattagccctcgcgagaagatactagacgtcattgacgatacaatcgaaatggaaaccgggcttaaagccatggggcgggagatctgcttaagggaaaaaacccccgaagtcattgacgctacagaggaaatagacaaggatctggaagaggctggaagacgagaaatctctccacagaagaacggccctgaagaagtaaagcctttgggagaagttgaaaccgacctgaaagctactgggaatgagtctagtcctagggaaaagactcccgaggtgaccgacgccaccgaggagattgacaaaaacctagaagaaacaggaagaagaaagatcagccctagagagaacggccctgaagaggtgaagcctgttgacgagatggagacagacctgaacgcaaccggacgagaaagctctccccgggagaagacccctgaagtcattgacgctaccgaagagattgatctcgaggagaccgaacgcgaagtgagccctcaagagaacggcttagaggaggtaaagcctttaggcgaaatggaaaccgacctgaaagcgacgggtagagacagttttcctaggggtaagacccccgaagtgatcgatgccattgaggaaatagagattgacctagaggaaaccgaacgagagatcagtccccaggaaaacggactggaggaggttaagccactaggcgagatgcagactgacttgaaggctacaggccgcgaaatatctccacgcgagaagacaccggaagtgattgatgcaacagaggaaattgataaagacttagaagagactggccgccgcgaaatcagccccgaagagaacggcccggaggaggtaaaaccggtcgatgagatggagacagatctgaagactactgggcgtgagggctcttccagggagaagacacgggaagtcattgatgcggctgaggtgatcgagaccgatctggaggagactgaaagggagatttctccgcaggaaaatggcccagaggaagtcaaacccgtaggaaagatggagaccgatttgaaagaaattcgagaggaaatctctcagagagagaaagtcctggccgagtttagtgctataagagaaaaagagatagacctaaaagagacaggcaaacgggatatcccaattatggaaaaagtaagcggtaagatggctgtcgtggaagagatggaagcggacctgaaagagacaggcaaagaaaatttcagagaacggggcagcgaagagatttgcgtcaccgaggaaaaagtggcagagttaaaacagaccgggaaaaccgacattagcccgagagaaaatgagttagaggagaccagcacatcacggcaaacggatacccatctaatgcagtcaggatccaatgatttcagtgcagttccctcactggacattcagaacatctcaagtgaggtcctcagtatgatgcacactccagtggaagaaaagagaaattcagagaaggaagtgtccagccatttttcacatttcaagatcagttctcagacacatgagtcagacaagaccgaggtgcaagggattcagtcccccgatgtgcctgagcagttctccgacatcaaccttagcaaaagtctcccccaggagcaaaaacccctggaaattaaaccagcgccctttgtgcgcagtcggttcaaacgacccaagcctaatttggcccgcgcagcgctgaagcgggagaccacagaatcagaaaagtacatttacgagaagaagtcagagaccaagaagatggagactatcgtgatgcaggaaaacaacgaacaaaccgatacactgccctcacagcatgacgaagcatccctgatgatcagcagagaaaaggatacgctgggtcatcggaatgaggaagctgtaatccttccgtgtacccagacagagcgtaatctctctcccagcaacagctgcgaacctaaggaggagtctcagagcgcacctgtccagaagaatgatagtgtggtgtccgttggcacaaataatgtcaacacttttcagcaggagatgaaagagtcggtgatacagacggcaagacaggtgcggggcaggctacagcggcccagacccaatattaggaagacaggacagcgtcaaatcgtggacaagggggaagctaaaggcatcatcaaggaagggcgaaccatactgccgaaagatgagaccgaaaagaaggtgctgacagtgagcaacagccagatcgagactgaaattgaagttccctcgtcagcagtacccgaacatcgcatgtacgaaaatcagtctcaggttgtgttggtggaaaatctccacgttaataagactaacgagaccattcggcacgagaataagccgtatgtccccagctccgcccaaatgaccagacgcaagtttcaaaaagcgaagcccaacctcggccgggcccactcaaagaaagaggagcctgttctcgaaaaagtgactactgatcagtcaaaggagggcaaacccgaggatcacctgctgcagaaaggcgcgagcaacacccagctactactcaaagaaaaagcagagctgttgactagtttagaggtctcagcacggaaagactgcgtgggctctaaagagagcgcgctcgcgaagattgacgctgagctggaggaggtcggtccgtctagacgagtgggtgaggagactgtcggagacaactctccttcgagcgtggtggaggaacagtatttgaacaagctgaccagttgtccacaaccccttaacgaaacctcttactctaagattgccctggacggaaagactaccatctcctctaccagcgaatacgagcggaatcgcggggaacggaggtcccataaaaaatttaaacccaacgtcacgcggggtagagggagcaagagggtgcgtggcaagacatccaagaaagaaccacgtgcttccaaggcaatgttagttaccctgagggccagccaggaagaagacgatgacgctgacgacttcgaatccgactatgaagaggaaagttatcacctggcaccggaggaggtcaataaggctcccgtctttgtgccggtaggcctgagatctccagagcccgtctccgctcagatcgaagagaccatggaagagctcgaaatcactgttaacgttccggacgttggttgtatcgctgttgtcgagcacgagttgcctaacaccgatgttaccacggaagagatgaagcaagaagagaatctctctgtcccgttcgagatgacgactagtgagcacatccaggacgagcccgggacgaatgacgggagcactgaggcagctataaccctcctcaccatgggagatctcgtgctccaaagtgagatctcctccgaacaaggcgatgtgggggtgtgcatcatccctcatgtgcactccaaagacaagagccatatacccagtagcttggacaatgtcaaccacaagatcgtgcacgagtgccaagagctgtcttcacctgtgatcacgacatcccctgcatctttcgaggagaataaaattgtcctagaagagcagagttccagagaggagatcagcctcatggaaaaagtgaaagagaatgcaactccaacaaggaacaccatctccaaagtgactagcaatttaaggattcggtcaaggttagcaaaacctaagcctaatctggagaagactctgggtacgaatagacttgatgattatcaggaagtatcttcactgtgtgtcaccaagggggccgaaatggaaacacagagggagaccgagaaaaacgcatccaaggccacagagctcgaaaataagaaccttgggcctgtgacaaccgccgaaaacaaggatcagagcaagctggcttgtgtccacgggattaaagggacctctatctctagcgaggtaaacctgactgaaaggaatgaaaaccaggaggagagcagccaggaagtgcatatgctgagcgtggccccagtggcctcctccgagacgggcccatgcacactcggattagatagaggactgggagaaaacagcgttgaggagccccagattaaagattccaagggtgacagcgtattgacgctgccggtccccgagtacacccccacctccataccagaagttcagcaggagaatatcattaatcctcaagacctaacggtgaacctggtagcaaacgtgcctcaggacggcgaagatgagcaggcgtttatcttgacacttgtagagatccctgctaatgccgttgaggaatttacggatgccactgctcagttcatgccaaatcccctcctccctgcacccatacttgtcaagagcgtgaataccgaagaaagaggcgacatgtcaatttgcctgccagccactagtgtgggccaggacgccatgggattaagtatctctggcagggacaactcgaaaaagcctcctgacaatctggatctggtgagcagaaagcgcttccagtgtcgcttggacaagaacgatcacatcccgccagctaagaaaagatcacttaccttgcgcgatgactgccaggaatatactacggaggttcactcaaaggagctgaccaatgtcttcgaggagacaggggagtcccacaaagggcaggatatttttctcacctccggttctacactcaccactcctgagccccagaggcaacaggtggaagccgccttccaaagcaggggctcaaggagccctgacgcgtgtatggacaaaaatgtcccgcagctccctcaggacgagatgattgtatctgacaaggaagaaaggaccgacgccgctcccaaaagccagcagatggatagcaggacctcctcttccaaagcttcattgagtcggcctgggcgccgaccgctggggtttctttccctgatctgtagcaagaattccctggagtccgacgagcctatgcaggttcacagcaaaaagcgattgaagcctctgattccaggactacggaagaagcttaagcgctctaacccttttaacgagtcacaggagaagaacagggagtctagcgacttattgccttcccccagtgtcatcacgacgcaatctgagaatatctcctcatctgccacccaggttagctgcgaccaaccactgctgaaggagggatacaagtcggcccagaagagagctccccagggtgaggccaccaccgtaagtgagtattttttcaatgatatcttcatcgaggtagatgaaaccgagtag

SEQ ID NO: 198493 - DNA, 2445 bp, Artificial Sequence
  derived and/or modified sequence
atgtttcgccgggctaggctctctgtgaagcccaacgttcggccaggggtgggggcccggggcagcacggcaagcaatccgcaacgcggtagagaaagccccagacctcccgatccagccactgattctgcttccaagcccgccgagccgactgacgtgccaacggttgatttcggaggagccgaaccacaggagaaggcacctcgatcaagcaccgaaaaaactgggggcgataacgacgtggaggagagctcgagaagcagctctaccgtgtcacagcggaggaagaggatctcgtctaccagtagtctggtaaagtccagtgtctccgtgcccagcgaaagtcaccccttgtccaccattaaccaagaagctccgcagcctactgccacctccactaaggagaagcagccttgttccgatcgataccgaatatacaaagctcagaagctgagggagatgctgaaggaagaacttcgtaaggagaagaagcagtggaaaaacaaatatgcaatcaatgaatcccagaggccccctgatcgctcaaaaatgaccatgagggacttcatttattatctgccggacaataacccaatgacctcttcgctcgaacaggagaagaagaccgagaagccgtccaccccagtccagacacgggaacaagaaggtaagtccaccccgaatgctgaagacaatgaaatggaagaagagaccgatgacggtcccctgctggtgccccgcgttaaagtcgctgaggatggctctatcattcttgatgaagagtccctgacagtggaagtgctcaggaccaaaggtccatgtgtggtggaggagaatgatcccattttcgaacgcggatccacgactacttattcttctttcaggaagaattactacagcaaaccctggtcaaacaaagagacagacatgttcttcctggccataagcatggtcggaacagactttagcatgattggacaattattccctcacagagctaggattgaaatcaagaataaatttaaacgcgaagagaagactaacggatggcgcatagataaggctttccaggagaagaggccatttgatttcgattttttcgcacatttgctgcagaaggtgctggccgaggaggaaaaacgtaagcagaaatctgttaagaaccactctcttaaggaaaagaaatctacaaaaccgcgaaaaaacgtcaaagtgaagaaagtggcttgtgagggggtgaataatgaccctgacgagagcatgtcaagccgtatatccgatacagagaggagtcaaaaggatgcacaaaccgttgaagaagaatccttgactctttctagggaagacgccgagcaggtggctttggaggtggatctcaatcagaaaaaacggcggcggaagaaacaagacggagccaatgagcttggcgttaataacctgctggagaacgcgacagtgcaagccggcccaagcaagggcgaaaaacataagaacaagtgccaggccatccggccggaactcaaggagggtgaatgttccaaggagcagatgctgtcttgtacacagaatatcgatggcatagttggttttgcctcaaccgagaaggtggaaaagagaaccgatcccatactaagcttgagtaatcagcaggatgccacttcggtcgcaaccgagtcaagcgagtcttcaaccagcgaccttccaagttttgaggttggcattcgtgccttgtgtgaggttaataatgccgagggaagctgcatcgaagaacgcaacgtcgacttaaagaataactcccttgagatcgaccagactgagaatgtgaagccgatgctgcgcggtagatttcaacggccaaagcccaacctctccagggccggtaaaaaaagcgtcttgtcccaagggaaaaccgagtccgaaagtaagaattcccactccaagacttctgttgagaaaaatcatgtcgaaaaggacaaaatgaacacattggatattcttcggatggaaactaccgagcgcgagaatccagaagccgaaaccgtgagcgtactgggagaaaagaactgtctgcaagagggatcccagctgaaggcactgcgccccgtgcaggtcaggggtcgtctgcaaaaaccaaaaccaaacgccggcaaggccgctgagcgcaaggagatcctgatctcacaggaagaaatcggagccaacgtggaaaagaacgagaacgagtcctgtgcagatcgagatactccacagcacatggaggatcagtctaggaaagatttcgaggaggaagatgtaatcttgcagcccgagaaaaacgactccttccagaacgtgcagcccgacgaaccaaaggttcttaacgagtgcctgtcagtgcaggaaaacaacaaagccaataagctgaatcaagtgcccattctgagaaccaggtttcaaaaaccctag

SEQ ID NO: 198494 - DNA, 2541 bp, Artificial Sequence
  derived and/or modified sequence
atgttccgacgggctcgtctctccgttaaaccgaatgtaagaccaggcgttggagctcgcggaagcaccgcgagcaacccacagagagggcgggagagtccccggccccctgaccctgcaacagacagcgcatctaaacctgcggagcccacggatgtccccacggtcgattttggcggcgccgagccccaggagaaagccccacgatcctccaccgagaaaacagggggtgataacgatgtggaagagagttcgcgaagctcatcaacggtctcgcagaggcgcaagcgcataagctcgacttcctctctcgtgaagtcctccgtttctgtcccttcggagtcccatccactcagcacaattaatcaggaggcaccacagccaaccgcaacatccacaaaagaaaaacagccctgctccgaccgctatcgaatctataaggcccagaagctgcgggagatgcttaaggaagaattgagaaaggaaaagaaacagtggaagaataagtatgccatcaacgagtcccagcgccctcctgaccgatctaagatgactatgcgtgatttcatttactacctgcctgataacaatcccatgacgagtagtttggaacaggaaaaaaaaaccgaaaagcccagtacaccagtccagaccagagaacaggagggcaaatcgacaccgaacgccgaagataacgagatggaggaggagacagatgacggaccactgctggtgcctcgcgttaaggttgctgaggacggttctattatccttgatgaagaatccctgacagtggaggtactccgaactaaggggccctgcgtggtggaagaaaatgatcctatatttgaaaggggttctacaacgacgtattcctcttttcgcaaaaattattacagcaaaccttggtcgaacaaggagacagacatgtttttcctggccatttctatggtggggactgacttttctatgatcggccagctttttccacaccgagcccggatcgagatcaagaacaagtttaagcgggaggaaaaaaccaatggatggcggatcgacaaggcattccaggagaaacgcccctttgacttcgacttctttgctcacctcctgcagaaggtgctcgccgaagaagaaaaacgcaagcagaaatccgtgaagaaccacagtttaaaggagaagaaaagtacaaaaccccggaagaacgtgaaggtgaaaaaagtcgcctgtgaaggagtgaacaacgatccagacgaatcgatgagtagtcgcattagtgatacggaaaggtcgcagaaggatgctcagactgtcgaagaggagagtctgactctgtctagagaggatgctgaacaagtggccctggaggtggatttgaaccagaaaaagagacgacggaaaaagcaagatggcgccaacgaactgggggtcaacaatctgctggagaacgcgaccgtccaggccgggccttcgaagggcgagaagcataaaaataagtgccaggcgatccgacccgagctgaaggaaggggaatgttccaaggagcagatgttatcctgcacccagaatattgacgggattgtcggcttcgccagcacagagaaggttgaaaagcgcaccgatcccattctgagcctgtcaaaccaacaagacgccacctcagtggctacagagtcttctgagtccagcacctccgacctgccttccttcgaggtggggatcagggctttgtgcgaggtgaataatgccgaaggatcctgcattgaggaaagaaatgtagatctcaagaacaatagtcttgagatcgaccaaacagagaatgtgaaacctatgttgcgtggacggtttcaacgccccaagcccaacctcagtcgcgccgggaagaaatctgtcctctctcaaggcaaaaccgaaagcgaatctaaaaatagtcacagtaagaccagcgttgaaaagaatcatgtcgaaaaggataagatgaatacactggatatcctcagaatggaaacaactgaaagagaaaatccagaagcagagactgtctcagtgctgggggaaaaaaattgtcttcaggagggctctcaattgaaggccctccgtccggttcaggtgaggggcaggctgcagaaacctaaacccaatgccggtaaggccgccgagcggaaagagattctgatttcccaggaagagattggagccaacgtggaaaaaaatgagaatgaatcatgcgccgaccgcgatacgccacagcacatggaggatcagagcagaaaggacttcgaggaggaagacgtgattctgcagcccgaaaaaaatgactcgtttcaaaacgtgcaaccagacgagcccaaggttctcaacgagtgcctaagcgtgcaggagaataataaagctaataaattgaaccaggtgccaattctgcggactcgtttccagaagcctaagcctaacattgggcgggggaccggcagaagagagattagttccaaagaggaagtgctggaaaaaatcctgagcctgggtaaatggcgccagcactag

SEQ ID NO: 198495 - DNA, 7875 bp, Artificial Sequence
  derived and/or modified sequence
atgttcagaagagcccggctgtctgtgaagcccaacgtgcggcctggggtgggcgcccggggcagcacagccagcaacccccagaggggccgggagagcccccggcccccagaccctgccacagattctgccagcaagccagctgagcccacagatgtgcccaccgtggactttggaggagctgagccccaggagaaggcccccaggagcagcacagagaagacaggaggagacaatgatgtggaggagagcagccgcagcagcagcacagtgtcccagaggaggaagaggatcagcagcaccagcagcctggtgaagagctctgtgtctgtgcccagcgagagccaccccctgagcaccatcaaccaggaggccccccagcccacagccaccagcaccaaggagaagcagccctgcagcgaccgctaccgcatctacaaggcccagaagctgcgggagatgctgaaggaggagctgaggaaggagaagaagcagtggaagaacaagtatgccatcaatgaaagccagaggcccccagacaggagcaagatgaccatgagggacttcatctactacctgcctgacaacaaccccatgaccagcagcctggagcaggagaagaagacagagaagcccagcacccctgtgcagacccgggagcaggagggcaagagcaccccaaatgctgaggacaatgagatggaggaggagacagatgatggccccctgctggtgccccgggtgaaggtggccgaggatggcagcatcatcctggatgaggagagcctgactgtggaggtgctgcggaccaagggcccctgtgtggtggaggagaatgaccccatctttgagcggggcagcaccaccacctacagcagcttcaggaagaactactacagcaagccctggagcaacaaggagacagacatgttcttcctggccatctccatggtgggcacagacttctccatgattggccagctgttcccccaccgggccagaattgagatcaagaacaagttcaagcgggaggagaagaccaacggctggagaattgacaaggccttccaggagaagaggccctttgattttgacttctttgcccacctgctgcagaaggtgctggccgaggaggagaagaggaagcagaagtctgtgaagaaccacagcctgaaggagaagaagagcaccaagcccaggaagaatgtgaaggtgaagaaggtggcctgtgagggcgtgaacaatgaccctgatgagagcatgagcagccgcatcagtgacacagagaggagccagaaggatgcccagacagtggaggaggagagcctgaccctgagccgggaggatgctgagcaggtggccctggaggtggacctgaaccagaagaagagaagaaggaagaagcaggatggagccaatgagctgggcgtgaacaacctgctggagaatgccaccgtgcaggccggccccagcaagggggagaagcacaagaacaagtgccaggccatccggcctgagctgaaggagggagaatgttccaaggagcagatgctgagctgcacccagaacattgatggcatcgtgggctttgccagcacagagaaggtggagaagaggacagaccccatcctgagcctgagcaaccagcaggatgccacctctgtggccacagagagcagcgagagcagcaccagtgacctgcccagctttgaggtgggcatccgggccctgtgtgaggtgaacaatgctgagggcagctgcatcgaggagagaaatgtggacctgaagaacaacagcctggagattgaccagacagaaaatgtgaagcccatgctgcggggccgcttccagaggcccaagcccaacctgagccgggccggcaagaagtctgtgctgagccagggcaagacagaaagtgagagcaagaacagccacagcaagacctctgtggagaagaaccacgtggagaaggacaagatgaacaccctggacatcctgaggatggagaccacagagcgggagaaccctgaggccgagaccgtgtctgtgctgggggagaagaactgcctgcaggagggcagccagctgaaggccctgcggcctgtgcaggtgcggggccgcctgcagaagcccaagcccaatgccggcaaggctgctgagaggaaggagatcctgatcagccaggaggagattggagccaacgtggagaagaatgaaaatgaaagctgtgccgaccgggacaccccccagcacatggaggaccagagcaggaaggactttgaggaggaggatgtgatcctgcagcctgagaagaatgacagcttccagaatgtgcagccagatgagcccaaggtgctgaatgaatgtctgtctgtgcaggagaacaacaaggccaacaagctgaaccaggtgcccatcctgcggacccgcttccagaagcccaagcccaacatcggccggggcaccggccggcgggagatcagcagcaaggaggaggtgctggagaagatcctggtgtctggagagatggctgctgccctgcgggagaccgtgcggctggacaccagccccaaggagatggtgcctgctgagatcaacaccaaggagatgcagagcgacctgaaggagactggaagaagagccatcagcccccgggagaagatcctggatgtgattgatgacaccatcgagatggagaccggcctgaaggccatgggccgggagatctgcctgcgggagaagaccccagaggtgattgatgccacagaggagattgacaaggacctggaggaggccggccggcgggagatcagcccccagaagaatggacctgaggaggtgaagcccctgggggaggtggagacagacctgaaggccactggaaatgaaagcagcccccgggagaagaccccagaggtgacagatgccacagaggagattgacaagaacctggaggagactggaagaaggaagatcagcccccgggagaatggacctgaggaggtgaagcctgtggatgagatggagacagacctgaatgccaccggccgggagagcagcccccgggagaagaccccagaggtgattgatgccacagaggagattgacctggaggagacagagcgggaggtgagcccccaggagaatggcctggaggaggtgaagcccctgggggagatggagacagacctgaaggccaccggccgggacagcttcccccggggcaagaccccagaggtgattgatgccatcgaggagattgaaattgacctggaggagacagagcgggagatcagcccccaggagaatggcctggaggaggtgaagcccctgggggagatgcagacagacctgaaggccaccggccgggagatcagcccccgggagaagaccccagaggtgattgatgccacagaggagattgacaaggacctggaggagaccggccggcgggagatcagcccagaagaaaatggacctgaggaggtgaagcctgtggatgagatggagacagacctgaagaccaccggccgggagggcagcagccgggagaagacccgggaggtgattgatgctgctgaggtgattgaaacagacctggaggagacagagcgggagatcagcccccaggagaatggacctgaggaggtgaagcctgtgggcaagatggagacagacctgaaggagatccgggaggagatcagccagcgggagaaggtgctggccgagttcagcgccatccgggagaaggagattgacctgaaggagaccgggaagagggacatccccatcatggagaaggtgtctgggaagatggctgtggtggaggagatggaggccgacctgaaggagaccgggaaggagaacttccgggagcggggcagcgaggagatctgtgtgacagaggagaaggtggccgagctgaagcagacaggcaagacagacatcagcccccgggagaatgagctggaggagaccagcaccagccggcagacagacacccacctgatgcagagcggcagcaatgacttctctgctgtgcccagcctggacatccagaacatcagcagcgaggtgctgtccatgatgcacacccctgtggaggagaagagaaattctgagaaggaggtgagcagccacttcagccacttcaagatcagcagccagacccatgaaagtgacaagacagaggtgcagggcatccagagcccagatgtgcctgagcagttcagtgacatcaacctgagcaagagcctgccccaggagcagaagcccctggagatcaagccagccccctttgtgcgcagccgcttcaagaggcccaagcccaacctggcccgggccgccctgaagcgggagaccacagaaagtgagaagtacatctatgagaagaagtctgagaccaagaagatggagaccatcgtgatgcaggagaacaatgagcagacagacaccctgcccagccagcatgatgaggccagcctgatgatcagccgggagaaggacaccctgggccacagaaatgaggaggccgtcatcctgccctgcacccagacagaaagaaacctgagccccagcaacagctgtgagcccaaggaggagagccagagcgcccctgtgcagaagaatgattctgtggtgtctgtgggcaccaacaacgtgaacaccttccagcaggagatgaaggagagcgtcatccagacagcccggcaggtgcggggccgcctgcagaggccccggcccaacatcaggaagacaggccagaggcagatcgtggacaagggggaggccaagggcatcatcaaggagggccgcaccatcctgcccaaggatgaaacagagaagaaggtgctgactgtgagcaacagccagattgaaacagaaattgaggtgcccagcagcgctgtgcctgagcacaggatgtatgagaaccagagccaggtggtgctggtggagaacctgcacgtgaacaagaccaatgagaccatcagacatgagaacaagccctacgtgcccagcagcgcccagatgaccaggaggaagttccagaaggccaagcccaacctgggccgggcccacagcaagaaggaggagcctgtgctggagaaggtgaccacagaccagagcaaggagggcaagccagaggaccacctgctgcagaagggggccagcaacacccagctgctgctgaaggagaaggccgagctgctgaccagcctggaggtgtctgccaggaaggactgtgtgggcagcaaggagagcgccctggccaagattgatgctgagctggaggaggtgggccccagccggcgggtgggggaggagaccgtgggggacaacagccccagctctgtggtggaggagcagtacctgaacaagctgaccagctgcccccagcccctgaatgagaccagctacagcaagatcgccctggatggcaagaccaccatcagcagcaccagtgaatatgaaagaaacagaggagagcggcgcagccacaagaagttcaagcccaacgtgacccggggccggggcagcaagagggtgcggggcaagaccagcaagaaggagccccgggccagcaaggccatgctggtgaccctgcgggccagccaggaggaggatgatgatgctgatgactttgaaagtgactatgaggaggagagctaccacctggcccctgaggaggtgaacaaggcccctgtgtttgtgcctgtgggcctgcggagccctgagcctgtgtctgcccagatcgaggagaccatggaggagctggagatcaccgtgaatgtgcctgatgtgggctgcatcgctgtggtggagcacgagctgcccaacacagatgtgaccacagaggagatgaagcaggaggagaacctgtctgtgccctttgagatgaccaccagcgagcacatccaggatgagcccggcaccaatgatggcagcacagaagctgccatcaccctgctgaccatgggagacctggtgctgcagagcgagatcagcagcgagcagggagatgtgggcgtgtgcatcatcccccacgtgcacagcaaggacaagagccacatccccagcagcctggacaacgtgaaccacaagatcgtgcatgagtgccaggagctgagcagccctgtgatcaccaccagccctgccagctttgaggagaacaagatcgtgctggaggagcagagcagccgggaggagatcagcctgatggagaaggtgaaggaaaatgccacccccaccaggaacaccatcagcaaggtgaccagcaacctgcgcatccgcagccggctggccaagcccaagcccaacctggagaagaccctgggcaccaaccggctggatgactaccaggaggtgagcagcctgtgtgtgaccaagggagctgagatggagacccagcgggagacagagaagaatgccagcaaggccacagagctggagaacaagaacctgggccctgtgaccacagctgagaacaaggaccagagcaagctggcctgtgtgcacggcatcaagggcaccagcatcagcagcgaggtgaacctgacagaaagaaatgaaaaccaggaggagagcagccaggaggtgcacatgctgtctgtggcccctgtggccagcagcgagaccggcccctgcaccctgggcctggaccggggcctgggagaaaattctgtggaggagccccagatcaaggacagcaaaggagacagcgtgctgaccctgcctgtgcctgagtacacccccaccagcatccctgaggtgcagcaggagaacatcatcaacccccaggacctgactgtgaacctggtggccaacgtgccccaggatggagaagatgagcaggccttcatcctgaccctggtggagatcccagccaatgctgtggaggagttcacagatgccacagcccagttcatgcccaaccccctgctgcctgcccccatcctggtgaagtctgtgaacacagaggagcggggggacatgagcatctgcctgcctgccacctctgtgggccaggatgccatgggcctgagcatcagcggccgggacaacagcaagaagcccccagacaacctggacctggtgtccaggaagcgcttccagtgccgcctggacaagaatgaccacatccccccagccaagaagaggagcctgaccctgagagatgactgccaggagtacaccacagaggtgcacagcaaggagctgaccaacgtgtttgaggagactggagagagccacaagggccaggacatcttcctgaccagcggcagcaccctgaccaccccagagccccagaggcagcaggtggaggccgccttccagagccggggcagccgcagcccagatgcctgcatggacaagaatgtgccccagctgccccaggatgagatgattgtgtctgacaaggaggagaggacagatgctgcccccaagagccagcagatggacagcaggaccagcagcagcaaggccagcctgagccggcccggccggcggcccctgggcttcctgagcctcatctgcagcaagaacagcctggagagtgatgagcccatgcaggtgcacagcaagaagaggctgaagcccctcatccctggcctgaggaagaagctgaagaggagcaaccccttcaatgaaagccaggagaagaaccgggagagcagtgacctgctgcccagccccagcgtcatcaccacccagagcgagaacatcagcagcagcgccacccaggtgtcctgtgaccagcccctgctgaaggagggctacaagagcgcccagaagagggccccccagggcgaggccaccaccgtgtctgagtacttcttcaatgacatcttcatcgaggtggatgaaacagaatag

SEQ ID NO: 198496 - DNA, 2445 bp, Artificial Sequence
  derived and/or modified sequence
atgttcagaagagcccggctgtctgtgaagcccaacgtgcggcctggggtgggcgcccggggcagcacagccagcaacccccagaggggccgggagagcccccggcccccagaccctgccacagattctgccagcaagccagctgagcccacagatgtgcccaccgtggactttggaggagctgagccccaggagaaggcccccaggagcagcacagagaagacaggaggagacaatgatgtggaggagagcagccgcagcagcagcacagtgtcccagaggaggaagaggatcagcagcaccagcagcctggtgaagagctctgtgtctgtgcccagcgagagccaccccctgagcaccatcaaccaggaggccccccagcccacagccaccagcaccaaggagaagcagccctgcagcgaccgctaccgcatctacaaggcccagaagctgcgggagatgctgaaggaggagctgaggaaggagaagaagcagtggaagaacaagtatgccatcaatgaaagccagaggcccccagacaggagcaagatgaccatgagggacttcatctactacctgcctgacaacaaccccatgaccagcagcctggagcaggagaagaagacagagaagcccagcacccctgtgcagacccgggagcaggagggcaagagcaccccaaatgctgaggacaatgagatggaggaggagacagatgatggccccctgctggtgccccgggtgaaggtggccgaggatggcagcatcatcctggatgaggagagcctgactgtggaggtgctgcggaccaagggcccctgtgtggtggaggagaatgaccccatctttgagcggggcagcaccaccacctacagcagcttcaggaagaactactacagcaagccctggagcaacaaggagacagacatgttcttcctggccatctccatggtgggcacagacttctccatgattggccagctgttcccccaccgggccagaattgagatcaagaacaagttcaagcgggaggagaagaccaacggctggagaattgacaaggccttccaggagaagaggccctttgattttgacttctttgcccacctgctgcagaaggtgctggccgaggaggagaagaggaagcagaagtctgtgaagaaccacagcctgaaggagaagaagagcaccaagcccaggaagaatgtgaaggtgaagaaggtggcctgtgagggcgtgaacaatgaccctgatgagagcatgagcagccgcatcagtgacacagagaggagccagaaggatgcccagacagtggaggaggagagcctgaccctgagccgggaggatgctgagcaggtggccctggaggtggacctgaaccagaagaagagaagaaggaagaagcaggatggagccaatgagctgggcgtgaacaacctgctggagaatgccaccgtgcaggccggccccagcaagggggagaagcacaagaacaagtgccaggccatccggcctgagctgaaggagggagaatgttccaaggagcagatgctgagctgcacccagaacattgatggcatcgtgggctttgccagcacagagaaggtggagaagaggacagaccccatcctgagcctgagcaaccagcaggatgccacctctgtggccacagagagcagcgagagcagcaccagtgacctgcccagctttgaggtgggcatccgggccctgtgtgaggtgaacaatgctgagggcagctgcatcgaggagagaaatgtggacctgaagaacaacagcctggagattgaccagacagaaaatgtgaagcccatgctgcggggccgcttccagaggcccaagcccaacctgagccgggccggcaagaagtctgtgctgagccagggcaagacagaaagtgagagcaagaacagccacagcaagacctctgtggagaagaaccacgtggagaaggacaagatgaacaccctggacatcctgaggatggagaccacagagcgggagaaccctgaggccgagaccgtgtctgtgctgggggagaagaactgcctgcaggagggcagccagctgaaggccctgcggcctgtgcaggtgcggggccgcctgcagaagcccaagcccaatgccggcaaggctgctgagaggaaggagatcctgatcagccaggaggagattggagccaacgtggagaagaatgaaaatgaaagctgtgccgaccgggacaccccccagcacatggaggaccagagcaggaaggactttgaggaggaggatgtgatcctgcagcctgagaagaatgacagcttccagaatgtgcagccagatgagcccaaggtgctgaatgaatgtctgtctgtgcaggagaacaacaaggccaacaagctgaaccaggtgcccatcctgcggacccgcttccagaagccctag

SEQ ID NO: 198497 - DNA, 2541 bp, Artificial Sequence
  derived and/or modified sequence
atgttcagaagagcccggctgtctgtgaagcccaacgtgcggcctggggtgggcgcccggggcagcacagccagcaacccccagaggggccgggagagcccccggcccccagaccctgccacagattctgccagcaagccagctgagcccacagatgtgcccaccgtggactttggaggagctgagccccaggagaaggcccccaggagcagcacagagaagacaggaggagacaatgatgtggaggagagcagccgcagcagcagcacagtgtcccagaggaggaagaggatcagcagcaccagcagcctggtgaagagctctgtgtctgtgcccagcgagagccaccccctgagcaccatcaaccaggaggccccccagcccacagccaccagcaccaaggagaagcagccctgcagcgaccgctaccgcatctacaaggcccagaagctgcgggagatgctgaaggaggagctgaggaaggagaagaagcagtggaagaacaagtatgccatcaatgaaagccagaggcccccagacaggagcaagatgaccatgagggacttcatctactacctgcctgacaacaaccccatgaccagcagcctggagcaggagaagaagacagagaagcccagcacccctgtgcagacccgggagcaggagggcaagagcaccccaaatgctgaggacaatgagatggaggaggagacagatgatggccccctgctggtgccccgggtgaaggtggccgaggatggcagcatcatcctggatgaggagagcctgactgtggaggtgctgcggaccaagggcccctgtgtggtggaggagaatgaccccatctttgagcggggcagcaccaccacctacagcagcttcaggaagaactactacagcaagccctggagcaacaaggagacagacatgttcttcctggccatctccatggtgggcacagacttctccatgattggccagctgttcccccaccgggccagaattgagatcaagaacaagttcaagcgggaggagaagaccaacggctggagaattgacaaggccttccaggagaagaggccctttgattttgacttctttgcccacctgctgcagaaggtgctggccgaggaggagaagaggaagcagaagtctgtgaagaaccacagcctgaaggagaagaagagcaccaagcccaggaagaatgtgaaggtgaagaaggtggcctgtgagggcgtgaacaatgaccctgatgagagcatgagcagccgcatcagtgacacagagaggagccagaaggatgcccagacagtggaggaggagagcctgaccctgagccgggaggatgctgagcaggtggccctggaggtggacctgaaccagaagaagagaagaaggaagaagcaggatggagccaatgagctgggcgtgaacaacctgctggagaatgccaccgtgcaggccggccccagcaagggggagaagcacaagaacaagtgccaggccatccggcctgagctgaaggagggagaatgttccaaggagcagatgctgagctgcacccagaacattgatggcatcgtgggctttgccagcacagagaaggtggagaagaggacagaccccatcctgagcctgagcaaccagcaggatgccacctctgtggccacagagagcagcgagagcagcaccagtgacctgcccagctttgaggtgggcatccgggccctgtgtgaggtgaacaatgctgagggcagctgcatcgaggagagaaatgtggacctgaagaacaacagcctggagattgaccagacagaaaatgtgaagcccatgctgcggggccgcttccagaggcccaagcccaacctgagccgggccggcaagaagtctgtgctgagccagggcaagacagaaagtgagagcaagaacagccacagcaagacctctgtggagaagaaccacgtggagaaggacaagatgaacaccctggacatcctgaggatggagaccacagagcgggagaaccctgaggccgagaccgtgtctgtgctgggggagaagaactgcctgcaggagggcagccagctgaaggccctgcggcctgtgcaggtgcggggccgcctgcagaagcccaagcccaatgccggcaaggctgctgagaggaaggagatcctgatcagccaggaggagattggagccaacgtggagaagaatgaaaatgaaagctgtgccgaccgggacaccccccagcacatggaggaccagagcaggaaggactttgaggaggaggatgtgatcctgcagcctgagaagaatgacagcttccagaatgtgcagccagatgagcccaaggtgctgaatgaatgtctgtctgtgcaggagaacaacaaggccaacaagctgaaccaggtgcccatcctgcggacccgcttccagaagcccaagcccaacatcggccggggcaccggccggcgggagatcagcagcaaggaggaggtgctggagaagatcctgagcctgggcaagtggaggcagcactag

SEQ ID NO: 198498 - DNA, 7875 bp, Artificial Sequence
  derived and/or modified sequence
atgttccggcgggcccggctgagcgtgaagcccaacgtgcggcccggagtcggcgcacgcggtagcaccgctagcaatccacagagagggagggagtcccctcgccctcccgatcccgccaccgatagcgccagcaagcccgcagaacctaccgacgttcctacagtcgactttgggggggcggagccacaagaaaaagccccacgatcttctaccgagaagactggcggagataacgatgttgaggaaagctctcggagtagcagcactgtttcacagagacggaaacgcatcagttctacatcttctctggttaaatcatctgtatctgttcccagcgagtcccaccccctttcaaccattaatcaggaagccccacagcccacagcaacttccaccaaggagaaacagccctgttccgaccggtataggatatacaaggcacagaagctaagagagatgctgaaggaggaactcagaaaggaaaagaagcagtggaagaacaaatacgccattaacgagtcccagagaccaccagatcgatccaagatgactatgcgcgacttcatctactaccttccagataacaatccaatgacctcgagcctggaacaggagaagaaaacagagaaaccaagtacgcccgtgcagacccgggagcaagaggggaagtctactcccaacgctgaggacaacgagatggaagaggaaaccgatgatggtccactcctggttccacgtgtgaaggtcgcagaggacggaagtatcatcctagatgaagaatcccttaccgtggaggtcctccggaccaaaggaccatgcgtcgtcgaagaaaatgacccaatcttcgaaagagggtccacaaccacatacagctccttccggaaaaattattactcgaaaccttggtcgaacaaagagactgacatgttcttcctggccatctcaatggtgggtactgacttctcaatgattggtcagctattcccgcatcgagcacgcattgagattaagaacaaattcaaacgtgaggagaagacgaacggatggagaattgacaaagcgttccaagagaagcgccccttcgattttgattttttcgcccaccttctacaaaaggtgctggccgaagaggagaagcgcaagcagaaatcggtaaagaatcattccctgaaagaaaaaaagagcaccaagccgcggaagaatgtcaaagtgaaaaaagtcgcctgcgaaggggtcaacaatgatccggacgaaagcatgagctcaaggatctctgacacggagcgtagccagaaggatgcccagacagtcgaagaggagtcccttactcttagtcgcgaggacgcagagcaggtcgctttggaagtggacctcaatcagaagaaaaggcggaggaagaaacaggacggagcaaatgagctcggggtaaacaacctgctcgagaacgctacagtccaggctggaccgtccaagggggaaaagcataaaaacaagtgccaggccattcgtccagagctcaaggaaggcgagtgtagcaaggaacaaatgttgtcatgcactcaaaatatcgacgggatcgtcggtttcgcaagcaccgaaaaagtggaaaagagaaccgatccgatcctgagcctcagcaatcagcaggatgccacctctgtcgcgacggagagctccgaatcaagcacgagcgatctgccaagttttgaggtgggaattcgcgccttatgtgaagttaataatgccgaggggtcgtgcattgaggagagaaatgtagacttaaagaataattctctcgagatcgatcagaccgagaacgtgaagcctatgctccgtggacgattccagcgcccgaagccgaatctgagtagggcaggcaaaaagagtgtgctttcgcaagggaaaaccgaaagtgagtctaaaaactctcactccaagacgtccgtcgagaagaaccatgttgagaaagacaaaatgaacactctggacattcttcggatggaaaccacagaacgagagaacccggaagcagagacagtcagcgtattgggcgaaaagaactgccttcaagaaggatctcagctgaaggccctgcgcccggtgcaggttcgtggcagactgcagaagccaaagcccaacgccggcaaggctgcagaacgcaaagaaattcttatttcgcaggaagaaatcggagcaaacgtggaaaaaaacgagaacgagagctgcgcggatagggataccccacagcacatggaggaccagagccggaaagacttcgaggaggaagatgtgatcttacagccagaaaaaaacgattcattccagaatgtccaaccagatgaacctaaggtcctgaatgaatgcctgagcgtgcaggagaacaataaagctaacaaactgaaccaggtacctattctgaggacccggtttcagaagccgaagcctaatatcgggagaggaacaggacgcagggagatctcaagcaaggaagaggtcctcgagaagatcctcgtgagcggcgaaatggcagctgcgctgcgcgagaccgtccgattggacacgtctcctaaggagatggtgccggcggagattaatacaaaagaaatgcaatcggatctgaaggagactggtcgccgagcgatatccccaagggaaaaaattcttgatgtcattgatgatactatcgagatggaaaccggattaaaagcgatgggtagagagatctgtctaagggagaagacacccgaagtaattgacgccacagaagagatcgacaaggatctggaggaagcaggccggagagagatcagtccccagaaaaacggcccagaagaggttaaaccactcggtgaggtagagacagacctgaaggcgacaggcaacgagtcaagtcctcgggagaagaccccagaggtaaccgacgccaccgaagaaattgacaagaaccttgaggagactggtaggcgaaagatctcacctagagagaacggaccagaggaagtaaagcccgttgacgaaatggagacggacttgaacgcaacgggtagggagtcatccccaagagaaaaaactcctgaagtgatagatgcaaccgaggagatcgacctggaagaaaccgaaagggaggtgtcccctcaggaaaacggactcgaggaagtgaagcccctgggggaaatggagaccgatcttaaggccacagggagggacagcttcccccgtggaaagaccccagaagtgatagacgctattgaggagattgaaattgatctggaagagactgaacgcgaaatcagcccccaagaaaatgggttggaagaagtcaagcccctgggcgagatgcagactgatttaaaagccaccggtcgcgagatctccccacgtgagaagacacctgaagtgatcgatgctactgaagagattgataaggatctcgaggagactgggagacgggagataagccccgaagaaaacgggcctgaggaagtgaagcccgtggacgaaatggaaactgacctgaaaactactggccgcgagggatcttccagagaaaagactagagaagtgattgatgcagccgaagttatagagacagatttagaggagaccgagcgagaaatatcaccccaggagaatgggcccgaagaagtaaagccggtaggcaagatggagactgatctgaaagagatcagagaggagatctctcagcgcgaaaaggtcctggccgaattctccgccattcgcgagaaggaaatcgaccttaaggaaacaggtaagcgagatatccctatcatggagaaagtttctggcaagatggccgttgtcgaggagatggaggccgatctgaaggaaaccggaaaagaaaatttcagagaacgtgggtccgaggagatctgtgttacagaggagaaggtggcagaactgaagcagacagggaagaccgatatctcacccagagaaaatgagctggaggaaacatctacaagccggcaaaccgatacccatctgatgcaaagtggttctaacgatttctccgccgtcccttcgctcgatatccagaatatttcctctgaggtgttgagcatgatgcacactcctgtcgaagagaagagaaacagcgagaaagaagtgtccagccatttttctcacttcaaaatcagcagtcaaacccacgaatctgacaaaactgaagtgcagggaattcagtcaccagatgtccccgagcagttcagtgacattaatctctccaaaagcctgccacaggagcagaaacccctggagattaaaccggcaccgtttgttcggtcccggtttaagcggcccaagcccaatctggcccgggctgccctcaagagggagaccaccgaatccgagaagtatatatatgagaaaaagtccgaaacaaaaaaaatggaaactatcgtaatgcaagaaaataacgagcaaaccgacactctgccatcccagcacgacgaagcaagtctgatgatctccagggagaaggataccttagggcaccgcaacgaggaggccgtcatactgccctgtactcaaactgagcgcaacttgtccccctcaaacagctgcgaaccgaaagaagagtctcagtctgcaccagtacagaaaaatgactctgtggtgtctgtggggaccaataatgtaaacacgtttcagcaggagatgaaggagagtgtgatacagaccgctcggcaagtacgaggtcggctgcagcgtccacgccccaacatacggaagacgggacagaggcagattgtggataaaggggaagccaaagggattattaaggaggggaggactatcctgccaaaggatgaaactgaaaaaaaagtgctcactgtatctaattcccagatcgaaactgaaatcgaagtgccttcaagcgctgtcccagagcataggatgtatgaaaaccagagtcaagtggtactagtagaaaacctgcacgtgaataaaactaacgagacgattcgtcatgaaaataagccatacgtgcctagctcagcacagatgacaaggaggaagttccagaaggctaaacccaacttgggcagggcacactccaaaaaagaggaacctgtgctcgagaaggtgacaaccgaccagagtaaggagggaaagcccgaagatcatcttctccagaaaggcgccagcaacacacagctgcttctgaaggagaaggcagaactgctcacctctctggaagtgtccgcacgaaaggattgcgttgggagcaaagagagtgccctcgccaaaattgatgccgagctggaggaggttgggcccagccgcagggtgggcgaggaaactgtaggggacaactctccctcaagtgttgtcgaagaacaatacctgaacaaattgacatcatgccctcagcctctgaacgagaccagctacagtaagattgccttggatggcaagacgactatttctagcacctctgagtatgagcgcaataggggtgaaaggagaagtcataagaagttcaaacctaatgtgaccagggggaggggctccaagagggtgcgggggaaaacctccaagaaggagccccgtgcaagcaaggccatgctggtgactctgcgcgcatcgcaagaagaggacgacgacgcagatgatttcgagagcgattatgaagaagagtcataccatcttgctccggaagaagtgaacaaggcacctgtgttcgtcccagtggggctgcgctccccagagccagtgtcggcgcagatcgaggaaacaatggaagagctggagattactgtcaacgtgcccgatgtgggatgcatagccgtcgtagaacatgaattacctaacactgacgtgaccaccgaagaaatgaagcaggaggagaacctctctgtgccatttgagatgactaccagcgaacacatccaggacgagcctgggactaacgatggctctactgaggcagccatcactttgcttacaatgggtgacctggtgttacagtctgaaatctcttcagagcagggagatgtgggagtatgcatcatcccacatgtgcacagcaaagataagagccacataccttcctccctggataatgtgaatcacaaaatcgttcacgagtgtcaggaactgtcatctcccgttatcaccacctcccctgcgagttttgaggaaaataaaattgtactggaggagcaaagctcgagggaggagatctccctgatggagaaagtgaaggaaaacgcgacgccaacacgaaacacaataagcaaggtcactagtaacctgcgaatacgcagccggctagccaagccgaaacctaacctcgagaagaccctgggcacaaaccggcttgatgactaccaggaggtatcctccctttgtgttacgaaaggagccgagatggaaactcagcgagagacagagaagaatgcatccaaagccaccgagttggaaaataaaaatttggggcctgttacaaccgccgagaacaaagaccaaagtaagctggcctgtgtacacggcatcaagggcactagcatcagcagcgaagtgaatctcaccgagaggaatgagaaccaggaagagtcctctcaggaagtgcatatgctcagcgtggcacccgtcgcgtcgtccgagacgggtccttgcaccctagggttggaccgggggttaggggaaaacagcgtggaggagccacagatcaaggattcaaaaggtgattccgtactgactctgcccgtccctgaatacacacccacatctatcccagaggtgcaacaggaaaacattatcaatcctcaggatctcactgtgaacctcgtcgctaatgtgccccaggacggcgaggatgagcaagcattcatactgaccctcgttgagatccccgccaatgctgtggaagaatttaccgatgcaacggcccagtttatgcccaacccacttttgcctgcccccatcttggtgaagtcagtgaacactgaagagcgcggtgacatgtctatctgccttccagccacatcagtcggtcaggacgctatgggcctcagtattagtgggcgcgataattccaaaaagccaccggacaatctggacctcgtatcgcgaaagcgctttcagtgccgcctggacaagaatgaccatatcccccccgctaagaaacgatctttgaccctgagggatgactgtcaggagtatactacagaggtgcattccaaagaactcaccaacgtgtttgaggaaactggggaaagccataagggccaggatatctttcttacttcgggcagcacccttacaactccggagcctcagcgacagcaggtagaagcggcctttcaatcccgtggctcaagatctccagatgcctgcatggacaagaatgtcccccagctgccccaggacgagatgatcgtgtccgacaaggaagaacggacagatgctgcccctaagtcacagcagatggattcacgaacctcctcctccaaggctagtctctcccgaccaggacgacgcccactgggctttctaagcttgatttgcagcaaaaattcgctcgagtcagacgaaccaatgcaggttcactctaagaagcgacttaagccattgatccccggcctccgcaagaaattaaaacgcagcaatccattcaatgagtcgcaagaaaaaaatagggaaagttccgatttgctgccctccccctccgtgatcactacccagagcgaaaatatttcgtcatccgcaactcaggtgtcatgcgaccagcctctgttgaaggaggggtataaaagcgcccaaaagcgcgccccacaaggggaggctacaactgttagcgagtacttcttcaacgatatcttcatcgaagtagatgaaactgaatag

SEQ ID NO: 198499 - DNA, 2445 bp, Artificial Sequence
  derived and/or modified sequence
atgttccggcgggcccggctgagcgtgaagcccaacgtgcggcccggcgtcggagcacggggcagtaccgcctcgaacccacagaggggacgggaaagccctcgaccacctgacccagctactgactcggcttcaaaacctgccgagcctacagatgttcccacagtcgacttcggaggcgcagaaccccaggaaaaagccccccgcagcagtaccgaaaagactgggggggacaacgacgtagaggagtcctcaagaagcagcagcactgtgtcccaacgacggaaacggatctcctcgacatcctctttagtgaagtcctcggtatcggtcccttctgaatcgcatcccctgagtaccatcaaccaggaggcacctcagccaaccgcaacttctacaaaggaaaagcagccatgttccgaccggtaccggatctataaggcccagaaactcagagagatgctgaaggaagagctacgtaaggaaaaaaaacagtggaagaataaatacgcgatcaatgagtcacagagaccccccgaccggtccaaaatgacaatgcgagattttatctactatttacccgataacaaccccatgacgtccagtttagaacaagaaaaaaaaactgaaaaaccaagtacaccagtccagactcgggagcaggaaggtaaatccacacctaacgccgaggacaacgagatggaagaagagactgacgacggaccattgttagtcccaagggtgaaggttgctgaagacggctccattattctggatgaggagagtctcacggtcgaagtgctcaggactaagggaccatgtgtcgttgaggagaatgaccccatcttcgagaggggcagcactactacttactcttccttccgcaagaattattactccaagccttggtctaacaaagaaaccgatatgttcttcctggctattagcatggtaggaacggatttcagcatgattggccagcttttccctcaccgtgcccggatcgagattaaaaataagttcaagagggaggagaagacaaatgggtggaggatcgataaagcctttcaggaaaagagacctttcgattttgatttctttgctcacttactccaaaaggtgctggctgaggaggagaagcggaaacagaaatccgtgaagaatcatagcttaaaggagaagaagagcaccaagcctcgcaagaatgtgaaggtcaaaaaagtcgcctgtgaaggtgtaaataacgacccagacgaatctatgtccagtcgcattagcgacacggagaggtcccaaaaggacgctcagacggtggaggaagagtcactgactctgagtagagaggacgccgagcaggtcgctcttgaagtcgaccttaaccaaaagaagcgtcggagaaagaaacaggacggagcaaacgagcttggcgttaataacctgttggagaacgctactgtgcaggctgggccatcaaagggcgagaagcacaagaacaagtgccaggctatacgcccagagctcaaggagggggaatgcagcaaagaacagatgctgtcctgcacccagaacatcgatggcattgtcgggtttgcctcgacagagaaagtagagaaacgtactgatcctatactgtccttgagtaaccagcaggacgccacctccgtagctaccgagtcatccgagtcaagtacatctgatctgccatcgtttgaggtcgggatccgcgccttgtgtgaggtgaacaatgcagagggatcatgcatcgaagaacggaatgtcgacctgaaaaacaattcgttggagatcgaccaaaccgaaaatgtcaagcctatgctccgtgggcgatttcaacgcccaaaacccaatctgagtagagctggcaagaaaagcgtgctgtctcaaggcaagacggagtcagaatctaagaactcccactccaaaacctcagtggagaaaaatcacgtggagaaagataagatgaatactctcgatatcctgagaatggaaacaacagagagagaaaaccctgaggccgaaacagtctctgtgctcggcgagaaaaattgtctgcaggagggttcacagcttaaagcactacgcccagtgcaggtcaggggcagactgcagaagcctaaacccaacgcaggtaaggcagctgaaaggaaggaaattctaatttcacaggaggagataggtgcgaatgtcgaaaaaaatgaaaacgagagctgtgcggacagggacacgccccagcacatggaagatcagtctcggaaagactttgaggaagaagacgtcattctgcaaccagaaaagaacgattcattccagaacgtccagccagatgaacccaaagtgctgaatgagtgcctttcggtccaggagaacaacaaggcaaacaaattgaatcaggtgccaatcctcagaacacgtttccagaagccctag

SEQ ID NO: 198500 - DNA, 2541 bp, Artificial Sequence
  derived and/or modified sequence
atgttccggcgggcccggctgagcgtgaagcccaacgtgcggcccggcgtaggggcaaggggttctaccgcctcgaatccacagcgcgggagagaaagcccccgcccccccgaccctgcaacagatagcgcttcaaagcctgcagaacccactgatgttccgacagtggattttggaggtgcagagccccaggagaaagcaccacggtcttccaccgagaagaccggtggagacaatgacgtcgaggagtcctctcgatctagctccactgtgtcccagagaagaaaacggatctccagtacatcaagcctcgtcaagagctcggtttccgttccttccgaatcacatcctttaagcaccatcaatcaagaggcaccacagccgactgccacctctactaaggagaagcagccatgttccgatcgctaccgtatctataaggcccagaagttgagagaaatgctcaaggaagagctccggaaagaaaaaaagcagtggaaaaacaaatatgctattaatgaatctcagagacctcccgatcgctccaagatgaccatgcgggactttatctattacttgcccgacaataaccccatgacgtcaagtttagaacaggaaaagaagactgagaaacctagcactccagtgcagactcgcgaacaggagggaaaatctactccaaatgctgaagataacgaaatggaagaagagacagatgacgggcctcttctcgtgcctagggttaaagttgccgaggacgggagtattattttggacgaggagtccctgacagttgaagttctgcgaacgaagggcccatgcgtagttgaggagaacgacccaatattcgagcgaggcagcacaaccacttacagttcattccggaagaactattattctaaaccttggagcaacaaggagacggacatgttcttcctggccatttctatggttggaacggacttttctatgattggacagttgttcccacacagggctagaatcgagattaaaaataagttcaaacgcgaggagaagactaacgggtggcgcatcgataaagctttccaggagaagcggcctttcgatttcgacttttttgcccacctgctccagaaggtcttagccgaagaagaaaagcgaaagcaaaagtccgttaaaaaccactcactcaaagagaagaagagcacgaaacctcgcaagaatgtaaaagtgaaaaaagtggcctgtgagggggtgaacaatgacccggatgagtcaatgagttccaggatttctgacaccgagcgctcacagaaggatgcgcagacagtggaggaagagtcactcacactcagccgcgaagatgctgaacaggtagcccttgaagtggacctcaatcagaaaaaacggcgccgaaaaaaacaagacggagcaaatgagctgggcgttaacaatttgctagagaatgccactgtccaggcgggccctagcaagggcgaaaaacacaaaaataagtgccaggcaatacgtcctgagctcaaagaaggagagtgttccaaagagcagatgctctcttgcactcaaaacatcgatggcatcgtgggatttgcgtcaacagaaaaggtggaaaaacggactgaccccattctaagtctctccaaccagcaggatgcaacttcagtggcaacggaatcgtctgagtctagcacgtccgacctccctagttttgaggtgggaatcagggctttatgcgaagtcaataacgccgagggctcatgcatcgaggagcggaatgtagatcttaaaaacaatagcctagagatagatcagactgagaacgtcaagcctatgctgaggggacggttccagaggcccaaacctaacctgagtcgggctggcaagaagtcggtgcttagtcaaggcaagaccgagagtgaatcgaaaaacagccattccaagacctctgtggagaagaatcacgtggaaaaggacaaaatgaatactctggatattctgcgcatggaaaccaccgagcgggagaatcccgaggccgagacagtgagcgttctcggagagaaaaattgtctccaagaaggatcacagctgaaagctctcagaccagtccaggtcagggggcggctgcagaaacctaaacccaatgctggaaaggctgccgaacgcaaggagatacttattagccaggaagagataggagccaatgttgagaagaacgaaaacgaaagctgcgcagatcgtgatactccccaacatatggaggaccagtctaggaaagactttgaagaagaggacgttattctgcaacccgagaaaaatgactcatttcagaacgtgcagccggatgagccaaaagtactcaacgagtgtctgagcgtgcaagagaataacaaggccaacaaattaaaccaggtcccaatccttcgaacacggttccagaagccgaaacccaatattgggaggggtacgggccggcgcgagattagctccaaggaggaggtacttgaaaagatcctgagcctaggcaaatggagacagcattag

SEQ ID NO: 198501 - DNA, 7874 bp, Artificial Sequence
  derived and/or modified sequence
atgtttcgccgagcgaggctgtcagtgaaacctaacgtgagaccaggcgtgggcgctcgcggaagtacggcctccaatcctcaacggggacgggagtcaccaagaccacccgacccagccactgattccgcttccaagccagcagaaccaacggacgtgcctaccgttgactttggcggagcagaaccacaagagaaggcaccacggtctagcacagagaagaccgggggtgataacgatgttgaagagtcaagtcggagcagtagtaccgtttctcaaagacgaaagcgcattagcagcacctcatcactcgttaagtctagtgtcagcgtaccttccgagtcacacccattgtcaacaattaatcaagaggcaccacagcctaccgccacctccacgaaggagaagcagccctgttccgacaggtacagaatatacaaggcacagaaactaagggagatgttgaaggaggagctgaggaaagaaaagaagcagtggaagaataagtacgctattaatgaatcacagcgaccccctgaccggtctaaaatgacgatgcgagattttatctattacctgccggacaataatcccatgacaagctctctggagcaggaaaaaaaaaccgaaaagccatcaacccccgtgcagacccgcgagcaggagggcaagagcacccctaatgccgaggataacgaaatggaggaggagaccgatgacggaccactcctggttccaagagtgaaggtcgcagaggatggatcaatcatccttgacgaggaaagcctgacagtggaggtcttgcgcactaaggggccatgtgtggtggaggagaacgatccgatctttgaacgaggatccactactacttatagttccttccgtaagaactattacagcaaaccctggtccaataaagaaacagatatgttttttttggcaatcagcatggtcggcactgatttctctatgatcggccagctcttcccacacagagctcggattgaaattaagaataaatttaagagggaagagaaaaccaatggttggcgcattgataaagcttttcaggagaagagacctttcgattttgacttctttgctcacctgcttcagaaagtgttggctgaggaagagaagaggaaacaaaagtccgtgaagaaccattccctcaaagaaaagaagagcaccaaacctcggaagaatgtgaaggtgaagaaggtcgcgtgtgagggagtgaataatgacccagacgagagtatgtcttccaggatctcagacaccgaacgaagccagaaagatgcgcagacggttgaggaggagtcattgactttgtcccgcgaagatgccgaacaggtcgccctggaggtggaccttaaccagaagaagcgcaggaggaagaaacaagacggggctaatgagctcggagtcaataatctgttggagaacgcgaccgtccaggctggaccgtctaagggggaaaaacacaaaaacaagtgccaggctatcaggcccgaactcaaggaaggagaatgcagcaaggagcagatgctctcatgtacccagaatattgatgggattgtgggattcgccagcacggaaaaggtggaaaagagaaccgaccccatcctttctctttccaaccagcaggacgcaacatcggttgcaacggaatctagtgaatcgtccaccagtgacctgccttcttttgaggtgggaatccgggctctgtgtgaagtgaacaacgctgagggatcgtgtatcgaggaacgaaacgtcgacctgaaaaataactccctcgaaattgaccagaccgaaaacgtgaagcccatgttgagggggaggtttcagagaccaaagccaaacttaagccgggcagggaaaaaaagcgttctgtcccaggggaaaaccgagtctgaatctaaaaactctcacagcaagacttcggtggagaaaaaccacgtcgaaaaagacaaaatgaataccctcgatatccttcgcatggaaaccaccgaacgggaaaatcctgaggcagagacagtctccgtccttggagagaagaactgtctgcaggaggggagccagttgaaggcactccgccctgtgcaggtaaggggtcgactccaaaaaccaaaacctaatgccggaaaggctgcagagcgaaaagaaatactgatcagccaggaggagattggtgctaatgtcgaaaaaaatgaaaatgagagctgtgccgaccgagataccccccagcacatggaagatcaatcgaggaaagatttcgaggaggaagatgtgatcctgcagccagaaaaaaatgacagctttcaaaacgttcagccagatgagccgaaggtattgaatgaatgtctatccgtgcaagagaataacaaggcaaacaaactcaatcaggtacctatactgcgaacacggtttcagaagccaaagccaaacattggccgaggcactgggaggcgcgaaattagttccaaagaggaggtgcttgagaagatccttgtgagcggagagatggcagccgcactgagagagaccgtccgcttggacacttcacccaaggaaatggtgccggcagaaataaacaccaaagaaatgcagtctgatttgaaagagacaggcaggcgggctatctccccgcgtgagaaaatcttggatgtaatcgacgataccattgaaatggaaacaggcctgaaagccatgggcagagaaatctgcttacgcgaaaaaacccctgaagttattgacgcaaccgaggaaattgacaaagatctagaggaagccggtcggagagagatctccccccagaaaaacggcccagaggaagtgaaacctttgggggaggtggaaactgatctgaaagcaactggaaacgaatcgtcaccgagggagaaaacgcctgaagtgactgatgctactgaggaaatcgataaaaacttggaagaaactggccgtaggaagattagtccacgggagaacgggcctgaggaggtaaagccagtggatgagatggagactgatctgaatgccaccgggagagagagttcacctcgcgagaagacgcccgaagtgattgatgccaccgaagagattgatctggaagaaactgagcgcgaggtctccccccaggagaatgggctcgaggaagtcaagcccctgggcgaaatggagacagacctaaaagctacggggagggattcctttcctaggggaaaaaccccagaggttattgacgccatcgaagaaattgagatcgatcttgaagaaacggagcgggaaatttcccctcaggaaaacggcctggaggaggtaaaaccgttaggtgagatgcagacagatctgaaggctaccggtagagagatctcccctagagagaagacccctgaagtcatcgatgctactgaagagatcgataaggatctagaagagaccggtagaagggaaatttcccccgaggaaaacgggccagaggaggtgaagccagtggatgagatggagacagacctgaagacaacaggtcgggaaggaagctctcgcgaaaaaacaagggaggtgattgatgccgctgaggtgattgagacggatctggaagagacagagagggagattagcccccaggagaacggcccagaggaagtgaaacctgtggggaaaatggagaccgatctcaaggagatcagggaagagatttcccagagagagaaggtcttggcggagtttagtgctatccgagagaaagagattgacctgaaggagactggcaaaagagatatcccgattatggaaaaagtgtcaggcaagatggcagtggttgaagaaatggaagcagatttgaaagagacggggaaagaaaacttcagagagcgcggaagcgaggagatctgtgtcaccgaggagaaggtcgccgagctgaagcagactggaaaaaccgacatatccccgagggaaaatgagttagaggaaaccagcacctcacggcagacagatactcatctcatgcaaagtggctccaacgacttttctgccgtccctagtctggacatccagaacatctcttccgaggtcttgagtatgatgcacacgcccgttgaggagaaaagaaattccgagaaagaggtaagctcacacttttctcacttcaagatatcctcccaaactcacgaaagcgacaagacagaggttcaaggaattcagtctcctgatgtgcctgagcagttctccgatatcaatctctcaaagagcctgccgcaggagcaaaagccactggagattaaaccagccccattcgttagatccagattcaagaggcccaaaccgaacctggctagagcagctctgaaacgcgaaactacagagagtgaaaagtatatctatgagaaaaagtccgaaacgaagaagatggagacaatcgtcatgcaggaaaataacgagcagaccgatacactaccctcccagcacgatgaagcgagcctgatgatctcaagagagaaagatacgctcggacacagaaacgaggaagccgtgattttgccctgcacacaaaccgaacggaacctatctccaagcaacagttgtgagcccaaagaggagtctcagtcagccccagtacaaaagaacgattctgtcgtgtcggtgggaaccaacaacgtgaacaccttccagcaggaaatgaaagagagcgtgattcagacagccagacaggtgcgcggtcgtctgcagcgcccacgccctaatattcggaagaccggacagagacagattgtggacaagggggaggccaaaggtatcattaaagagggaaggacaatactgccgaaagacgagactgaaaagaaggtgctgactgtctcgaattcccagatagaaactgaaattgaagtgccatctagtgccgtgcccgagcataggatgtacgaaaaccaatcccaggttgtgttggtagaaaatttgcatgtgaataagacaaatgaaacaattaggcacgagaataaaccatatgtaccatcgagtgcgcaaatgactagacgaaaattccaaaaggcaaagccaaatctggggagagctcactcaaagaaggaggagcccgtcctggaaaaagtgacaactgaccagtctaaggagggtaagcctgaagatcacctgctccagaaaggcgcttccaatactcagctgcttttgaaggagaaggccgagctattaacaagtttggaggtttcggcccgtaaggattgtgtgggtagtaaggaatcggccctggctaagatcgatgcggagctagaagaagtggggcctagccgccgagtgggtgaggaaactgttggtgacaactctccctctagcgtcgtggaggaacagtatctcaacaagctcacctcttgcccccagccactgaacgagacgagctactctaaaatagccttggacggcaagaccacaatctcaagcacatcagaatacgagcgcaataggggggaacggagatcccacaagaagttcaaaccaaacgtaacccggggacgagggagtaagagagtgagggggaaaacctctaaaaaagagccaagggccagtaaggcaatgctcgtcacccttcgggcttctcaggaggaggacgatgacgctgacgactttgaatccgattacgaggaagaaagctatcatcttgctccagaggaggtaaataaggcccctgtctttgtgcccgtgggcttacggtcaccggagcctgtgagcgcccagattgaggagacgatggaagaactagaaatcactgtaaacgttcctgatgtgggctgcatcgctgttgtggagcatgagctacccaataccgacgtgacaaccgaggaaatgaaacaggaggaaaacctctctgtgccatttgagatgacaactagcgagcacatccaagacgagcccggaacgaatgatggatccacggaggcggcaattacccttctcacaatgggggacctggttctgcagtctgagatcagctctgaacagggagatgtgggcgtgtgcatcatccctcacgtccacagcaaagataaatctcacattccctctagcctggacaacgtgaaccacaagatcgtccatgagtgccaggagctgtcatcacccgtcatcactactagtcctgcaagctttgaggagaataagattgtacttgaggaacagtcttcgcgggaagagataagtctgatggaaaaggtgaaagaaaatgcaactcctactaggaataccatttctaaggtgacaagcaaccttagaattcgttctaggttggcgaaacctaagcctaacctggaaaaaactctcggaacaaataggttggatgactaccaagaggtgtccagcttatgcgtaacaaagggtgcagagatggaaacacaacgtgaaacagaaaagaacgcttcaaaagccactgagctggagaacaaaaatctcggccctgtaaccactgccgaaaacaaagatcagagcaagctggcttgcgtccatgggatcaagggaaccagtatctccagcgaagtgaacttaacagaaaggaacgagaatcaggaagaatctagccaggaggtgcacatgctgagtgtggcccctgtggcttcaagcgagaccgggccatgcactctggggctcgaccggggactgggcgagaactctgttgaggaaccacagatcaaggacagcaaaggtgactccgtccttactctccccgtcccagagtacactcctaccagcattcccgaagtgcagcaggagaacataatcaatcctcaggaccttacggtgaacttagtggccaacgttccccaagacggggaggatgaacaggccttcatcctcactttggtcgaaattcccgctaatgccgtggaggagtttaccgacgccacagcacagttcatgccaaaccccctgttgccggcaccaattcttgtgaaaagtgtgaatacggaggagcgcggtgatatgtccatctgccttccggctacgtcagtgggtcaggacgcgatgggcctgtctatctccggcagggataattctaagaaacccccagacaatttggacctggttagcagaaaacgatttcagtgtagacttgataagaatgatcatatcccgccagccaaaaaacggagcttaaccctgcgcgatgattgccaagagtacaccaccgaagttcattcaaaggaactaacaaatgttttcgaagagacgggagagtcacataaaggccaagatattttcctcacatcagggagtactctcaccacacccgagccccagcggcaacaggtagaagcagccttccagtccagaggatcgcgttcccctgacgcctgtatggataaaaatgtgcctcaacttcctcaggatgaaatgatcgtgagcgataaagaggagaggacagacgccgcacctaagagccagcagatggacagccgaaccagctcgtcaaaagcatcgctctcgagacctggacggcgaccgctgggattcttgtcgctgatatgctctaagaactccctcgagagcgatgaaccaatgcaggtgcattctaagaagaggttaaaacccctgatccctgggttgcggaaaaagctaaagcgcagtaatccatttaacgagtcccaggaaaaaaacagggagagctctgatctgcttcctagcccaagtgttattaccactcagtctgagaacatctccagtagcgctacgcaggttagctgcgatcagccgctgcttaaagaaggatataaatccgcacagaagcgtgctccccaaggcgaagcgacgacggtgagcgagtacttttttaatgatatatttatagaggtggacgaaacggaata

SEQ ID NO: 198502 - DNA, 2445 bp, Artificial Sequence
  derived and/or modified sequence
atgtttcgtcgagcaagactctccgtgaagccgaacgtcagaccaggtgtgggcgctagaggtagtacagcctcaaatccccagcggggacgcgaaagccctaggccaccagacccggctacggactcagcaagcaaacctgctgagcccaccgacgtccccacagtcgacttcggcggagccgagccacaggagaaggcacctcggtcaagcacggagaaaaccggcggagataacgatgtggaggaaagttctcgaagcagctctacagtaagtcagcggagaaaaaggatctcctctaccagctccctcgttaagtcttcagtgtcggtaccaagcgaatctcacccactcagcactattaatcaagaagctccacagccaaccgccacctccactaaagaaaagcaaccatgctccgacaggtaccggatttacaaggcccaaaagctcagggaaatgctgaaagaagagttgcgcaaggaaaagaagcaatggaaaaacaaatatgcaataaatgagagccagcgcccacctgataggagtaagatgactatgagggattttatctactatctcccagataataatccgatgacatccagcttggagcaagagaagaagaccgagaagccaagtacgcccgttcagacgagggagcaagagggcaagtctactccaaatgccgaagacaacgagatggaggaggaaactgacgacgggcctctcttggtcccgcgagtgaaggtggcggaagacggctccatcattttggatgaggagagcctaactgtcgaggtcctgaggactaagggcccatgcgtggtagaggaaaatgacccaatttttgagcgcggaagcaccactacctattcttcattcagaaaaaactactactccaaaccttggtcaaacaaagaaacagacatgttctttctggcgatatccatggtagggacagacttcagtatgatcgggcagctgtttccgcacagagccagaatcgagattaaaaataagttcaagcgcgaagagaagacaaacggatggcgaatagacaaagcctttcaagagaagagaccctttgacttcgacttcttcgctcatttgctgcaaaaggtactcgccgaagaagagaagagaaagcagaagtccgtcaagaaccattcactcaaggaaaagaagagcacaaagccaagaaagaacgtcaaggtaaagaaagtggcatgtgaaggtgtgaataacgaccccgacgaatccatgtctagtcgaatttccgataccgaacgcagtcagaaggatgctcagacggtcgaagaagagagtctgaccctgtcacgcgaggacgccgagcaggtcgcgctagaggtggacctgaaccagaaaaagagacgacgcaagaaacaggacggcgcaaatgagctgggcgtcaacaatttgcttgaaaacgccactgttcaggcagggccttctaagggagagaaacacaagaacaagtgtcaggccatccgacccgaactcaaagagggggaatgtagcaaggagcagatgttgtcttgtacccagaatattgatggcatcgtcgggtttgccagcaccgagaaggtggagaagaggactgatcccatcctgtctctgtctaatcagcaagacgccacttctgttgcaacagagtcctcagaaagctcaacaagcgatttgccatcgttcgaggttggtattagagccctctgtgaagtgaacaacgctgaaggatcctgtatagaggaaagaaatgtggatcttaaaaacaactctctagaaattgatcagacagagaatgtgaagccaatgctgcggggacgctttcaacgccctaaacccaatctcagcagggccggtaaaaagtctgtgttgtctcagggtaaaacggagagtgagtctaaaaattcgcattctaaaacttcggtcgaaaaaaatcatgtcgagaaagataaaatgaacactctggacatcctccgaatggagactactgagagggagaacccagaagccgaaaccgtctcagttctaggagagaagaattgtttgcaagaaggatcacagcttaaagcactccgccctgtgcaggtgaggggtagactgcagaagccaaagcctaacgcagggaaggccgctgagcgaaaggagatcctgatctcgcaggaggagatcggcgctaacgtagagaaaaatgaaaacgaaagttgtgccgaccgggatacaccacagcatatggaagaccagagccggaaggatttcgaagaggaggacgttattctccagccggaaaagaatgattcatttcagaacgtccagcccgacgagcctaaagtcctgaacgagtgccttagtgtccaggaaaataacaaagctaacaaactgaaccaggtacctatcctcagaacacggttccagaaaccctag

SEQ ID NO: 198503 - DNA, 2541 bp, Artificial Sequence
  derived and/or modified sequence
atgttccggagagccagattgtccgtcaagcctaatgttagaccgggagtgggcgcacgaggaagtactgcttccaatcctcagagaggaagggagagtcccagaccccctgacccagcaaccgattccgctagtaagcccgcagagcctacagacgtgcctactgttgactttggcggagctgagccccaggaaaaggctccacgatcttctacggaaaagactggaggagataacgatgtggaagagtccagccgctcctcaagcacagtatcacagagacgcaaacgcataagctccacttccagcctcgtcaaatcaagtgtttcggtacccagcgaaagtcacccactcagtacgattaaccaagaagcaccgcagccaacagctacctccactaaggaaaagcaaccctgctcggataggtatcgcatctacaaggcacagaagctgcgcgaaatgttgaaggaggagctacgtaaggagaaaaagcagtggaagaataagtatgcgattaacgaatcccaaagaccgcctgacaggagtaagatgactatgagggactttatttactacctgcccgacaataatccaatgacctcttctctggagcaagaaaaaaaaacagaaaagccttccacgccagtccagacccgagaacaggaaggaaagtctacaccgaatgccgaagataatgagatggaagaagagactgatgacggaccgctgctcgttcccagagtcaaggttgctgaagatggatcaattatcctcgacgaagagtctcttaccgttgaagtgctaagaaccaaaggaccctgtgtagtagaagaaaacgacccaatctttgaacgcggatctaccacgacatactcctcttttagaaaaaactactatagcaaaccatggagtaataaggaaactgatatgttctttctcgcaatctctatggtcggaacagatttctctatgataggacagttgttcccccaccgggctcgcattgaaataaaaaacaaatttaagcgagaggagaaaacaaacggctggcgaattgataaggcgtttcaggagaaacgcccatttgacttcgacttctttgcccacctgttacagaaagttctggcggaagaggagaagcgaaaacaaaaatccgttaagaaccatagtcttaaggagaagaaaagtacaaaaccaagaaaaaacgtgaaagtcaaaaaggtggcatgtgagggggtcaacaacgaccctgatgaatctatgtcatcacgcattagcgacaccgaacggtctcagaaggacgctcagaccgtcgaggaagaatcactgaccttgtcacgggaggacgcagagcaggtcgccctggaagtcgacctcaatcagaagaagcggaggagaaaaaagcaggacggcgctaacgagctgggcgttaacaatctcctcgagaacgcaaccgtccaagccggaccgtcaaagggggaaaagcataagaataagtgccaggccatccgccctgaactgaaggaaggagagtgttccaaggagcagatgctgagctgtacccagaatatagacggcatcgtgggatttgccagcaccgagaaagtcgagaagcggacagatcccatccttagcctgtcaaatcagcaggacgccacttccgtcgctactgagtcctcagagtcctctacaagcgacctcccctctttcgaagtcggtataagggctctttgcgaagtgaataacgctgaaggaagttgcatcgaagaaagaaatgttgatctgaagaacaattccctggagattgaccagacagagaatgtgaaacctatgcttcgagggaggtttcaaagaccaaaaccaaacctgagccgcgcaggcaaaaaatccgtactgtcccagggaaagactgaaagcgagagcaagaatagtcatagtaagacaagcgtggagaaaaaccacgtggaaaaagacaagatgaacacacttgacatactgcgcatggagactaccgagagagaaaatcccgaggctgagacagtctcggtgctgggagaaaagaactgcctgcaggagggcagccaattgaaggccctacggccagtccaggttcgaggacgtcttcaaaagcctaagcccaatgccggaaaagcggcagagagaaaagaaatcctgatttctcaggaggagattggagctaacgtggagaagaatgagaatgagagctgtgccgatcgggacacccctcagcatatggaagaccaaagtcgaaaggatttcgaggaggaagacgtgatcctccagcctgagaagaacgattccttccagaatgtccagccagacgaaccgaaagtgctgaatgaatgcctgtctgttcaggaaaacaataaggctaacaagcttaatcaggtgcccatcctccgcacacggtttcagaaacctaagccaaacataggcaggggcacaggccgtagagagatttctagtaaagaagaggtgctggaaaagattctttcactcggcaaatggcgccagcactag

SEQ ID NO: 198504 - DNA, 11073 bp, Artificial Sequence
  derived and/or modified sequence
agttgcggcgtcctgtgagcgcggggatgctgggaggagggtgaaatttagccatcggtgtgtggcagggtcatgaaaaagcggcggcggcgggagagaggaggaggcggcggcggggcagtgaaactacggtagctgccccctgagctggtggtgtggctttgtggggagggcgtagttcctaatcccctttccgggcagccgccggggctcggggctgtgagcggccgtgaggctgcctccccgggccccctgcctccgccatgttccgcagggcacgccttagcgtgaagccgaatgtcaggcctggtgtaggcgccaggggctccacagcttccaatccccagcgtggacgggagtctcccaggccgccggatcctgccacggactctgcttccaagcccgcggagcccacagatgtgcccacagtcgatttcggtggagcggagccccaagaaaaggctcctaggagcagtactgaaaagactggtggtgacaatgatgttgaagaatccagtagatcttcctctactgtttcacagagaagaaagcgaatatcaagtacttctagcctggttaagtctagtgtcagtgttccttcagaatctcatcccttatctacaattaatcaagaggctccacagccaactgccacttcaacaaaagagaaacagccatgctcagacagataccgaatatacaaagcccagaaactgagggaaatgttaaaagaagaattgagaaaagagaagaaacaatggaaaaacaaatatgctataaatgaaagtcagaggccaccagatcgttcaaaaatgactatgagagacttcatatattatctaccagataataatccaatgacttcttcactggaacaagaaaagaaaactgaaaagccatcgactccagtccagacaagagagcaagaaggtaagagtactcctaatgctgaagataatgaaatggaagaagagacagatgatgggccattactggttcctcgagtaaaagtggcagaagatggttccattattttggatgaagaaagtttaactgtagaagttttaagaacaaaaggcccttgtgttgttgaagaaaatgaccccatatttgagcgcggttctacaactacatactccagctttaggaaaaactattactctaaaccatggtcaaataaagaaacagatatgttttttttagccatcagcatggtaggaactgacttttctatgatcggacaactttttcctcacagagcaaggatagaaattaagaataaatttaaacgggaagagaaaacaaatggatggagaatagacaaagcattccaggaaaagcgcccttttgacttcgatttttttgctcatttgcttcagaaagttcttgctgaagaagagaaaagaaaacaaaaatctgttaaaaatcacagtttaaaggagaagaaatccaccaaaccacggaaaaatgtaaaagtgaaaaaagttgcctgtgaaggagtgaataatgatccagatgagtctatgagttctagaatttcagacacggaaagatctcagaaggatgctcagacagttgaagaagagtctctgaccttatcaagggaggatgcagagcaggttgcattagaagtagacctaaatcaaaagaaaagaaggaggaagaagcaagatggagctaatgaactgggagtaaacaatcttttagaaaatgccactgttcaggcgggtccttctaaaggagaaaaacacaagaataaatgtcaggctataaggcctgagctaaaggaaggtgaatgcagtaaggagcagatgctttcctgcacacaaaacatagatggcattgtgggttttgcctccactgaaaaagttgagaaaagaactgaccccatcctttcattaagtaatcaacaagatgccacatcagtagcaactgagtcttcagaatcaagcacttcagatttgccttcattcgaagttggaattagagcattgtgtgaggtgaataatgctgagggtagttgtatagaagaaagaaatgttgacctaaaaaataattcactggaaattgatcaaacagaaaatgttaaaccaatgttgagaggtcgcttccaaagacctaaacccaatttgtcaagggctgggaagaaatcagttctttcacaaggcaaaacagagtcagagagcaagaattcacattcaaaaacttcagttgaaaagaaccacgtggaaaaagataaaatgaatacattggacattttgagaatggagactacagagagagagaatccagaagctgaaactgtatctgttttgggtgaaaaaaattgtctgcaggaagggagtcaactaaaggctttaagacctgtacaagtgaggggccgattgcaaaagccaaagccaaatgcaggtaaagctgctgaaagaaaagaaattctcatatcacaggaagaaattggggccaatgtagagaagaatgaaaatgaatcctgtgctgatagagatactcctcaacacatggaagatcaatcgcgtaaagattttgaagaggaagatgtcatattacagcctgagaaaaatgattcttttcaaaatgtgcagccagatgagcccaaggttcttaatgaatgtctaagcgttcaagagaataataaggcaaataaacttaaccaagtcccaattctaaggactcgatttcagaaaccaaagccaaatataggaagaggaactggaaggagagaaatttcctcaaaggaagaggtactagagaagattcttgtctctggggaaatggcggcagcattgagagaaactgtaagactagacacctcaccaaaggagatggtaccagcagagattaatactaaagaaatgcagtcagatttaaaagaaactggaagaagagccatttctcccagggagaagattctagatgtgattgatgacaccatagaaatggagacaggtctgaaagcaatgggaagagagatttgtctaagggagaagacgccagaggtgattgatgccactgaggaaatagacaaagatttggaagaagctggaagaagagaaatatccccacagaaaaatggcccagaggaggttaagcctctaggtgaagtggagacagatttgaaagcaactggaaatgagagttccccaagggagaagacaccagaggtgactgatgccactgaggaaatagacaaaaatttggaagaaactggaagaagaaaaatatccccaagggaaaatggcccagaggaggtcaagcctgtagatgaaatggagacagatttgaacgcaactggaagagagagttctccaagggagaagacaccagaggtgattgatgctactgaggaaatagatttggaagaaactgaaagagaagtatccccacaggaaaatggactagaggaggtcaagcctctaggtgaaatggagacggatttgaaagcaactggaagagacagtttcccaagggggaagacaccagaggtgattgatgccattgaggaaatagagatagatttggaagaaactgaaagagaaatatccccacaggaaaatggcctagaggaggttaagcctctaggtgaaatgcaaacagatttgaaagcaaccggaagggagatttccccaagggagaagacaccagaggtgattgatgccactgaggaaatagacaaagatctggaagaaactggaagaagagaaatatccccagaggaaaatggcccagaggaggtcaagcctgtagatgaaatggagacagacttgaaaacaactggaagagagggttcctcaagggagaagacacgagaggtgattgatgctgctgaggtaatagagacagatttggaagaaactgaaagagaaatatcgccacaggaaaatggcccagaggaggtcaagcctgtaggtaaaatggagacagatttgaaagaaattagagaagaaatttcccaaagggaaaaggtgctagcagagttcagtgctataagggaaaaggagattgatttgaaagaaactggaaaaagagacattcccatcatggagaaagtatcaggaaagatggctgttgttgaagaaatggaggcagatttgaaagaaactggaaaagaaaattttagagagagaggatctgaagagatctgtgttactgaggaaaaggtggcagaattgaaacaaactggaaaaacagacatttctccaagggaaaacgagctagaggagaccagtacctcaagacaaactgacacacatttaatgcagagcggtagcaatgacttcagtgctgtgccttcactagatattcagaacattagcagtgaagtactgtcgatgatgcatacacctgtagaagaaaaaagaaattctgaaaaagaagtatcaagtcacttcagtcatttcaagatttcttcacagactcatgaatctgataaaacagaagtccaggggattcaatctccagatgttccagagcagttttcagatattaatttaagcaaatctcttcctcaagaacagaagccacttgaaattaaaccagcaccttttgtgaggagccgattcaaaagaccaaaaccaaacttagcaagagcagctttgaagagagagactacagaatcagaaaaatatatatatgagaagaaatcagaaaccaagaaaatggagactattgtgatgcaagaaaataatgaacaaactgatactctcccttctcaacatgatgaagcttccctaatgatatcaagagaaaaagacacattaggtcacaggaatgaggaggctgtgatattgccatgtacacagactgaaaggaacctttcaccttcaaattcttgtgaacctaaagaggagtctcagtcagcaccagtccagaaaaatgactcagttgtttctgtggggactaataatgtaaacactttccagcaagaaatgaaggaaagtgttatccaaactgctcgacaagtaaggggccgacttcagagaccgagaccaaatataagaaagacaggacagaggcaaatagtagacaaaggtgaagccaaaggcataattaaggaaggaagaacgatattaccaaaagatgaaactgaaaagaaagtcttaactgtgtcaaattctcaaattgaaactgaaattgaagttccatcgtccgcagttccagaacacagaatgtatgaaaatcaaagtcaggtggttcttgtagaaaaccttcatgttaacaaaacaaatgaaacaatcagacatgaaaataaaccgtatgttcctagttcagcacaaatgacaagaaggaaattccaaaaggctaagccaaatttgggaagagcacacagtaagaaagaggaaccagttttagaaaaagtcacaacagatcagagcaaggaaggcaagccagaagatcatttgctgcagaaaggagcttccaacacccagctccttctaaaagaaaaagctgagcttctgacatctctggaggtttcagcaagaaaagattgtgtaggttccaaagagtctgctttggcaaaaatagatgcggaattagaagaagttggaccatcaagaagggttggagaggaaactgtaggagataattcaccatcttcagttgttgaagagcaatatctcaataaactaacaagctgtccacaaccgttaaacgaaacaagttactctaaaattgccctggatgggaaaacaactatctcttctacatctgagtatgagagaaatcgtggtgaaaggagaagtcataaaaagttcaaaccaaatgtcaccagaggtcgtggatcaaaacgagttcggggtaagacctctaagaaggaacctagagcttccaaggccatgctggtgactcttcgggcttcccaggaagaagatgatgatgctgacgattttgagtctgactatgaggaagaaagctatcatcttgctcccgaagaagtaaacaaagctccagtatttgtacctgttggtctcagatctcctgaacctgtttctgctcagattgaggaaacaatggaagagcttgaaataactgtgaatgtcccagatgtaggatgcatagctgttgttgaacatgagctaccaaacacagatgtgactactgaagaaatgaaacaagaagaaaatttgagtgtaccgtttgaaatgaccacaagtgaacatatccaagatgaaccaggtaccaatgatggaagcaccgaagctgcaataactttacttacaatgggagatctagtattgcagtcagagatcagtagtgaacagggtgatgtaggagtatgtataattcctcatgttcattcaaaggataaaagccatattccttctagcctagataatgtaaatcacaaaattgttcatgaatgtcaggaactttcttcacctgtcattactacatctcctgcatcatttgaagaaaacaagattgtattggaggaacaaagttccagagaagaaataagtttaatggagaaagtaaaggagaatgctacaccaaccaggaatacaatttctaaagtgaccagtaatttgagaataagaagtaggcttgctaagcctaaaccaaatcttgagaagactttagggaccaacaggcttgatgattatcaggaagtttccagtttgtgtgtaaccaaaggggcagaaatggaaactcaaagagaaacagagaaaaatgcttccaaagcaacagaattggaaaataaaaacctcggaccagttacaacagcagagaataaggatcagagcaaattggcatgtgtacatggtatcaaagggaccagtatttcttcagaagtaaacctaactgaaagaaacgaaaatcaagaagagagctctcaggaggttcacatgttgtcagttgctccagttgcttcctctgagacagggccctgcacacttggtttggataggggtcttggtgaaaattctgttgaagagccccagataaaggactctaaaggagacagtgtgcttacacttcctgtgccagagtatacaccaacaagtattccagaagtccaacaagagaatataatcaatcctcaagacctaacagtgaatctagttgctaatgtacctcaagatggagaagatgaacaagcctttattttaactctggtggaaatcccagccaatgcagtagaagaatttactgatgccactgcacagttcatgccaaaccctttactgccagctcccatattggtcaaatcagtgaataccgaagaaaggggtgacatgagtatttgtttaccagcaacttcagttggtcaagatgccatgggtttatctatttctggaagagataattctaaaaagccgcctgataatttggatcttgtatctaggaagagatttcaatgcaggcttgataaaaatgaccacattcctcctgccaaaaaacgttcactcactttaagagatgactgtcaagaatataccactgaggtgcactcaaaggaattaacaaatgtttttgaggaaacaggggagtctcacaagggacaagatatttttcttacctcaggaagcacactgacaactccagaacctcaaagacagcaagttgaagcagcttttcagagtagaggatctagatctcctgatgcatgcatggacaagaatgtgcctcagttacctcaggatgaaatgattgtgtctgataaggaagaaagaactgatgctgctcctaagtctcagcaaatggatagcagaacatcgtcttctaaagcctcactatccagacctggcagaagacccctgggatttttatctttaatatgctcaaagaatagtttggagtctgatgaacctatgcaagtccatagtaagaaacgcctaaaacctcttatacctggattaagaaagaaattgaaaagatctaatccattcaatgaaagccaggaaaaaaatcgagagtcctctgatctgcttccatctccaagtgttattactactcaatctgagaatattagcagctcagcaactcaggtttcttgtgatcagcccttactgaaagaaggatataaaagtgcccaaaagcgggcccctcaaggggaggcaaccacagtctctgaatatttcttcaatgatatcttcattgaagtggatgaaacagaataaaacaatcttttctctttttcttttttaaattaggtctaggatttccagagtcaattacatcaacaaaacagtatttagagcaaaatatcactgtcttatttttctttaggttgattttgaatacttaatgagcttgatttgaagcttttataatcagtggaaaacatttctgaggttcctttcattctgactgattcagcattttgcaaatagcaagcaattaagactgctttctcagacagaaataacaactcttgtttacattttgactcttcctgtgctaagcacacatggacatttgggaatgttgtggatatatgtctctgtatgaattgcagtgcagacagatttgggggttaattgtatcatatttaacatttagcaacttcttttgtgaagattttttatttttagggggagatgatgaaggatgaaggctttttcatttgcttctaagtacagtcatgtatcacataatgaagtttaagtcaatgatggaccacatatattacagtggtcccatgcaattaaaatggagataaattcctatcaactagtgacattatagccatcataacacagtgcattgcttttttatgtttagatatgtttagatacacaaatacttactattgtgttacaactgcctacagtattcagcatagtaacacattgtagaggtttgtagccgaggagcaataggctataccacatagcctcagtctgtacggtgtgtagcagcctgtaccatctcagtgtttgtaagtacactctgcgttgtttcacacaagatcacctaacaaggcaattcttagaacatgtagttaagggacacgtgactatatgtgaaaacaaattgtcaaacttcactttagtatggcaaatgttaaagaacttttctattatcagctgtttgtctgactgaaaaatacatatttttctaattcatggtgatgtaacattagtcctaattgaaaaactagtatttaaacataattatttataaagatgacacatcaaagggcttatttatttttaaattttttatttaaaaggatattcagttttagctatttttacccctcagattgtagataaagaaggcattaaatttatgtttgtctcctttttctgtttaattttaaagatatttaaaatgatataactaaaaatgtttagctggtgtatatgttttgaatacctttttcccctcagtttagtatattgactttgtactgtaaatttttctgcttttcttggataatctcaggattttcatgaggatagggggaactcaactttatttatgagacaaaatttccatacaaagctcaatctcctttatacacccacagacataatattagtttttaaaaagccaatttcttcatagttttttcccattaaattctcaaggaacacttggatctttaagcacggaacataatcatgatgttaaaaacagagaaaataaggctttataaagttaatgattatcatcagtatgaatttaaggtttgttttaatttcaagatttgattttttatacgtgtaattctattatctacccaagcagatctgtagtggttccaattagacttctcaaacagcaaatttatcctgattttatttgaaaagcctcttggattgatagtatagtagctcaggcattggaaactttctgcaaactgttttgggtttgcaggccagatggtctctgtggcagctactcagctctgcaatttcagtgtgaaagaagccatagacagtacttgaatgaaggactgtggctggattggccttttagtttgaccccctacattaggccccaaattttcttaccctgaggtgctgatatctgtatggatgagttatttgtcactaaagttatgagttgtgcctaaaagttaaaactgttgactgtattatgtaatgatcagtatttcagttgggaagatattttagagtctagataattatgtttgtatattgaaaaaatggtggccagtttttaagttccttaatagaagagaattatgtctcagcacatataacagtaatgctaatttattgaaactactgctgttagagcacttcttattcattgtcttttagtgaaatttatggcgtaacactttgtcagagaggaggctatataattcggagcggaaattgtctataagtaggcatttatttcatgattgatatgtcacagaaatcatggtagtaaatcacattgctatttgaataccctgtttttgtaagtttttaaaactcatattctgaaaagatttcattctcttagtgttagcttgggagttagattgccatgattaaactattatttatccttgtgtaatattagtttttaactttaacatctgtttctttttaatctataatgagctagttttatggaaaatggaatttcttactatataaagaatacagagactcattgtattagagaatcaagtcagccagctaaagtatcctactgttaaatccttaaacctaattttggaaaagagaaagttaatcaatgtatttaccttacatgttggaaagaactatgttaggtctgattcatgtgaagaagatgttgcaaaggatttatttcacaaattttaaaggagatatgagtaaaagtttttatcttttcttgactttttctcctgaacacttatgtcttagcaagtggtcaacatgaggatttgaacgcctaattgttggtaaatggttgaggcatgacaaaaatattaatatccactgtttaccatcatgttatttgaaacaaaagtgaccatgtatactatcttgcttgaagaagtctttgacagaaaaagcaatatcatgtcatttataaattttcttgttctaaagaaagcagttatatatatatataaattatgtaaataaaagttattttatatca

SEQ ID NO: 198505 - DNA, 4427 bp, Artificial Sequence
  derived and/or modified sequence
agttgcggcgtcctgtgagcgcggggatgctgggaggagggtgaaatttagccatcggtgtgtggcagggtcatgaaaaagcggcggcggcgggagagaggaggaggcggcggcggggcagtgaaactacggtagctgccccctgagctggtggtgtggctttgtggggagggcgtagttcctaatcccctttccgggcagccgccggggctcggggctgtgagcggccgtgaggctgcctccccgggccccctgcctccgccatgttccgcagggcacgccttagcgtgaagccgaatgtcaggcctggtgtaggcgccaggggctccacagcttccaatccccagcgtggacgggagtctcccaggccgccggatcctgccacggactctgcttccaagcccgcggagcccacagatgtgcccacagtcgatttcggtggagcggagccccaagaaaaggctcctaggagcagtactgaaaagactggtggtgacaatgatgttgaagaatccagtagatcttcctctactgtttcacagagaagaaagcgaatatcaagtacttctagcctggttaagtctagtgtcagtgttccttcagaatctcatcccttatctacaattaatcaagaggctccacagccaactgccacttcaacaaaagagaaacagccatgctcagacagataccgaatatacaaagcccagaaactgagggaaatgttaaaagaagaattgagaaaagagaagaaacaatggaaaaacaaatatgctataaatgaaagtcagaggccaccagatcgttcaaaaatgactatgagagacttcatatattatctaccagataataatccaatgacttcttcactggaacaagaaaagaaaactgaaaagccatcgactccagtccagacaagagagcaagaaggtaagagtactcctaatgctgaagataatgaaatggaagaagagacagatgatgggccattactggttcctcgagtaaaagtggcagaagatggttccattattttggatgaagaaagtttaactgtagaagttttaagaacaaaaggcccttgtgttgttgaagaaaatgaccccatatttgagcgcggttctacaactacatactccagctttaggaaaaactattactctaaaccatggtcaaataaagaaacagatatgttttttttagccatcagcatggtaggaactgacttttctatgatcggacaactttttcctcacagagcaaggatagaaattaagaataaatttaaacgggaagagaaaacaaatggatggagaatagacaaagcattccaggaaaagcgcccttttgacttcgatttttttgctcatttgcttcagaaagttcttgctgaagaagagaaaagaaaacaaaaatctgttaaaaatcacagtttaaaggagaagaaatccaccaaaccacggaaaaatgtaaaagtgaaaaaagttgcctgtgaaggagtgaataatgatccagatgagtctatgagttctagaatttcagacacggaaagatctcagaaggatgctcagacagttgaagaagagtctctgaccttatcaagggaggatgcagagcaggttgcattagaagtagacctaaatcaaaagaaaagaaggaggaagaagcaagatggagctaatgaactgggagtaaacaatcttttagaaaatgccactgttcaggcgggtccttctaaaggagaaaaacacaagaataaatgtcaggctataaggcctgagctaaaggaaggtgaatgcagtaaggagcagatgctttcctgcacacaaaacatagatggcattgtgggttttgcctccactgaaaaagttgagaaaagaactgaccccatcctttcattaagtaatcaacaagatgccacatcagtagcaactgagtcttcagaatcaagcacttcagatttgccttcattcgaagttggaattagagcattgtgtgaggtgaataatgctgagggtagttgtatagaagaaagaaatgttgacctaaaaaataattcactggaaattgatcaaacagaaaatgttaaaccaatgttgagaggtcgcttccaaagacctaaacccaatttgtcaagggctgggaagaaatcagttctttcacaaggcaaaacagagtcagagagcaagaattcacattcaaaaacttcagttgaaaagaaccacgtggaaaaagataaaatgaatacattggacattttgagaatggagactacagagagagagaatccagaagctgaaactgtatctgttttgggtgaaaaaaattgtctgcaggaagggagtcaactaaaggctttaagacctgtacaagtgaggggccgattgcaaaagccaaagccaaatgcaggtaaagctgctgaaagaaaagaaattctcatatcacaggaagaaattggggccaatgtagagaagaatgaaaatgaatcctgtgctgatagagatactcctcaacacatggaagatcaatcgcgtaaagattttgaagaggaagatgtcatattacagcctgagaaaaatgattcttttcaaaatgtgcagccagatgagcccaaggttcttaatgaatgtctaagcgttcaagagaataataaggcaaataaacttaaccaagtcccaattctaaggactcgatttcagaaaccaaagccaaatataggaagaggaactggaaggagagaaatttcctcaaaggaagaggtactagagaagattcttgtctctggggaaatggcggcagcattgagagaaactgtaagactagacacctcaccaaaggagatggtaccagcagagattaatactaaagaaatgcagtcagatttaaaagaaactggaagaagagccatttctcccagggagaagattctagatgtgattgatgacaccatagaaatggagacaggtctgaaagcaatgggaagagagatttgtctaagggagaagacgccagaggtgattgatgccactgaggaaatagacaaagatttggaagaagctggaagaagagaaatatccccacagaaaaatggcccagaggaggttaagcctctaggtgaagtggagacagatttgaaagcaactggaaatgagagttccccaagggagaagacaccagaggtgactgatgccactgaggaaatagacaaaaatttggaagaaactggaagaagaaaaatatccccaagggaaaatggcccagaggaggtcaagcctgtagatgaaatggagacagatttgaacgcaactggaagagagagttctccaagggagaagacaccagaggtgattgatgctactgaggaaatagatttggaagaaactgaaagagaagtatccccacaggaaaatggactagaggaggtcaagcctctaggtgaaatggagacggatttgaaagcaactggaagagacagtttcccaagggggaagacaccagaggtgattgatgccattgaggaaatagagatagatttggaagaaactgaaagagaaatatccccacaggaaaatggcctagaggaggttaagcctctaggtgaaatgcaaacagatttgaaagcaaccggaagggagatttccccaagggagaagacaccagaggtgattgatgccactgaggaaatagacaaagatctggaagaaactggaagaagagaaatatccccagaggaaaatggcccagaggaggtcaagcctgtagatgaaatggagacagacttgaaaacaactggaagagagggttcctcaagggagaagacacgagaggtgattgatgctgctgaggtaatagagacagatttggaagaaactgaaagagaaatatcgccacaggaaaatggcccagaggaggtcaagcctgtaggtaaaatggagacagatttgaaagaaattagagaagaaatttcccaaagggaaaaggtgctagcagagttcagtgctataagggaaaaggagattgatttgaaagaaactggaaaaagagacattcccatcatggagaaagtatcaggaaagatggctgttgttgaagaaatggaggcagatttgaaagaaactggaaaagaaaattttagagagagaggatctgaagagatctgtgttactgaggaaaaggtggcagaattgaaacaaactggaaaaacagacatttctccaagggaaaacgagctagaggagaccagtacctcaagacaaactgacacacatttaatgcagagcggtagcaatgacttcagtgctgtgccttcactagatattcaggtatgtatttttctgtcctttaaaagttttttgaatttttcagaggaaataaataattccatgattattttgtccttaagtccaacaacacttaaaaatctctaa

SEQ ID NO: 198506 - DNA, 2861 bp, Artificial Sequence
  derived and/or modified sequence
aatttagccatcggtgtgtggcagggtcatgaaaaagcggcggcggcgggagagaggaggaggcggcggcggggcagtgaaactacggtagctgccccctgagctggtggtgtggctttgtggggagggcgtagttcctaatcccctttccgggcagccgccggggctcggggctgtgagcggccgtgaggctgcctccccgggccccctgcctccgccatgttccgcagggcacgccttagcgtgaagccgaatgtcaggcctggtgtaggcgccaggggctccacagcttccaatccccagcgtggacgggagtctcccaggccgccggatcctgccacggactctgcttccaagcccgcggagcccacagatgtgcccacagtcgatttcggtggagcggagccccaagaaaaggctcctaggagcagtactgaaaagactggtggtgacaatgatgttgaagaatccagtagatcttcctctactgtttcacagagaagaaagcgaatatcaagtacttctagcctggttaagtctagtgtcagtgttccttcagaatctcatcccttatctacaattaatcaagaggctccacagccaactgccacttcaacaaaagagaaacagccatgctcagacagataccgaatatacaaagcccagaaactgagggaaatgttaaaagaagaattgagaaaagagaagaaacaatggaaaaacaaatatgctataaatgaaagtcagaggccaccagatcgttcaaaaatgactatgagagacttcatatattatctaccagataataatccaatgacttcttcactggaacaagaaaagaaaactgaaaagccatcgactccagtccagacaagagagcaagaaggtaagagtactcctaatgctgaagataatgaaatggaagaagagacagatgatgggccattactggttcctcgagtaaaagtggcagaagatggttccattattttggatgaagaaagtttaactgtagaagttttaagaacaaaaggcccttgtgttgttgaagaaaatgaccccatatttgagcgcggttctacaactacatactccagctttaggaaaaactattactctaaaccatggtcaaataaagaaacagatatgttttttttagccatcagcatggtaggaactgacttttctatgatcggacaactttttcctcacagagcaaggatagaaattaagaataaatttaaacgggaagagaaaacaaatggatggagaatagacaaagcattccaggaaaagcgcccttttgacttcgatttttttgctcatttgcttcagaaagttcttgctgaagaagagaaaagaaaacaaaaatctgttaaaaatcacagtttaaaggagaagaaatccaccaaaccacggaaaaatgtaaaagtgaaaaaagttgcctgtgaaggagtgaataatgatccagatgagtctatgagttctagaatttcagacacggaaagatctcagaaggatgctcagacagttgaagaagagtctctgaccttatcaagggaggatgcagagcaggttgcattagaagtagacctaaatcaaaagaaaagaaggaggaagaagcaagatggagctaatgaactgggagtaaacaatcttttagaaaatgccactgttcaggcgggtccttctaaaggagaaaaacacaagaataaatgtcaggctataaggcctgagctaaaggaaggtgaatgcagtaaggagcagatgctttcctgcacacaaaacatagatggcattgtgggttttgcctccactgaaaaagttgagaaaagaactgaccccatcctttcattaagtaatcaacaagatgccacatcagtagcaactgagtcttcagaatcaagcacttcagatttgccttcattcgaagttggaattagagcattgtgtgaggtgaataatgctgagggtagttgtatagaagaaagaaatgttgacctaaaaaataattcactggaaattgatcaaacagaaaatgttaaaccaatgttgagaggtcgcttccaaagacctaaacccaatttgtcaagggctgggaagaaatcagttctttcacaaggcaaaacagagtcagagagcaagaattcacattcaaaaacttcagttgaaaagaaccacgtggaaaaagataaaatgaatacattggacattttgagaatggagactacagagagagagaatccagaagctgaaactgtatctgttttgggtgaaaaaaattgtctgcaggaagggagtcaactaaaggctttaagacctgtacaagtgaggggccgattgcaaaagccaaagccaaatgcaggtaaagctgctgaaagaaaagaaattctcatatcacaggaagaaattggggccaatgtagagaagaatgaaaatgaatcctgtgctgatagagatactcctcaacacatggaagatcaatcgcgtaaagattttgaagaggaagatgtcatattacagcctgagaaaaatgattcttttcaaaatgtgcagccagatgagcccaaggttcttaatgaatgtctaagcgttcaagagaataataaggcaaataaacttaaccaagtcccaattctaaggactcgatttcagaaaccaaagccaaatataggaagaggaactggaaggagagaaatttcctcaaaggaagaggtactagagaagattttgtctctggggaaatggcggcagcattgagagaaactgtaagactagacacctcaccaaaggagatggtaccagcagagattaatactaaagaaatgcagtcagatttaaaagaaactggaagaagagcc

SEQ ID NO: 198507 - DNA, 7875 bp, Artificial Sequence
  derived and/or modified sequence
atgttcagaagagccagactgagcgtgaagcccaacgtgagacccggcgtgggcgccagaggcagcaccgccagcaacccccagagaggcagagagagccccagaccccccgaccccgccaccgacagcgccagcaagcccgccgagcccaccgacgtgcccaccgtggacttcggcggcgccgagccccaggagaaggcccccagaagcagcaccgagaagaccggcggcgacaacgacgtggaggagagcagcagaagcagcagcaccgtgagccagagaagaaagagaatcagcagcaccagcagcctggtgaagagcagcgtgagcgtgcccagcgagagccaccccctgagcaccatcaaccaggaggccccccagcccaccgccaccagcaccaaggagaagcagccctgcagcgacagatacagaatctacaaggcccagaagctgagagagatgctgaaggaggagctgagaaaggagaagaagcagtggaagaacaagtacgccatcaacgagagccagagaccccccgacagaagcaagatgaccatgagagacttcatctactacctgcccgacaacaaccccatgaccagcagcctggagcaggagaagaagaccgagaagcccagcacccccgtgcagaccagagagcaggagggcaagagcacccccaacgccgaggacaacgagatggaggaggagaccgacgacggccccctgctggtgcccagagtgaaggtggccgaggacggcagcatcatcctggacgaggagagcctgaccgtggaggtgctgagaaccaagggcccctgcgtggtggaggagaacgaccccatcttcgagagaggcagcaccaccacctacagcagcttcagaaagaactactacagcaagccctggagcaacaaggagaccgacatgttcttcctggccatcagcatggtgggcaccgacttcagcatgatcggccagctgttcccccacagagccagaatcgagatcaagaacaagttcaagagagaggagaagaccaacggctggagaatcgacaaggccttccaggagaagagacccttcgacttcgacttcttcgcccacctgctgcagaaggtgctggccgaggaggagaagagaaagcagaagagcgtgaagaaccacagcctgaaggagaagaagagcaccaagcccagaaagaacgtgaaggtgaagaaggtggcctgcgagggcgtgaacaacgaccccgacgagagcatgagcagcagaatcagcgacaccgagagaagccagaaggacgcccagaccgtggaggaggagagcctgaccctgagcagagaggacgccgagcaggtggccctggaggtggacctgaaccagaagaagagaagaagaaagaagcaggacggcgccaacgagctgggcgtgaacaacctgctggagaacgccaccgtgcaggccggccccagcaagggcgagaagcacaagaacaagtgccaggccatcagacccgagctgaaggagggcgagtgcagcaaggagcagatgctgagctgcacccagaacatcgacggcatcgtgggcttcgccagcaccgagaaggtggagaagagaaccgaccccatcctgagcctgagcaaccagcaggacgccaccagcgtggccaccgagagcagcgagagcagcaccagcgacctgcccagcttcgaggtgggcatcagagccctgtgcgaggtgaacaacgccgagggcagctgcatcgaggagagaaacgtggacctgaagaacaacagcctggagatcgaccagaccgagaacgtgaagcccatgctgagaggcagattccagagacccaagcccaacctgagcagagccggcaagaagagcgtgctgagccagggcaagaccgagagcgagagcaagaacagccacagcaagaccagcgtggagaagaaccacgtggagaaggacaagatgaacaccctggacatcctgagaatggagaccaccgagagagagaaccccgaggccgagaccgtgagcgtgctgggcgagaagaactgcctgcaggagggcagccagctgaaggccctgagacccgtgcaggtgagaggcagactgcagaagcccaagcccaacgccggcaaggccgccgagagaaaggagatcctgatcagccaggaggagatcggcgccaacgtggagaagaacgagaacgagagctgcgccgacagagacaccccccagcacatggaggaccagagcagaaaggacttcgaggaggaggacgtgatcctgcagcccgagaagaacgacagcttccagaacgtgcagcccgacgagcccaaggtgctgaacgagtgcctgagcgtgcaggagaacaacaaggccaacaagctgaaccaggtgcccatcctgagaaccagattccagaagcccaagcccaacatcggcagaggcaccggcagaagagagatcagcagcaaggaggaggtgctggagaagatcctggtgagcggcgagatggccgccgccctgagagagaccgtgagactggacaccagccccaaggagatggtgcccgccgagatcaacaccaaggagatgcagagcgacctgaaggagaccggcagaagagccatcagccccagagagaagatcctggacgtgatcgacgacaccatcgagatggagaccggcctgaaggccatgggcagagagatctgcctgagagagaagacccccgaggtgatcgacgccaccgaggagatcgacaaggacctggaggaggccggcagaagagagatcagcccccagaagaacggccccgaggaggtgaagcccctgggcgaggtggagaccgacctgaaggccaccggcaacgagagcagccccagagagaagacccccgaggtgaccgacgccaccgaggagatcgacaagaacctggaggagaccggcagaagaaagatcagccccagagagaacggccccgaggaggtgaagcccgtggacgagatggagaccgacctgaacgccaccggcagagagagcagccccagagagaagacccccgaggtgatcgacgccaccgaggagatcgacctggaggagaccgagagagaggtgagcccccaggagaacggcctggaggaggtgaagcccctgggcgagatggagaccgacctgaaggccaccggcagagacagcttccccagaggcaagacccccgaggtgatcgacgccatcgaggagatcgagatcgacctggaggagaccgagagagagatcagcccccaggagaacggcctggaggaggtgaagcccctgggcgagatgcagaccgacctgaaggccaccggcagagagatcagccccagagagaagacccccgaggtgatcgacgccaccgaggagatcgacaaggacctggaggagaccggcagaagagagatcagccccgaggagaacggccccgaggaggtgaagcccgtggacgagatggagaccgacctgaagaccaccggcagagagggcagcagcagagagaagaccagagaggtgatcgacgccgccgaggtgatcgagaccgacctggaggagaccgagagagagatcagcccccaggagaacggccccgaggaggtgaagcccgtgggcaagatggagaccgacctgaaggagatcagagaggagatcagccagagagagaaggtgctggccgagttcagcgccatcagagagaaggagatcgacctgaaggagaccggcaagagagacatccccatcatggagaaggtgagcggcaagatggccgtggtggaggagatggaggccgacctgaaggagaccggcaaggagaacttcagagagagaggcagcgaggagatctgcgtgaccgaggagaaggtggccgagctgaagcagaccggcaagaccgacatcagccccagagagaacgagctggaggagaccagcaccagcagacagaccgacacccacctgatgcagagcggcagcaacgacttcagcgccgtgcccagcctggacatccagaacatcagcagcgaggtgctgagcatgatgcacacccccgtggaggagaagagaaacagcgagaaggaggtgagcagccacttcagccacttcaagatcagcagccagacccacgagagcgacaagaccgaggtgcagggcatccagagccccgacgtgcccgagcagttcagcgacatcaacctgagcaagagcctgccccaggagcagaagcccctggagatcaagcccgcccccttcgtgagaagcagattcaagagacccaagcccaacctggccagagccgccctgaagagagagaccaccgagagcgagaagtacatctacgagaagaagagcgagaccaagaagatggagaccatcgtgatgcaggagaacaacgagcagaccgacaccctgcccagccagcacgacgaggccagcctgatgatcagcagagagaaggacaccctgggccacagaaacgaggaggccgtgatcctgccctgcacccagaccgagagaaacctgagccccagcaacagctgcgagcccaaggaggagagccagagcgcccccgtgcagaagaacgacagcgtggtgagcgtgggcaccaacaacgtgaacaccttccagcaggagatgaaggagagcgtgatccagaccgccagacaggtgagaggcagactgcagagacccagacccaacatcagaaagaccggccagagacagatcgtggacaagggcgaggccaagggcatcatcaaggagggcagaaccatcctgcccaaggacgagaccgagaagaaggtgctgaccgtgagcaacagccagatcgagaccgagatcgaggtgcccagcagcgccgtgcccgagcacagaatgtacgagaaccagagccaggtggtgctggtggagaacctgcacgtgaacaagaccaacgagaccatcagacacgagaacaagccctacgtgcccagcagcgcccagatgaccagaagaaagttccagaaggccaagcccaacctgggcagagcccacagcaagaaggaggagcccgtgctggagaaggtgaccaccgaccagagcaaggagggcaagcccgaggaccacctgctgcagaagggcgccagcaacacccagctgctgctgaaggagaaggccgagctgctgaccagcctggaggtgagcgccagaaaggactgcgtgggcagcaaggagagcgccctggccaagatcgacgccgagctggaggaggtgggccccagcagaagagtgggcgaggagaccgtgggcgacaacagccccagcagcgtggtggaggagcagtacctgaacaagctgaccagctgcccccagcccctgaacgagaccagctacagcaagatcgccctggacggcaagaccaccatcagcagcaccagcgagtacgagagaaacagaggcgagagaagaagccacaagaagttcaagcccaacgtgaccagaggcagaggcagcaagagagtgagaggcaagaccagcaagaaggagcccagagccagcaaggccatgctggtgaccctgagagccagccaggaggaggacgacgacgccgacgacttcgagagcgactacgaggaggagagctaccacctggcccccgaggaggtgaacaaggcccccgtgttcgtgcccgtgggcctgagaagccccgagcccgtgagcgcccagatcgaggagaccatggaggagctggagatcaccgtgaacgtgcccgacgtgggctgcatcgccgtggtggagcacgagctgcccaacaccgacgtgaccaccgaggagatgaagcaggaggagaacctgagcgtgcccttcgagatgaccaccagcgagcacatccaggacgagcccggcaccaacgacggcagcaccgaggccgccatcaccctgctgaccatgggcgacctggtgctgcagagcgagatcagcagcgagcagggcgacgtgggcgtgtgcatcatcccccacgtgcacagcaaggacaagagccacatccccagcagcctggacaacgtgaaccacaagatcgtgcacgagtgccaggagctgagcagccccgtgatcaccaccagccccgccagcttcgaggagaacaagatcgtgctggaggagcagagcagcagagaggagatcagcctgatggagaaggtgaaggagaacgccacccccaccagaaacaccatcagcaaggtgaccagcaacctgagaatcagaagcagactggccaagcccaagcccaacctggagaagaccctgggcaccaacagactggacgactaccaggaggtgagcagcctgtgcgtgaccaagggcgccgagatggagacccagagagagaccgagaagaacgccagcaaggccaccgagctggagaacaagaacctgggccccgtgaccaccgccgagaacaaggaccagagcaagctggcctgcgtgcacggcatcaagggcaccagcatcagcagcgaggtgaacctgaccgagagaaacgagaaccaggaggagagcagccaggaggtgcacatgctgagcgtggcccccgtggccagcagcgagaccggcccctgcaccctgggcctggacagaggcctgggcgagaacagcgtggaggagccccagatcaaggacagcaagggcgacagcgtgctgaccctgcccgtgcccgagtacacccccaccagcatccccgaggtgcagcaggagaacatcatcaacccccaggacctgaccgtgaacctggtggccaacgtgccccaggacggcgaggacgagcaggccttcatcctgaccctggtggagatccccgccaacgccgtggaggagttcaccgacgccaccgcccagttcatgcccaaccccctgctgcccgcccccatcctggtgaagagcgtgaacaccgaggagagaggcgacatgagcatctgcctgcccgccaccagcgtgggccaggacgccatgggcctgagcatcagcggcagagacaacagcaagaagccccccgacaacctggacctggtgagcagaaagagattccagtgcagactggacaagaacgaccacatcccccccgccaagaagagaagcctgaccctgagagacgactgccaggagtacaccaccgaggtgcacagcaaggagctgaccaacgtgttcgaggagaccggcgagagccacaagggccaggacatcttcctgaccagcggcagcaccctgaccacccccgagccccagagacagcaggtggaggccgccttccagagcagaggcagcagaagccccgacgcctgcatggacaagaacgtgccccagctgccccaggacgagatgatcgtgagcgacaaggaggagagaaccgacgccgcccccaagagccagcagatggacagcagaaccagcagcagcaaggccagcctgagcagacccggcagaagacccctgggcttcctgagcctgatctgcagcaagaacagcctggagagcgacgagcccatgcaggtgcacagcaagaagagactgaagcccctgatccccggcctgagaaagaagctgaagagaagcaaccccttcaacgagagccaggagaagaacagagagagcagcgacctgctgcccagccccagcgtgatcaccacccagagcgagaacatcagcagcagcgccacccaggtgagctgcgaccagcccctgctgaaggagggctacaagagcgcccagaagagagccccccagggcgaggccaccaccgtgagcgagtacttcttcaacgacatcttcatcgaggtggacgagaccgagtag

SEQ ID NO: 198508 - DNA, 2445 bp, Artificial Sequence
  derived and/or modified sequence
atgttcagaagagccagactgagcgtgaagcccaacgtgagacccggcgtgggcgccagaggcagcaccgccagcaacccccagagaggcagagagagccccagaccccccgaccccgccaccgacagcgccagcaagcccgccgagcccaccgacgtgcccaccgtggacttcggcggcgccgagccccaggagaaggcccccagaagcagcaccgagaagaccggcggcgacaacgacgtggaggagagcagcagaagcagcagcaccgtgagccagagaagaaagagaatcagcagcaccagcagcctggtgaagagcagcgtgagcgtgcccagcgagagccaccccctgagcaccatcaaccaggaggccccccagcccaccgccaccagcaccaaggagaagcagccctgcagcgacagatacagaatctacaaggcccagaagctgagagagatgctgaaggaggagctgagaaaggagaagaagcagtggaagaacaagtacgccatcaacgagagccagagaccccccgacagaagcaagatgaccatgagagacttcatctactacctgcccgacaacaaccccatgaccagcagcctggagcaggagaagaagaccgagaagcccagcacccccgtgcagaccagagagcaggagggcaagagcacccccaacgccgaggacaacgagatggaggaggagaccgacgacggccccctgctggtgcccagagtgaaggtggccgaggacggcagcatcatcctggacgaggagagcctgaccgtggaggtgctgagaaccaagggcccctgcgtggtggaggagaacgaccccatcttcgagagaggcagcaccaccacctacagcagcttcagaaagaactactacagcaagccctggagcaacaaggagaccgacatgttcttcctggccatcagcatggtgggcaccgacttcagcatgatcggccagctgttcccccacagagccagaatcgagatcaagaacaagttcaagagagaggagaagaccaacggctggagaatcgacaaggccttccaggagaagagacccttcgacttcgacttcttcgcccacctgctgcagaaggtgctggccgaggaggagaagagaaagcagaagagcgtgaagaaccacagcctgaaggagaagaagagcaccaagcccagaaagaacgtgaaggtgaagaaggtggcctgcgagggcgtgaacaacgaccccgacgagagcatgagcagcagaatcagcgacaccgagagaagccagaaggacgcccagaccgtggaggaggagagcctgaccctgagcagagaggacgccgagcaggtggccctggaggtggacctgaaccagaagaagagaagaagaaagaagcaggacggcgccaacgagctgggcgtgaacaacctgctggagaacgccaccgtgcaggccggccccagcaagggcgagaagcacaagaacaagtgccaggccatcagacccgagctgaaggagggcgagtgcagcaaggagcagatgctgagctgcacccagaacatcgacggcatcgtgggcttcgccagcaccgagaaggtggagaagagaaccgaccccatcctgagcctgagcaaccagcaggacgccaccagcgtggccaccgagagcagcgagagcagcaccagcgacctgcccagcttcgaggtgggcatcagagccctgtgcgaggtgaacaacgccgagggcagctgcatcgaggagagaaacgtggacctgaagaacaacagcctggagatcgaccagaccgagaacgtgaagcccatgctgagaggcagattccagagacccaagcccaacctgagcagagccggcaagaagagcgtgctgagccagggcaagaccgagagcgagagcaagaacagccacagcaagaccagcgtggagaagaaccacgtggagaaggacaagatgaacaccctggacatcctgagaatggagaccaccgagagagagaaccccgaggccgagaccgtgagcgtgctgggcgagaagaactgcctgcaggagggcagccagctgaaggccctgagacccgtgcaggtgagaggcagactgcagaagcccaagcccaacgccggcaaggccgccgagagaaaggagatcctgatcagccaggaggagatcggcgccaacgtggagaagaacgagaacgagagctgcgccgacagagacaccccccagcacatggaggaccagagcagaaaggacttcgaggaggaggacgtgatcctgcagcccgagaagaacgacagcttccagaacgtgcagcccgacgagcccaaggtgctgaacgagtgcctgagcgtgcaggagaacaacaaggccaacaagctgaaccaggtgcccatcctgagaaccagattccagaagccctag

SEQ ID NO: 198509 - DNA, 2541 bp, Artificial Sequence
  derived and/or modified sequence
atgttcagaagagccagactgagcgtgaagcccaacgtgagacccggcgtgggcgccagaggcagcaccgccagcaacccccagagaggcagagagagccccagaccccccgaccccgccaccgacagcgccagcaagcccgccgagcccaccgacgtgcccaccgtggacttcggcggcgccgagccccaggagaaggcccccagaagcagcaccgagaagaccggcggcgacaacgacgtggaggagagcagcagaagcagcagcaccgtgagccagagaagaaagagaatcagcagcaccagcagcctggtgaagagcagcgtgagcgtgcccagcgagagccaccccctgagcaccatcaaccaggaggccccccagcccaccgccaccagcaccaaggagaagcagccctgcagcgacagatacagaatctacaaggcccagaagctgagagagatgctgaaggaggagctgagaaaggagaagaagcagtggaagaacaagtacgccatcaacgagagccagagaccccccgacagaagcaagatgaccatgagagacttcatctactacctgcccgacaacaaccccatgaccagcagcctggagcaggagaagaagaccgagaagcccagcacccccgtgcagaccagagagcaggagggcaagagcacccccaacgccgaggacaacgagatggaggaggagaccgacgacggccccctgctggtgcccagagtgaaggtggccgaggacggcagcatcatcctggacgaggagagcctgaccgtggaggtgctgagaaccaagggcccctgcgtggtggaggagaacgaccccatcttcgagagaggcagcaccaccacctacagcagcttcagaaagaactactacagcaagccctggagcaacaaggagaccgacatgttcttcctggccatcagcatggtgggcaccgacttcagcatgatcggccagctgttcccccacagagccagaatcgagatcaagaacaagttcaagagagaggagaagaccaacggctggagaatcgacaaggccttccaggagaagagacccttcgacttcgacttcttcgcccacctgctgcagaaggtgctggccgaggaggagaagagaaagcagaagagcgtgaagaaccacagcctgaaggagaagaagagcaccaagcccagaaagaacgtgaaggtgaagaaggtggcctgcgagggcgtgaacaacgaccccgacgagagcatgagcagcagaatcagcgacaccgagagaagccagaaggacgcccagaccgtggaggaggagagcctgaccctgagcagagaggacgccgagcaggtggccctggaggtggacctgaaccagaagaagagaagaagaaagaagcaggacggcgccaacgagctgggcgtgaacaacctgctggagaacgccaccgtgcaggccggccccagcaagggcgagaagcacaagaacaagtgccaggccatcagacccgagctgaaggagggcgagtgcagcaaggagcagatgctgagctgcacccagaacatcgacggcatcgtgggcttcgccagcaccgagaaggtggagaagagaaccgaccccatcctgagcctgagcaaccagcaggacgccaccagcgtggccaccgagagcagcgagagcagcaccagcgacctgcccagcttcgaggtgggcatcagagccctgtgcgaggtgaacaacgccgagggcagctgcatcgaggagagaaacgtggacctgaagaacaacagcctggagatcgaccagaccgagaacgtgaagcccatgctgagaggcagattccagagacccaagcccaacctgagcagagccggcaagaagagcgtgctgagccagggcaagaccgagagcgagagcaagaacagccacagcaagaccagcgtggagaagaaccacgtggagaaggacaagatgaacaccctggacatcctgagaatggagaccaccgagagagagaaccccgaggccgagaccgtgagcgtgctgggcgagaagaactgcctgcaggagggcagccagctgaaggccctgagacccgtgcaggtgagaggcagactgcagaagcccaagcccaacgccggcaaggccgccgagagaaaggagatcctgatcagccaggaggagatcggcgccaacgtggagaagaacgagaacgagagctgcgccgacagagacaccccccagcacatggaggaccagagcagaaaggacttcgaggaggaggacgtgatcctgcagcccgagaagaacgacagcttccagaacgtgcagcccgacgagcccaaggtgctgaacgagtgcctgagcgtgcaggagaacaacaaggccaacaagctgaaccaggtgcccatcctgagaaccagattccagaagcccaagcccaacatcggcagaggcaccggcagaagagagatcagcagcaaggaggaggtgctggagaagatcctgagcctgggcaagtggagacagcactag

SEQ ID NO: 198510 - protein, 306 aa, Artificial Sequence [sequence omitted]

SEQ ID NO: 198511 - DNA, 921 bp, Artificial Sequence
  derived and/or modified sequence
atggcctcaaattttaatgatatagtgaaacaggggtatgtcaggatccgtagccgcagattaggaatctaccagaggtgctggctggtgttcaaaaaagctagttccaagggcccaaaaaggctggaaaaattcagtgatgagcgcgccgcgtactttagatgttaccacaaggtgacggagctcaacaacgttaagaatgtagcaaggctgcctaaaagcaccaaaaagcacgccatcgggatctattttaacgatgacacaagcaaaaccttcgcctgcgaatccgacctggaagctgacgagtggtgtaaggtgcttcaaatggagtgcgtgggcacaaggattaacgatatatccctgggggaacccgaccttctggctactggagtggagcgtgaacagagtgagcgattcaatgtctatctgatgccctctccgaacctggacgtccatggagagtgcgctctgcagatcacctacgaatacatctgcctgtgggatgtacaaaatcctagggtaaaacttatctcctggccactctccgctctgaggcgttatggaagggatactacgtggtttacgttcgaggccgggaggatgtgtgagaccggtgaggggctattcatcttccaaacacgcgatggagaagccatttatcaaaaggtgcactcagcagctcttgccatcgcagagcaacatgagaggctgttgcagtccgtgaaaaactccatgcttcagatgaaaatgagcgaacgggccgcttctctctctaccatggtcccactgccacggtctgcctattggcagcacatcaccaggcagcatagcaccggccagctctaccgcctgcaagatgtgtccagcccattgaaattgcacaggacggagacgttccccgcctaccggtccgagcattag

SEQ ID NO: 198512 - DNA, 921 bp, Artificial Sequence
  derived and/or modified sequence
atggccagcaacttcaatgacatcgtgaagcagggctacgtgcgcatccgcagccggcggctgggcatctaccagcgctgctggctggtgttcaagaaggccagcagcaagggccccaagaggctggagaagttcagtgatgagcgggccgcctacttccgctgctaccacaaggtgacagagctgaacaacgtgaagaatgtggcccggctgcccaagagcaccaagaagcacgccatcggcatctacttcaatgatgacaccagcaagacctttgcctgtgagagtgacctggaggctgatgagtggtgcaaggtgctgcagatggagtgtgtgggcacccgcatcaatgacatcagcctgggggagccagacctgctggccactggagtggagcgggagcagagcgagcgcttcaacgtgtacctgatgcccagccccaacctggatgtgcacggggagtgtgccctgcagatcacctatgagtacatctgcctgtgggatgtgcagaacccccgggtgaagctgatctcctggcccctgagcgccctgcggcgctatggccgggacaccacctggttcacctttgaggccggccgcatgtgtgagaccggggagggcctcttcatcttccagaccagagatggagaggccatctaccagaaggtgcacagcgctgccctggccatcgccgagcagcacgagcggctgctgcagagcgtgaagaacagcatgctgcagatgaagatgtctgagcgggccgccagcctgagcaccatggtgcccctgcccaggtctgcctactggcagcacatcacccggcagcacagcacaggccagctgtaccgcctgcaggatgtgagcagccccctgaagctgcacaggacagagaccttccctgcctacagaagtgagcactag

SEQ ID NO: 198513 - DNA, 921 bp, Artificial Sequence
  derived and/or modified sequence
atggccagcaacttcaacgacatcgtgaagcagggctacgtgcggataaggtcccgccggctcggtatctaccaaagatgttggctcgtcttcaaaaaggcttcttctaaagggccaaaacggcttgagaagttcagtgacgagagagctgcctattttcggtgctaccacaaagtgaccgagctcaataacgtgaagaacgtggccagattgccaaaatcaacaaagaaacacgccattggaatatacttcaatgatgatacttccaaaacattcgcatgcgagtccgacctggaagccgacgaatggtgtaaagtgttgcagatggaatgcgtgggaactcggataaatgacattagtttgggcgaaccagatcttcttgccacaggtgtggagagggagcagtcagagcgctttaatgtctatctaatgcctagccccaacctcgacgtgcatggcgagtgcgcattacagatcacgtacgaatatatatgcctgtgggacgtgcagaaccctcgcgtgaagctgatcagttggccgctgagcgcattgcggagatatgggagagatactacatggttcacctttgaggctggtcggatgtgtgagacaggagaagggctgttcatattccagacacgtgatggggaagctatctaccagaaggtgcattccgccgccctggctattgctgaacagcacgagaggcttttgcagtccgtaaagaattcaatgctgcagatgaaaatgagtgagagggctgcctcactttccactatggtgccattgccaagaagcgcctattggcaacatattacaagacagcactccactggccagctctatcggctgcaggatgtgagctctcccttaaaattgcacaggacagaaacttttccagcataccgttcagaacactag

SEQ ID NO: 198514 - DNA, 921 bp, Artificial Sequence
  derived and/or modified sequence
atggcatccaacttcaatgatatcgtcaaacagggatatgtgcgcattaggtcccggaggctgggcatttatcaacgctgttggctggtgttcaagaaagcctctagtaaaggacccaaacgtttagagaagtttagcgacgagcgagccgcttatttcagatgctaccacaaggtgaccgaactgaacaacgtgaagaatgtcgcccgactgcctaagagcactaagaaacacgcgatcggaatttatttcaacgacgatacctcaaaaacctttgcatgtgaatccgacctcgaggccgacgaatggtgtaaggtgctccaaatggaatgcgtcggcacacggattaacgacatttctcttggtgagccggacctgcttgctacgggcgttgagcgggaacaatctgaaagatttaatgtctacctcatgccctcccccaacctggacgtccacggcgagtgcgctctccagattacttatgagtacatttgtctttgggacgtccaaaatcccagagttaagctgatctcctggccgctgagcgccttgagacggtatggcagagatacaacgtggttcaccttcgaggctggtcggatgtgtgagacgggcgagggtctgtttattttccagacccgcgacggagaggccatctatcagaaagtacacagtgccgctctggcaatagccgaacagcatgaaaggctactgcagagtgtgaagaactctatgctccagatgaagatgtccgagagggccgcatccctgagtacaatggtacctctgccacgcagcgcatattggcagcacatcacccgccaacacagcaccgggcagttatacaggctccaggacgtgtcctcccctctgaagttgcatagaacagaaaccttccccgcttatcggagcgaacattag

SEQ ID NO: 198515 - DNA, 921 bp, Artificial Sequence
  derived and/or modified sequence
atggccagcaacttcaacgacatcgtgaagcagggctacgtgagaatcagaagcagaagactgggcatctaccagagatgctggctggtgttcaagaaggccagcagcaagggccccaagagactggagaagttcagcgacgagagagccgcctacttcagatgctaccacaaggtgaccgagctgaacaacgtgaagaacgtggccagactgcccaagagcaccaagaagcacgccatcggcatctacttcaacgacgacaccagcaagaccttcgcctgcgagagcgacctggaggccgacgagtggtgcaaggtgctgcagatggagtgcgtgggcaccagaatcaacgacatcagcctgggcgagcccgacctgctggccaccggcgtggagagagagcagagcgagagattcaacgtgtacctgatgcccagccccaacctggacgtgcacggcgagtgcgccctgcagatcacctacgagtacatctgcctgtgggacgtgcagaaccccagagtgaagctgatcagctggcccctgagcgccctgagaagatacggcagagacaccacctggttcaccttcgaggccggcagaatgtgcgagaccggcgagggcctgttcatcttccagaccagagacggcgaggccatctaccagaaggtgcacagcgccgccctggccatcgccgagcagcacgagagactgctgcagagcgtgaagaacagcatgctgcagatgaagatgagcgagagagccgccagcctgagcaccatggtgcccctgcccagaagcgcctactggcagcacatcaccagacagcacagcaccggccagctgtacagactgcaggacgtgagcagccccctgaagctgcacagaaccgagaccttccccgcctacagaagcgagcactag

SEQ ID NO: 198516 - DNA, 1963 bp, Artificial Sequence
  derived and/or modified sequence
ttctcctccttctcggccgggaggaggcagggctggatccctcagccgccgccgctcctcctcctggcaggccggccgcggagtcagctgacgccggcgctccagcctcgcctccccgcgccgcgctctgcgctccccgaaagtggctgcaagccggccgcccactgtcagggttggggggacagagaaagtgatgtgcgccttctaaagcctcgcccagcgccgccgaagcagcttcacctctccaactttctcccaccgactgcttgtcttgaccctgccctccaccctccccagagccacttcgggtgcgcgctcttgggtaaagggggggtcaccggctgtctgggatggcttccaattttaatgacatagtgaagcaagggtacgtgaggatccggagcagacgcctcgggatttatcagcgatgctggttagtattcaagaaagcttcaagcaaaggtccaaaaagactggagaaattttctgatgaacgtgctgcatatttcaggtgttatcataaggttacagaactcaataatgtgaagaacgtagctcgattgccaaaaagcaccaagaaacatgccatagggatttatttcaatgacgatacctccaagacttttgcttgcgaatcagatcttgaggctgatgagtggtgcaaagtactccagatggagtgtgtaggaacacggatcaatgacatcagccttggagagcctgacttactggccactggggttgagagagaacagagtgagagattcaatgtgtatttgatgccatctcctaacttagatgtacatggcgaatgtgccttgcagattacatatgagtatatctgtctttgggacgtccagaatcccagagtcaaactcatctcttggccgctaagcgccctgcggcggtatggacgtgatactacgtggttcacttttgaggcagggaggatgtgtgagactggtgaagggctgtttatctttcagacccgagacggggaggccatctatcagaaagtccactctgctgccttggccatagccgagcagcacgagcgcttgctacagagtgtgaaaaactcgatgctccagatgaagatgagtgagcgggccgcctcgctgagcaccatggtgcccctgcctcgcagcgcctactggcagcacatcacacggcagcacagcacgggacagctctaccgcttgcaagatgtttccagccctctgaagcttcatcgaacagagacttttccagcctacagatctgagcactgacagtaactgccaagaattgttaacacacttgtgatgtgtcagccacagattcacccaggaggtcacagaatgacagcaagggaaatgacgaccaagagaagaagcttaaagtcctggctaattgtgtggtcattggaaaactctgcaatacaataattttctttattttctttttcttttttaaattcttagtgtaattgaaacgtgctctatagatattgactctgtgttccctcttttacagctggacagaaagaagtcaatgtcacgaaatgattttctattgtagatactttgtcccttgcacttctctgaatctgtccttttgtggattcttgtgattttccttccaagtgtttcagttgtatgacagtcagtattgacaataaaatggcttttaattatttgttatttgtttacaccctattcctcagttattattactgtggttctgattaactactggaaattatatttgattatatcaccaattagttaaatcagtgcttcgactcactcttatctgttctgttcaaaactatttgttcaaagaacccgttagtgttgtttacagggttacagtttctctcacatgctttcctcacccctttacccccctttttgaaagcctttattttgttcggagtctcttcataaaacatttgaaaataaaagatcattcttcacccata

SEQ ID NO: 198517 - protein, 1321 aa, Artificial Sequence
  derived and/or modified sequence
MVLTLGESWPVLVGRRFLSLSAADGSDGSHDSWDVERVAEWPWLSGTIRAVSHTDVTKKDLKVCVEFDGESWRKRRWIEVYSLLRRAFLVEHNLVLAERKSPEISERIVQWPAITYKPLLDKAGLGSITSVRFLGDQQRVFLSKDLLKPIQDVNSLRLSLTDNQIVSKEFQALIVKHLDESHLLKGDKNLVGSEVKIYSLDPSTQWFSATVINGNPASKTLQVNCEEIPALKIVDPSLIHVEVVHDNLVTCGNSARIGAVKRKSSENNGTLVSKQAKSCSEASPSMCPVQSVPTTVFKEILLGCTAATPPSKDPRQQSTPQAANSPPNLGAKIPQGCHKQSLPEEISSCLNTKSEALRTKPDVCKAGLLSKSSQIGTGDLKILTEPKGSCTQPKTNTDQENRLESVPQALTGLPKECLPTKASSKAELEIANPPELQKHLEHAPSPSDVSNAPEVKAGVNSDSPNNCSGKKVEPSALACRSQNLKESSVKVDNESCCSRSNNKIQNAPSRKSVLTDPAKLKKLQQSGEAFVQDDSCVNIVAQLPKCRECRLDSLRKDKEQQKDSPVFCRFFHFRRLQFNKHGVLRVEGFLTPNKYDNEAIGLWLPLTKNVVGIDLDTAKYILANIGDHFCQMVISEKEAMSTIEPHRQVAWKRAVKGVREMCDVCDTTIFNLHWVCPRCGFGVCVDCYRMKRKNCQQGAAYKTFSWLKCVKSQIHEPENLMPTQIIPGKALYDVGDIVHSVRAKWGIKANCPCSNRQFKLFSKPASKEDLKQTSLAGEKPTLGAVLQQNPSVLEPAAVGGEAASKPAGSMKPACPASTSPLNWLADLTSGNVNKENKEKQPTMPILKNEIKCLPPLPPLSKSSTVLHTFNSTILTPVSNNNSGFLRNLLNSSTGKTENGLKNTPKILDDIFASLVQNKTTSDLSKRPQGLTIKPSILGFDTPHYWLCDNRLLCLQDPNNKSNWNVFRECWKQGQPVMVSGVHHKLNSELWKPESFRKEFGEQEVDLVNCRTNEIITGATVGDFWDGFEDVPNRLKNEKEPMVLKLKDWPPGEDFRDMMPSRFDDLMANIPLPEYTRRDGKLNLASRLPNYFVRPDLGPKMYNAYGLITPEDRKYGTTNLHLDVSDAANVMVYVGIPKGQCEQEEEVLKTIQDGDSDELTIKRFIEGKEKPGALWHIYAAKDTEKIREFLKKVSEEQGQENPADHDPIHDQSWYLDRSLRKRLHQEYGVQGWAIVQFLGDVVFIPAGAPHQVHNLYSCIKVAEDFVSPEHVKHCFWLTQEFRYLSQTHTNHEDKLQVKNVIYHAVKDAVAMLKASESSFGKP

SEQ ID NO: 198518 - protein, 711 aa, Artificial Sequence
  derived and/or modified sequence
MVLTLGESWPVLVGRRFLSLSAADGSDGSHDSWDVERVAEWPWLSGTIRAVSHTDVTKKDLKVCVEFDGESWRKRRWIEVYSLLRRAFLVEHNLVLAERKSPEISERIVQWPAITYKPLLDKAGLGSITSVRFLGDQQRVFLSKDLLKPIQDVNSLRLSLTDNQIVSKEFQALIVKHLDESHLLKGDKNLVGSEVKIYSLDPSTQWFSATVINGNPASKTLQVNCEEIPALKIVDPSLIHVEVVHDNLVTCGNSARIGAVKRKSSENNGTLVSKQAKSCSEASPSMCPVQSVPTTVFKEILLGCTAATPPSKDPRQQSTPQAANSPPNLGAKIPQGCHKQSLPEEISSCLNTKSEALRTKPDVCKAGLLSKSSQIGTGDLKILTEPKGSCTQPKTNTDQENRLESVPQALTGLPKECLPTKASSKAELEIANPPELQKHLEHAPSPSDVSNAPEVKAGVNSDSPNNCSGKKVEPSALACRSQNLKESSVKVDNESCCSRSNNKIQNAPSRKSVLTDPAKLKKLQQSGEAFVQDDSCVNIVAQLPKCRECRLDSLRKDKEQQKDSPVFCRFFHFRRLQFNKHGVLRVEGFLTPNKYDNEAIGLWLPLTKNVVGIDLDTAKYILANIGDHFCQMVISEKEAMSTIEPHRQVAWKRAVKGVREMCDVCDTTIFNLHWVCPRCGFGVCVDCYRMKRKNCQQGENRFDSPPAPLHS

SEQ ID NO: 198519 - protein, 1327 aa, Artificial Sequence
  derived and/or modified sequence
MVLTLGESWPVLVGRRFLSLSAADGSDGSHDSWDVERVAEWPWLSGTIRAVSHTDVTKKDLKVCVEFDGESWRKRRWIEVYSLLRRAFLVEHNLVLAERKSPEISERIVQWPAITYKPLLDKAGLGSITSVRFLGDQQRVFLSKDLLKPIQDVNSLRLSLTDNQIVSKEFQALIVKHLDESHLLKGDKNLVGSEVKIYSLDPSTQWFSATVINGNPASKTLQVNCEEIPALKIVDPSLIHVEVVHDNLVTCGNSARIGAVKRKSSENNGTLVSKQAKSCSEASPSMCPVQSVPTTVFKEILLGCTAATPPSKDPRQQSTPQAANSPPNLGAKIPQGCHKQSLPEEISSCLNTKSEALRTKPDVCKAGLLSKSSQIGTGDLKILTEPKGSCTQPKTNTDQENRLESVPQALTGLPKECLPTKASSKAELEIANPPELQKHLEHAPSPSDVSNAPEVKAGVNSDSPNNCSGKKVEPSALACRSQNLKESSVKVDNESCCSRSNNKIQNAPSRKSVLTDPAKLKKLQQSGEAFVQDDSCVNIVAQLPKCRECRLDSLRKDKEQQKDSPVFCRFFHFRRLQFNKHGVLRVEGFLTPNKYDNEAIGLWLPLTKNVVGIDLDTAKYILANIGDHFCQMVISEKEAMSTIEPHRQVAWKRAVKGVREMCDVCDTTIFNLHWVCPRCGFGVCVDCYRMKRKNCQQGAAYKTFSWLKCVKSQIHEPENLMPTQIIPGKALYDVGDIVHSVRAKWGIKANCPCSNRQFKLFSKPASKEDLKQTSLAGEKPTLGAVLQQNPSVLEPAAVGGEAASKPAGSMKPACPASTSPLNWLADLTSGNVNKENKEKQPTMPILKNEIKCLPPLPPLSKSSTVLHTFNSTILTPVSNNNSGFLRNLLNSSTGKTENGLKNTPKILDDIFASLVQNKTTSDLSKRPQGLTIKPSILGFDTPHYWLCDNRLLCLQDPNNKSNWNVFRECWKQGQPVMVSGVHHKLNSELWKPESFRKEFGEQEVDLVNCRTNEIITGATVGDFWDGFEDVPNRLKNEKEPMVLKLKDWPPGEDFRDMMPSRFDDLMANIPLPEYTRRDGKLNLASRLPNYFVRPDLGPKMYNAYGLITPEDRKYGTTNLHLDVSDAANVMVYVGIPKGQCEQEEEVLKTIQDGDSDELTIKRFIEGKEKPGALWHIYAAKDTEKIREFLKKVSEEQGQENPADHDPIHDQSWYLDRSLRKRLHQEYGVQGWAIVQFLGDVVFIPAGAPHQVHNLYSCIKVAEDFVSPEHVKHCFWLTQEFRYLSQTHTNHEDKLQVKNVIYHAVKDAVAMLKVNPVLANLNLPAHWK

SEQ ID NO: 198520 - protein, 1269 aa, Artificial Sequence
  derived and/or modified sequence
MVLTLGESWPVLVGRRFLSLSAADGSDGSHDSWDVERVAEWPWLSGTIRAVSHTDVTKKDLKTYKPLLDKAGLGSITSVRFLGDQQRVFLSKDLLKPIQDVNSLRLSLTDNQIVSKEFQALIVKHLDESHLLKGDKNLVGSEVKIYSLDPSTQWFSATVINGNPASKTLQVNCEEIPALKIVDPSLIHVEVVHDNLVTCGNSARIGAVKRKSSENNGTLVSKQAKSCSEASPSMCPVQSVPTTVFKEILLGCTAATPPSKDPRQQSTPQAANSPPNLGAKIPQGCHKQSLPEEISSCLNTKSEALRTKPDVCKAGLLSKSSQIGTGDLKILTEPKGSCTQPKTNTDQENRLESVPQALTGLPKECLPTKASSKAELEIANPPELQKHLEHAPSPSDVSNAPEVKAGVNSDSPNNCSGKKVEPSALACRSQNLKESSVKVDNESCCSRSNNKIQNAPSRKSVLTDPAKLKKLQQSGEAFVQDDSCVNIVAQLPKCRECRLDSLRKDKEQQKDSPVFCRFFHFRRLQFNKHGVLRVEGFLTPNKYDNEAIGLWLPLTKNVVGIDLDTAKYILANIGDHFCQMVISEKEAMSTIEPHRQVAWKRAVKGVREMCDVCDTTIFNLHWVCPRCGFGVCVDCYRMKRKNCQQGAAYKTFSWLKCVKSQIHEPENLMPTQIIPGKALYDVGDIVHSVRAKWGIKANCPCSNRQFKLFSKPASKEDLKQTSLAGEKPTLGAVLQQNPSVLEPAAVGGEAASKPAGSMKPACPASTSPLNWLADLTSGNVNKENKEKQPTMPILKNEIKCLPPLPPLSKSSTVLHTFNSTILTPVSNNNSGFLRNLLNSSTGKTENGLKNTPKILDDIFASLVQNKTTSDLSKRPQGLTIKPSILGFDTPHYWLCDNRLLCLQDPNNKSNWNVFRECWKQGQPVMVSGVHHKLNSELWKPESFRKEFGEQEVDLVNCRTNEIITGATVGDFWDGFEDVPNRLKNEKEPMVLKLKDWPPGEDFRDMMPSRFDDLMANIPLPEYTRRDGKLNLASRLPNYFVRPDLGPKMYNAYGLITPEDRKYGTTNLHLDVSDAANVMVYVGIPKGQCEQEEEVLKTIQDGDSDELTIKRFIEGKEKPGALWHIYAAKDTEKIREFLKKVSEEQGQENPADHDPIHDQSWYLDRSLRKRLHQEYGVQGWAIVQFLGDVVFIPAGAPHQVHNLYSCIKVAEDFVSPEHVKHCFWLTQEFRYLSQTHTNHEDKLQVKNVIYHAVKDAVAMLKASESSFGKP

SEQ ID NO: 198521 - DNA, 4907 bp, Artificial Sequence
  derived and/or modified sequence
taatgggggtcgcccgggagtcggaagggggaggggaaagggaggaggcagccaaggaattgtttttttctctggccccgccctcgcccggggggccaatggtgatgatctgtttcccccggagcctcgcccagctcctgtgtttcagccaatgagcggcggaagcggctccgaggggggcgggtccgggaggctgtgcgtgtcttgtgagagctcttgaaccaagtcagcgctggagtcggctaggcggctggaaacggcggctgccgccggtgactcagggaggcgggaggcgggggaggagctcttcctgcaggcgtggaaaccatggtgctcacgctcggagaaagttggccggtattggtggggaggaggtttctcagtctgtccgcagccgacggcagcgatggcagccacgacagctgggacgtggagcgcgtcgccgagtggccctggctctccgggaccattcgagctgtttcccacaccgacgttaccaagaaggatctgaaggtgtgtgtggaatttgatggggaatcttggaggaaaagaagatggatagaagtctacagccttctaaggagagcatttttagtagaacataatttggttttagctgaacgaaagtcacctgaaatttctgaacgaattgtacagtggcctgcaataacgtacaaacctctgttggacaaagctggtttgggatccataacttctgttcgctttctgggagatcaacaaagagtatttctttctaaagaccttttgaagcctatacaggatgtaaacagtcttcgactttctcttacggataatcagattgtcagtaaagaatttcaagctttgattgtgaagcatttagatgaaagccatcttttaaaaggtgacaaaaacttagttggttcagaagtaaaaatttatagcttggacccatctactcagtggttttcagcaaccgttataaatggaaacccagcatcaaaaactcttcaagtcaactgtgaggagattccagcactgaaaattgttgatccgtcactgattcatgttgaagttgtacacgataaccttgtgacatgtggtaattctgcaagaattggagctgtaaaacgcaagtcttctgagaataatggaaccctggtttccaaacaagcaaaatcttgctctgaggcctctcccagtatgtgtcctgtgcagtctgtacctacaacagtttttaaggagatactgcttggctgtactgcggcaactccacctagtaaggacccaagacagcaaagtactccccaggctgccaactctccacctaaccttggagcaaaaattcctcaaggatgtcataaacaaagtttaccagaggaaatttcttcctgtctaaatacaaagtctgaagctctgagaacaaaaccagatgtctgcaaagcagggttgctctcaaagtcctctcagattggaactggagacttgaaaattctgactgagccaaaaggcagctgtactcagcctaagacaaacactgatcaggaaaacagattggagtctgttccacaagcattgactggccttcctaaggagtgcttacctacaaaggcttcttctaaggcagaattggaaattgccaatcctcctgaactgcagaagcacctagaacatgcaccttccccatcggatgtttcaaatgcaccagaagtgaaagcaggtgtcaatagtgatagccctaataactgttcaggaaaaaaggtagaaccttcagctttagcttgccgatcacagaatttaaaggaatcttcagtaaaagtagataatgaaagctgttgttcaagaagcaacaataaaatccagaatgccccatccaggaagtcggttttgacagacccagctaaactcaaaaagctgcaacagagtggcgaggccttcgtacaggatgattcttgtgtgaacatcgtggcacagttgcctaaatgccgagagtgtcgcttggacagtctccgcaaggataaggagcaacagaaggactcacctgtgttttgccgcttctttcacttcaggaggttacaattcaacaaacatggtgtgttgcgggtagaaggcttcttaacaccaaacaagtatgacaatgaagcaattggcttgtggttacctttaaccaaaaacgttgtggggattgatttggacacagcaaagtacatcttggccaacattggagaccacttctgtcaaatggtgatttctgaaaaggaagctatgtcaactattgagccacacagacaggttgcttggaagcgagctgtcaaaggtgttcgagaaatgtgtgatgtgtgcgacaccaccatcttcaacctgcactgggtgtgtcctcggtgtgggtttggagtatgtgtggactgctaccggatgaagagaaagaattgccaacagggtgctgcttacaagactttctcttggctaaaatgtgtgaagagtcagatacatgaaccagagaacttaatgcccacacagatcattcctggaaaagcactctatgatgttggagacattgttcattctgtaagagcgaaatggggaataaaggcaaactgcccttgttcaaacaggcaattcaaactcttttcaaagccagcctcaaaggaagacctaaaacagacttctttagctggagaaaaaccgactcttggtgcagtgctccagcagaatccctcagtgttggagccagcagctgtgggtggggaagcagcctccaagccagccggcagcatgaagcctgcctgtccagccagcacatctcctctaaactggctggccgacctaaccagcgggaatgtcaacaaggaaaacaaggaaaaacaaccaacaatgccaattttaaagaatgaaatcaaatgccttccacccctcccacctttaagcaaatccagcacagtcctccatacgtttaacagcacaattttgacacccgtaagcaacaacaattctggtttcctccggaatctcttgaattcttctacaggaaagacagaaaatggactcaagaatacaccaaaaatccttgatgacatctttgcctctttggtgcaaaataagacgacttctgatttatctaagaggcctcaaggactaaccatcaagcccagcattctgggctttgacactcctcactattggctttgtgataatcgcttgctgtgcttgcaagaccccaacaataagagcaactggaatgtgtttagggagtgctggaaacaagggcagccagtgatggtgtctggagtgcatcataaattgaactctgaactttggaaacctgaatccttcaggaaagagtttggtgagcaggaagtagacctagttaattgtaggaccaatgaaatcatcacaggagccacagtaggagacttctgggatggatttgaagatgttccaaatcgtttgaaaaatgaaaaagaaccaatggtgttgaaacttaaggactggccaccaggagaagattttagagatatgatgccttccaggtttgatgatctgatggccaacattccactgcccgagtacacaaggcgagatggcaaactgaatttggcctctaggctgccaaactactttgttcggccagatctgggccccaagatgtataatgcttatggattaatcactcctgaagatcggaaatatggaacaacaaatcttcacttagatgtatctgatgcagctaatgtcatggtctatgtgggaattcccaaaggacagtgtgagcaagaagaagaagtccttaagaccatccaagatggagattctgacgaactcacaataaagcgatttattgaaggaaaagagaagccaggagcactgtggcacatatatgctgcaaaggacacggagaagataagggaatttcttaaaaaggtatcagaagagcaaggtcaagaaaacccagcagaccacgatcctattcatgatcaaagctggtatttagaccgatcattaagaaaacgtcttcatcaagagtatggagttcaaggctgggctattgtacagtttcttggggatgtggtgtttatcccggcaggagctccacatcaggttcataacttatatagctgcatcaaagtggctgaagattttgtttctccagagcatgttaaacactgcttctggcttactcaggaattccgatatctgtcacagactcataccaatcacgaagataaattacaggtgaagaatgttatctaccatgcagtgaaagatgcagttgctatgctgaaagccagtgaatccagttttggcaaaccttaatctccctgcacattggaaatgaattacaggcagctgttcaaactcttcaggcaggattcctgtggactttgagattcatgttacctcatcttcttttttaaactgtacccaacttgtgagggtactctgtctaatgtatatttctagtgtttacagacagtaaatgtgtatatgtagtaactatttacagaacatgcatccttaaactgtgacttctcacctagtgcagaacttttaccaggctgtaaaagcaaaacctcgtatcagctctggaacaatacctgcagttattcttcagctgtttggacaacttagattgggtttataactattaggaatcactgcacagtttatttgggttgtgttttgtgtctgagtcccctccctcatcccttagggtccagaagagcaatggaggaagtgacagctaatgttgcagttcttattgtatggcataggactggcattatatagcagaaatcaactactgtacaatttcttggggttaaccatctttagttaaatggaattttaatttaaatgacgctttgctaattttaagtgttaagcattttgcattaaaatattcatataataaaaaaaaaaaaaaaaaa

SEQ ID NO: 198522 - DNA, 3966 bp, Artificial Sequence
  derived and/or modified sequence
atggtacttaccctgggcgagtcatggccggtgcttgttggccggcggtttctctccctcagcgcagccgacgggtctgatggaagccacgacagttgggacgtggagcgtgtggccgagtggccatggctcagcgggacgatcagagctgtgtcccacacagacgtcacaaagaaggatcttaaagtctgcgtggaattcgacggcgaatcttggagaaagagacgctggatcgaggtctatagtcttctacgccgggccttcctggtggaacataatctggtgttagccgagcgcaagagcccagaaatctccgaacggatcgtgcaatggcccgccatcacctacaagccactccttgacaaggccggtcttggttccatcacctcagtgagatttctcggcgaccagcagagagtgttcctcagcaaagacctcttaaagccaatacaggacgtgaactcactgcgactctctctgaccgataaccagatcgtgagcaaggagttccaggctctgatcgtcaaacacctggacgagtctcacctcctgaagggggataagaacctggtgggctccgaagtcaagatttacagcctggatccatcgacacaatggttctctgcaacagtgatcaacggcaacccagccagcaagacccttcaagtcaattgcgaagagatcccagccttgaagatagtggacccttccctaattcacgtggaggtggttcatgacaacctggtgacctgcggaaatagtgccagaataggggccgtgaagcgaaagagttccgagaataatggcacactggtatcaaagcaggccaaaagctgttccgaagccagcccgtcaatgtgccccgtgcagtctgtcccaaccacagtatttaaagagattctgctcggatgcactgctgctactccgccatcaaaggacccccgtcagcagtctacacctcaggctgccaatagccccccaaaccttggagcaaaaattcctcagggctgccataaacagtcactgcctgaagaaatctccagctgcctgaataccaaaagcgaggcgctccgaaccaaaccagatgtctgtaaggccgggctcctctctaaaagttcccagatcgggaccggcgacttgaaaatactgaccgagccaaaagggtcatgcacgcagccaaagaccaatactgatcaggagaatcgcctggagagcgtgccacaagcgctcacaggcctgcctaaggagtgtctaccgaccaaggccagctccaaagctgagctggagatcgccaacccccccgagctccaaaagcacctggaacacgcgccctccccctctgatgttagcaatgccccagaagtgaaagcaggagtaaattctgacagccctaacaattgcagcgggaaaaaagtcgaaccaagcgccctagcctgtcgctcacagaacctcaaagagtcatctgtcaaagttgataacgagtcctgctgttctcggtccaataataaaattcagaatgcaccaagccgtaaatcagtgctgaccgaccctgcgaagctaaaaaagctgcagcagtccggtgaggcatttgtgcaggacgactcctgcgtgaatatagtcgcccaacttccaaagtgcagagagtgtcgcctggatagcctgcgcaaagataaggagcagcagaaagactccccagtcttttgtagattcttccactttcggcgtctgcagttcaacaagcatggagtgctgcgagtcgagggctttcttaccccgaataagtatgacaacgaggctatcggattatggctgcctctgaccaaaaatgtcgtcggtatcgacctggacacggctaaatatatcctcgccaatattggcgaccacttctgccagatggtgattagcgagaaggaagcgatgtcgacaattgagccgcaccggcaggtagcttggaaacgcgccgtgaagggagttcgcgagatgtgcgacgtctgcgacactaccatatttaacctgcactgggtgtgcccgagatgtggattcggagtgtgtgtcgactgctatcgcatgaaaagaaagaactgccagcagggggctgcctataagacctttagctggctcaagtgcgttaaatcccaaatccacgaacctgagaatctaatgcctactcagattattccaggcaaggccttatatgatgtcggggacatcgtacattctgtgagagccaaatggggaatcaaagctaattgcccatgctctaatcgccaatttaagctgttctccaagccagcgtctaaagaagatctgaagcagacaagcttggctggggagaagccaactctcggtgccgtactgcagcagaatccctctgtgctggagcctgccgcagtgggcggagaggctgcttcaaagcctgctggcagcatgaagcctgcatgccccgcatctaccagtcccctgaactggttggcagacttgacctccggcaatgttaataaagagaataaggagaagcagccgaccatgcccatcttgaagaacgagatcaaatgtctccctccactcccgcccctgtcaaaaagttccaccgtgctccacacctttaattcaactattctgacaccagttagtaacaacaacagcggctttcttaggaatttgcttaattcatctacgggcaagactgagaacggcctgaagaataccccaaaaatattagatgatattttcgcatctctcgtccagaataaaaccacatctgacctcagtaagagacctcaggggttaactattaagccctcaattctgggcttcgacaccccccactactggctgtgcgacaaccggctcctgtgtctgcaggaccctaacaacaagtctaactggaatgtgttccgcgagtgttggaaacagggacaaccagtgatggttagtggggtgcatcataagttgaacagtgaactttggaaacctgagtctttccggaaggagttcggggagcaggaggtggatcttgtgaattgtcgcacgaacgagatcattacaggcgccactgttggtgatttttgggacggattcgaggatgtcccaaatcgcctgaaaaacgaaaaggaacctatggtgctcaaactgaaggactggccacctggcgaagattttcgggacatgatgccctctcggtttgacgacctgatggccaatatcccactgcctgaatacaccagacgcgacggcaaattgaatttagcctcccgcctcccaaattactttgtcagacccgacttaggcccaaaaatgtataacgcttacgggctaattacacccgaagaccgtaagtacggaaccactaacctgcatctggatgtcagtgatgccgccaacgtgatggtgtatgttgggataccgaagggacagtgcgagcaagaggaagaagtgctcaagacaatccaggatggggactccgacgagctgacaatcaagaggtttatagagggtaaggaaaaaccaggagccctttggcacatctacgccgcaaaggataccgagaaaatcagagagttcctcaagaaggtttccgaagaacaggggcaggaaaatcccgccgaccacgacccaattcatgatcagagctggtatctggacaggtcactacggaaacgactccaccaggaatatggggtccaaggatgggccatcgttcagtttttgggcgatgtcgtgttcatccccgcgggcgccccccatcaggtccataacttatatagctgcatcaaagtggctgaggattttgtgtctcctgagcatgtcaaacactgcttttggctcacccaggaattcaggtacttgagccagacacacaccaaccatgaggacaagctgcaagtcaaaaacgtgatataccatgccgtcaaggatgcggtcgcaatgctcaaggccagtgagagcagctttggcaagccatag

SEQ ID NO: 198523 - DNA, 3966 bp, Artificial Sequence
  derived and/or modified sequence
atggttctcaccctgggcgaaagctggccagtgcttgtagggcgtcgctttctgagtctgtcagccgccgacggcagtgacggaagccatgactcctgggatgtggagcgcgtcgccgaatggccttggctgtccggaacaatccgggccgtaagtcacacggatgtcactaagaaagatcttaaagtgtgcgtagagttcgatggagaatcatggcgcaaaagacgttggattgaagtatacagcttgctccgccgtgcgtttcttgtcgaacataacctggtactggccgagcgaaagtccccagagatctcggagaggatcgtgcagtggcccgctataacgtacaagccactgctcgataaagcaggactagggtccataacgtccgtccgcttccttggagaccaacagcgagtcttcctcagcaaggatctcctcaagcctatacaggacgtcaacagcctgagactctctttgacggacaatcaaatcgtaagcaaagagttccaagcgctcatcgtcaaacacctggatgagagccacctgttaaagggagataaaaacctggtcgggagcgaagttaaaatatacagcctggatcccagtacccagtggttttccgctactgtaatcaacggaaacccagcatctaagacgctgcaagtgaactgcgaggagataccagcccttaagatcgtcgatcctagtctgattcatgtggaggtcgtacacgataacctggtcacttgtggtaacagcgcacgaatcggggctgtcaagcggaagtccagcgaaaacaatggcacccttgtatcgaagcaagccaagtcttgctctgaggcctctcctagcatgtgtcccgtgcaatccgtgcccacaacagtgtttaaggaaattcttttagggtgcacagcagcaacgccaccttcaaaagaccctagacagcaatctacaccacaggctgctaattcgccaccaaacctcggagctaagataccccaaggttgtcacaagcagtcactccctgaggaaatctctagctgtctgaatacaaagtcagaagctttgaggactaagcctgacgtgtgtaaagctggtttactgagcaagagctcacaaattggaaccggggatttgaaaatactgacggagcctaaggggagttgcacccagcccaagacaaacaccgaccaggaaaacaggctcgaaagcgtgccgcaggctctcaccggcctccccaaggagtgcctgcccacaaaagccagctcgaaggctgagttggaaattgcgaatcctcctgagctgcaaaaacatctggagcacgcgccttcacctagtgatgtgagcaatgctccagaggtgaaggccggagtcaattcggattcccctaacaactgttcgggcaagaaggtcgagcccagcgcattggcctgccgttctcagaacttgaaggagtcgagtgttaaagtagataacgaatcctgttgcagtaggtccaacaacaaaatacaaaatgctccaagccggaagtccgtgctgaccgacccagcgaagcttaagaaactgcagcagagcggcgaggcgttcgtccaggacgactcttgcgtcaatatcgtcgcacagttaccaaagtgtagggagtgcaggcttgactctctgagaaaagataaagaacagcagaaagactcccccgtattctgcaggttcttccactttcggaggctgcagtttaataaacatggggtgctcagagtggaaggctttctgacacccaacaaatacgataacgaggccatcggactgtggttgccactgacaaaaaacgtggtggggatcgacttagacacagctaagtacattttggcgaatataggcgaccacttctgtcagatggtgatttcagagaaggaggcaatgagcacgattgagcctcaccgccaggtggcatggaagcgggctgttaagggagtcagggagatgtgtgatgtctgtgacaccaccatcttcaacttacattgggtgtgccctagatgcgggttcggagtgtgtgtcgactgctatcgcatgaaacggaagaattgccagcagggcgcggcctataaaacctttagttggctcaaatgcgtgaagagccagatccacgagcctgaaaatctaatgcccacccagatcattccgggaaaagccttatacgacgtgggagatatcgtgcactctgtgagagctaagtggggcatcaaggccaattgcccatgttccaataggcaattcaaactgttttcaaaacctgccagtaaggaagatttaaagcaaacaagtctcgccggcgagaaacccacgctgggcgccgtgctacagcaaaatccgtcagtactcgagcccgctgccgtaggtggtgaggcggcgtctaagccggctggatctatgaaaccagcttgtcctgcaagcacatctcccctgaactggttggcggatctgacatctggcaacgtcaataaggagaataaagaaaaacagcctacaatgccgattctgaaaaacgagatcaaatgcctgccgccactcccaccgttgtctaagtcatctaccgtgctgcacacgttcaattctactatcttaactcctgtgtcgaataataactccggatttctccgcaaccttctgaattcatcaacgggaaaaacggaaaatggcctcaaaaacacccccaaaatattggacgacattttcgcgagcctggtgcagaacaagacaacctctgacctgtccaaacgcccacagggtttgacaattaaaccgagcatactgggatttgacacgccccactattggctatgtgacaacagactactctgcctgcaggatcccaataacaagagcaactggaacgtgttccgagagtgctggaaacagggccagcctgtcatggtgagcggggtacatcacaagctgaacagcgagctctggaagcccgagagttttcgcaaagagttcggggaacaagaggtggatcttgtgaactgtcggaccaatgagataattacaggagctactgtcggagacttttgggatggctttgaagatgtgccaaataggctgaagaatgagaaggaaccaatggtgctgaagctcaaggactggcccccaggagaggatttccgcgatatgatgccctcaaggtttgatgacctgatggccaacatacctctccccgagtatacgcgccgcgacggtaaacttaatctggctagtcgactaccaaactacttcgtccggccagacctgggccccaagatgtacaatgcctatgggttaattactcccgaagatcgaaagtacggaacgactaacttacatctggatgtaagcgatgccgccaacgtgatggtgtacgtgggcattccgaaaggtcagtgtgagcaagaggaggaggtcttgaaaactattcaagacggcgactccgacgaactcacgatcaaacgcttcattgaaggcaaagagaaacccggcgcactgtggcacatctacgctgctaaggacactgaaaagattagggagttccttaaaaaggtatccgaggagcaaggacaggagaacccggccgatcacgatccaattcacgatcaaagttggtaccttgaccgtagtttgagaaagagactgcaccaagagtacggcgtccagggctgggccatcgtccaatttctgggagacgtggtgttcattccagctggggctccacaccaagtgcataacttatattcatgcattaaggtcgccgaggatttcgtgagcccagaacatgtcaagcattgtttctggctcacccaggagttcagatatctctcccaaacccacacaaaccacgaggataagctccaggttaagaacgtgatctatcacgcagtgaaagacgcagtcgcaatgctgaaagcatccgagtcaagctttgggaagccctag

SEQ ID NO: 198524 - DNA, 3966 bp, Artificial Sequence
  derived and/or modified sequence
atggtgctgaccctgggggagtcctggccagttctggtcggccgacgatttctgtcactgagcgcagccgacggctctgatggatcacacgacagttgggacgtcgagagggtcgcggaatggccctggctcagcgggacgattagagctgtgtctcacacagacgtgactaaaaaagatcttaaggtgtgtgtcgagttcgacggagaatcgtggagaaaacggagatggattgaggtgtattcactgctgcgccgcgcatttctggtggagcataatctcgtgcttgctgagaggaagtctccggagatcagcgagaggattgtgcaatggcccgctatcacttacaaacccctgttagacaaagcgggactgggctcgatcactagtgtacgatttctcggcgaccagcagagggtttttctctctaaggatctgttgaaaccaattcaagacgtgaactcactgcggctgtcattgacagataaccagatcgtgtcaaaggaattccaggctctcatcgtgaagcacttagacgagtcacatcttctgaaaggcgacaaaaatctggtggggtcagaggttaaaatctattccctcgaccctagcacacaatggttttccgcgaccgtgattaatggaaaccccgcgtctaaaacgcttcaggtgaactgcgaagagattcctgccctgaagattgtagatcccagcttaatccatgttgaagtggtccacgacaatctcgtgacatgtggcaactccgcccggatcggtgctgtaaaaaggaagtcctctgagaacaatggaacactggtatctaagcaggcgaaaagctgctcggaagcctcacccagcatgtgccccgtacagagtgttccgaccaccgttttcaaagaaatcctccttgggtgtaccgccgcgacaccaccttctaaggacccgagacagcagagcaccccacaagcggcaaatagccctcctaacctcggcgctaagatcccccaggggtgtcataagcaaagcctgcctgaagaaatttcatcctgtcttaatactaagtctgaagctcttcggactaaaccagacgtctgtaaggcagggttgctgagtaagtccagccagatagggacgggagaccttaagattctaaccgaaccaaaggggtcttgtacacagccaaaaacgaacacagaccaggaaaatagactggagtccgtcccacaagccctcaccggactcccaaaggaatgcctgcctaccaaggccagttcaaaggctgaactggagattgccaatcctcctgagctccagaagcatcttgagcacgcaccctctccctccgatgtgtctaacgctcccgaggtgaaagccggcgtcaatagtgacagcccaaataactgcagcgggaagaaggttgagccttctgccctcgcctgcaggtcccagaacttaaaggagagctcagtcaaggtggacaacgagagttgttgtagcaggtcgaataacaaaatacagaatgctccaagtcgtaagagtgtcctgaccgaccccgccaagctgaaaaagctccagcagagtggagaggccttcgtgcaggatgactcttgtgtgaacatcgttgcacagctcccgaagtgtagagaatgcagactggattccttgaggaaagacaaggaacagcagaaagacagccctgtgttctgccgtttcttccacttcagacggcttcagtttaacaagcacggtgtgttgcgagttgagggcttcctgacgccgaacaaatacgataacgaggcaattgggttgtggctgccgcttacgaagaacgtggtcgggatcgacctagatacagctaagtacatcctggctaacataggggaccacttttgccagatggtcattagtgagaaggaagctatgtctaccattgaacctcaccgacaggttgcatggaagagagcagtaaagggtgtgcgagagatgtgcgatgtgtgtgacacgaccattttcaatctgcattgggtctgccctaggtgcggctttggcgtgtgtgtagattgctaccgtatgaaaaggaaaaattgtcagcaaggcgccgcttacaaaacgttcagctggctaaaatgtgtcaagagccagatccacgagcccgaaaatttgatgccaacccagattatcccagggaaggctctctatgatgtcggcgatattgtgcacagcgtcagagcaaagtggggcatcaaagccaactgtccttgttcgaatcgacagttcaagttgttctctaagcccgctagcaaagaggacttgaaacagacctccttggccggggaaaaacctactctcggggccgtactgcagcagaacccttctgtactcgagcccgccgctgtcggaggcgaggccgcttccaagcctgcaggtagtatgaagcccgcatgtcccgccagtacaagccccttaaactggctcgccgatctgacatctggcaatgtcaataaagagaataaggagaaacagcctacgatgcctattctgaagaacgaaattaaatgcttgccccccctgccccccctcagcaaaagctccacagtcctgcataccttcaacagtacaattttgacaccagtgtccaataataactcaggctttcttcgcaaccttttgaattcctcaactggcaagactgagaacgggttaaaaaacacacctaagattcttgatgatatctttgcctccctagtccagaataagacaacatccgacctgagcaagcggccccagggcctgacaataaaacctagcatcctaggatttgataccccacattactggctgtgtgacaataggctattgtgcctacaggaccccaataataagtcaaactggaatgtttttagggagtgctggaaacagggtcagccagtgatggtgtcgggggtgcaccataagctgaatagcgagctgtggaaacctgaaagttttcgcaaggagtttggagaacaagaggtggacctcgttaattgtcgcactaacgaaattattactggtgcgacagtaggcgacttctgggacggatttgaagacgttcctaatcgattgaaaaatgaaaaggaaccaatggtgcttaagctgaaggattggccccccggcgaggattttagggatatgatgccatcgagattcgacgatctgatggctaacataccccttccagaatacactaggagggacggaaagttaaacctggcttcccgtcttccaaattattttgtgagacccgacttgggacccaaaatgtataatgcttatggacttatcacgccagaggacagaaaatacggcacaacaaacttgcacctagacgtgagcgacgccgcaaatgtgatggtctatgttggcatacccaaaggacagtgtgagcaggaggaggaggtcctcaaaacaatacaggacggagactccgacgagctcacgatcaagagattcattgagggtaaggagaaaccaggggcactgtggcatatctacgcagcgaaagacacagaaaaaatcagagagtttctaaaaaaggtgagtgaagaacagggccaggaaaatcccgccgaccacgacccaattcatgaccagtcctggtatcttgatcggtccctccgcaaacgcctccaccaggagtacggtgtgcaaggatgggctatagttcagttcctaggtgacgtggtgttcattccagcaggtgcacctcatcaggtacacaatctttattcttgtatcaaggtggccgaggactttgtaagcccagaacacgtgaagcattgcttctggctgacacaggaattccgctacctgtcccagacgcatacgaatcacgaggacaagttgcaggtaaagaatgtgatttatcacgccgtgaaggatgccgtcgctatgcttaaagcgtctgaaagtagtttcgggaagccttag

SEQ ID NO: 198525 - DNA, 513 bp, Artificial Sequence
  derived and/or modified sequence
atggtactgaccctaggagaatcatggcccgtgctggtcggccgccggttcctcagcctgtcagcagccgacggctctgacggttctcatgactcctgggatgtagagcgtgttgccgagtggccgtggctgtctggaacgattcgtgctgtgtcacatacagatgtgactaagaaagatctaaaggtctgcgtagagttcgacggagaaagctggcgcaaaagacggtggattgaagtctacagcctactccgccgggcctttctggtagaacacaatctggtactggccgagcggaagtctcctgagataagcgagagaatcgtacaatggcctgccattacctacaaacccctcctggataaggctggcctggggtccataactagcgtcaggttcttgggggatcaacagagggtctttctgtcgaaggatctgttaaagccgatacaggatgtcaattccctccgtctgtctcttacagataatcagattgtcagtaaggagttttag

SEQ ID NO: 198526 - DNA, 2136 bp, Artificial Sequence
  derived and/or modified sequence
atggtgctaacactgggagaaagttggcctgtattggtgggccggcgctttctttcgctgtccgccgccgacggcagtgacggctcacatgactcttgggacgtggaaagggtcgctgagtggccgtggttatccggtaccattagggctgtaagccacacagacgtaaccaaaaaggatctcaaagtctgcgtggaatttgatggtgaaagctggcgcaagagaaggtggatcgaggtttactccctgttgagacgtgcttttcttgtagagcataatttagttctggccgaaaggaagagtccagagattagcgaacgcatcgtgcaatggcctgccataacatataaaccccttctggacaaggctggcttgggtagtatcacatctgtacgcttcctgggcgaccaacagagagtattcttaagtaaagacctgctaaagccaatccaagacgtaaatagtctgcgactgtccctcacggacaatcagatcgtcagtaaagagtttcaagccctgatcgtgaagcacctggacgaaagccatctgctcaagggcgacaagaacctcgtggggtctgaagttaaaatctatagcctggacccgagtacccaatggtttagcgcgacggtaataaacggtaaccctgcttctaaaacactccaagttaattgcgaggagataccagccctaaagatcgtggatccctctctcatccacgtagaggtggtgcatgataacctggtcacttgcggaaactccgccaggattggcgccgttaaacgcaaatcaagcgagaataacggcaccttggttagtaagcaggctaaaagttgtagcgaggcttctccttctatgtgccccgttcagagtgttccaaccaccgtattcaaagagattctactcggctgcaccgcggcaacgcccccgtcaaaggatcctcgacaacagtcgacccctcaggctgcgaactcccctcccaaccttggtgccaagatccctcagggatgtcataaacaaagcctgcctgaagagatcagtagctgtttgaacacaaagtccgaagcactgagaacaaaacctgatgtgtgcaaggcgggtctgctctccaaatcaagtcagatagggactggtgacctgaaaatcttgacagagcctaaagggtcctgtacccaacctaagactaacactgaccaagagaaccggcttgaatctgtcccgcaggccttgaccggactgccgaaggagtgcctgccaacaaaagctagctccaaggctgagttagaaattgccaacccccctgagttacagaagcatctggagcatgcacctagtccaagcgacgtgtccaatgcccccgaggtgaaggccggagttaatagcgactcaccaaataactgtagtggcaagaaagtagagccaagcgctctggcgtgccgcagtcagaacctcaaggagtcaagtgtgaaggtagacaacgagtcatgctgttctaggtcaaataataaaatccagaatgcacccagtaggaagagtgttctcactgaccccgctaagttgaagaaattgcagcaaagcggtgaagccttcgttcaggatgattcatgtgtgaatattgtggcccagttgcctaaatgtagggaatgccggctggatagtctcaggaaggataaggagcagcaaaaggactctccggttttctgcaggttcttccacttccgtagactgcagtttaataagcatggcgtcctccgagtcgaagggttcttgaccccaaataagtatgacaacgaggcgatcggcctctggctccccctgaccaaaaacgtggtgggtattgacctcgacacggccaagtacatactggctaatatcggcgaccacttctgccagatggttatcagtgaaaaagaagccatgagtacaatagaacctcaccgacaggtggcttggaagcgggccgtgaagggagtccgggagatgtgcgatgtgtgtgacacaacaatctttaacttacactgggtttgccctcgctgcggcttcggggtttgtgtggattgttaccggatgaagaggaaaaattgtcaacagggcgaaaatagatttgattccccacccgctcccctccattcgtag

SEQ ID NO: 198527 - DNA, 366 bp, Artificial Sequence
  derived and/or modified sequence
atggtgctgacccttggggagtcgtggcccgtcctcgttggccggcggttcctgagtctctccgctgctgacgggtccgacggctcacatgacagctgggacgttgagagggtcgccgaatggccatggctgagcggcaccatcagagcagtgagccacacagacgtcactaagaaggacctgaaggtttgtgtggaattcgatggagagtcttggagaaagcgacggtggatcgaagtatactcgctgttgagacgcgcttttttggtggaacacaatctggttcttgctgaacgcaagagccccgagatttctgagagaatagttcagtggcctgcaattacatataaacctctgctcgactag

SEQ ID NO: 198528 - DNA, 3984 bp, Artificial Sequence
  derived and/or modified sequence
atggtgttgacgctcggcgaaagctggcctgtgctggtgggtcggagatttctttctctttccgctgccgatgggtccgatggcagccacgattcttgggatgtggagcgggttgctgagtggccttggctttctgggaccattcgagcagtgtctcacaccgatgttacaaagaaagatttaaaagtgtgcgttgaatttgacggagagagctggcgcaaacgacgctggattgaggtctacagccttttaaggagagcctttctggtggaacacaatcttgtactcgccgagcggaaatcccctgagatttcagagcgcatcgttcagtggcccgcaatcacctacaagcccctattggacaaagcaggactcgggtccattacaagtgtccgcttcctgggcgatcaacagagggtattcctcagcaaagacttgctgaaaccaattcaagacgtgaatagcctgcggctctctctcacagacaatcagatcgtctcaaaagagtttcaagcactgattgttaagcacttggacgagtctcatctcctcaagggcgacaagaacctcgtgggcagcgaggtcaaaatctacagtctggacccttctactcagtggttttctgctactgtgattaacggcaatccagcatcaaagacactgcaggttaactgcgaggagattcccgcattgaaaatagtggatccttccctgattcatgtcgaagtagtgcatgacaacctggtgacgtgcggcaacagtgcccgcataggtgccgtcaaaaggaagtcatccgagaataacggtacactggttagcaagcaagccaagtcctgttccgaggcgagcccttccatgtgcccagtgcagtccgtcccaactaccgtctttaaggaaattcttctgggatgtacggctgccacgcctccgtcaaaggacccccgccaacagtcaaccccacaggccgccaattcaccgccgaatcttggagccaaaatcccccagggttgccataaacagagcctccctgaagaaatttcatcctgtctgaatactaagtccgaagctctgcgaaccaagccggatgtctgtaaagcgggcctgctcagcaagagctcccagattgggacaggcgacctgaaaattcttaccgagcctaaaggcagttgcactcagcccaagacaaacactgaccaggagaataggcttgagtcagtgcctcaagccctgactggtttgccgaaggaatgtcttcctaccaaggcaagcagtaaggcagagctggagatagcgaatccgccagagcttcagaagcacctggagcacgcgcccagtcctagtgacgtgtccaacgctcctgaagttaaggccggtgtgaattcagactctcctaataattgctcgggaaagaaggtggaaccgtctgccctggcgtgtcgctctcaaaatctaaaagagagctctgtaaaggtggataacgagagctgctgctcccgcagcaataacaaaattcagaacgctccatcgcggaagtccgtcctaacggatcctgccaagttgaagaaactgcagcaaagtggagaagcatttgtgcaggacgattcatgcgtcaatattgtggcccagttacccaagtgtcgcgagtgccgactggattcactgagaaaggacaaagaacagcagaaagatagtccagtcttctgccgctttttccactttcgacgtttacagtttaataaacacggcgtgctcagagtagagggtttcttgaccccaaacaagtacgacaatgaggcaatcgggctctggctgcccctcacaaaaaacgttgtaggaatcgatctcgacactgctaaatatatcctggccaacataggcgatcatttctgtcagatggttatctcagagaaagaagccatgagtaccatcgagccgcaccgacaggtggcctggaaacgggcggtcaaaggtgttagagaaatgtgtgatgtctgtgataccactatctttaacctacactgggtgtgccccaggtgcggattcggcgtgtgcgtggactgctatcgcatgaagcgaaagaattgtcagcagggggcagcctataagaccttctcttggttgaagtgcgtgaagagtcaaatacacgaaccagagaaccttatgccgacacagattattccaggaaaggcactttacgacgtaggcgacattgttcactctgtgagggccaaatgggggataaaagctaactgcccctgttctaatcgacagttcaagttgttttctaagccagcatcgaaggaggatctcaaacagacatccctggcaggagagaaaccaactctgggggccgtgctgcaacaaaatccgagtgtgctcgagcctgctgctgtgggaggggaagctgcctccaagccagctggctcaatgaagcctgcgtgcccggctagcacatcacctctgaattggctggccgatctcacctcaggcaacgtcaataaggaaaacaaagaaaagcaacccactatgcccattctcaagaacgaaattaaatgcttaccccccctcccacctctctcaaaaagctcaacagtccttcacaccttcaattccaccatcctaacacccgtgagcaacaacaacagcggcttcttgcgcaacctgttgaacagctcaacaggaaagacagagaacgggcttaaaaatacacccaaaatcttagatgacattttcgccagcctggtgcagaataagaccacgagtgatttatccaagagaccccagggcttgactataaaaccaagcattctggggttcgacacaccccactactggctctgcgacaatcgactcttgtgtctacaggaccctaacaataagtccaattggaatgttttccgggagtgctggaaacaaggccagcccgtgatggtgtctggcgtgcatcacaagttgaattccgagttgtggaagcccgagtcttttcggaaggagttcggcgagcaggaggtcgacctcgttaactgtcggacaaatgagataataaccggcgctaccgtgggcgatttctgggacggatttgaagacgtgcctaacagactgaagaatgaaaaggagcctatggtgctcaagctcaaagattggccacccggggaggatttcagggacatgatgccatcccggtttgacgacctgatggccaatatacctctgccagagtacacccgccgcgatggaaagctgaatctggccagcagattacctaattactttgtacgtcccgaccttggacctaaaatgtataacgcgtatggcctcatcacacctgaggatcgcaagtatggaactacaaacctgcacctggacgtgagcgacgctgccaatgtgatggtgtatgtcggaatccccaaaggtcagtgcgagcaggaggaggaagtgctgaaaactattcaagacggcgactccgacgaattaaccatcaagcgattcatcgaaggtaaggagaagcccggggcactctggcacatctacgccgccaaggacacggagaaaataagggaattcctgaaaaaagtttcagaggaacagggacaagagaatccggccgaccacgatcccattcacgatcagtcgtggtacttggaccgcagtcttcgtaaaagactgcatcaggaatatggcgttcagggctgggctattgttcaatttttaggcgatgtggtgttcattccggccggagctccacatcaggtgcacaatttgtactcttgcattaaagtcgctgaggatttcgttagtcctgaacatgtcaaacactgtttttggctgacacaggaattcagataccttagccaaactcatacaaatcatgaagacaagctccaggttaagaacgtgatctatcacgctgtaaaggacgcagtggccatgttaaaggttaatcccgtgctggctaacctgaacctgcctgctcactggaaatag

SEQ ID NO: 198529 - DNA, 3810 bp, Artificial Sequence
  derived and/or modified sequence
atggtgctcactctcggggaatcatggccggttctggtgggtcgtagatttttgtctctctcagccgctgacgggagcgacggcagccacgactcctgggacgtagagcgtgtggccgaatggccctggctcagcggcacaatccgagcggtgtcccatactgacgtgactaagaaagacctaaaaacatacaagcccctgctggataaggccggactgggatccatcacgtctgttaggtttcttggcgatcaacagcgcgttttcttaagcaaagacctgttgaagccgatccaggatgtcaacagcttacgcctgtctctgactgacaatcagatagtgtccaaggagtttcaggctttgattgtcaagcacttggacgaatctcacctcctgaaaggagacaagaatctagtggggtcagaggtgaagatctattctctggaccccagtacacagtggttcagcgctactgtcattaacgggaacccagctagcaagaccttgcaggtaaattgcgaagaaatacctgctctgaaaatagtcgatccaagcctgatacacgtggaagtagtgcatgacaacctagtcacatgtgggaacagcgctcgtattggggccgttaaacgaaagtcgagcgaaaacaatggtactttagttagcaagcaggctaaaagctgttctgaggccagccccagtatgtgtccggtgcaatctgtgccaacgacagtattcaaagagatccttctgggctgcaccgcggccacaccaccctctaaggacccgaggcaacagtctacccctcaagcagcaaattctccccctaatctcggagccaagatcccccagggctgccataagcagagtctgcccgaggaaatctcctcttgtctgaacaccaagtctgaagccctcaggaccaagccggatgtgtgtaaagccggactgctctccaaaagctctcagataggaaccggcgacctgaagatcttgaccgagcctaaaggaagttgcacccagccaaaaacaaacacagatcaggaaaatcggctagagtctgtgccccaggcactgacgggtctcccaaaagagtgtcttccgacaaaagcttcgagtaaggcggaattagaaatcgcaaatcccccagagctgcagaaacacctggagcatgctccatcgcctagcgatgtttccaatgcacctgaagtgaaggccggagtgaactctgactcccctaacaactgctctggcaaaaaggtggaaccgtccgctcttgcatgtaggtctcagaacttgaaggaaagctcagtaaaagtggacaatgagtcctgctgctcccgttcaaataataagatccaaaacgccccctcaagaaaatccgtcctgaccgatcccgctaaattaaaaaagctgcaacagtccggagaggcctttgtgcaagatgacagctgtgtcaacatcgtagcccagctccccaaatgccgggagtgccggcttgattctttgaggaaggacaaagagcagcagaaggactctccagttttctgcaggtttttccatttccgtcggctacagtttaataagcatggagtacttagagtggagggatttctgacaccaaataagtacgacaacgaagcaatcgggctttggttgccccttacaaaaaacgtggtgggcatagaccttgacactgctaagtatatcttagctaacattggagatcatttttgtcagatggtgatctccgaaaaggaggccatgtcaaccatcgaaccacacagacaggtagcatggaaacgggcagtgaaaggcgtgcgggagatgtgcgatgtttgtgatacaacaatcttcaacctccactgggtgtgccctcgatgcggcttcggagtgtgtgtggattgctaccgaatgaagcgcaagaactgccagcagggggccgcatataaaactttctcatggctgaagtgcgtgaaatcccagattcacgaaccagagaatctaatgccaactcagattataccaggcaaagccctttacgacgtgggtgatatcgtgcactcagtaagggccaaatgggggatcaaagctaactgcccatgcagcaacagacagttcaaattgttttctaagcctgcttctaaagaggaccttaaacaaaccagtctggccggagaaaagccgaccctgggcgccgtgctgcagcagaatccttccgtgctggaacccgccgctgttgggggggaagccgcctccaagccagcagggtcaatgaagcccgcgtgtcctgccagcacttccccactgaattggcttgccgatctgacttcaggcaatgtgaacaaagaaaataaggaaaaacagcccacgatgcctattctgaaaaatgaaatcaagtgtctccccccgctgcctccactctctaagtcaagtacggttctgcacacgtttaattccacaattttaactcccgtgtctaacaataatagcggtttcctccggaatctcttgaatagctcaactggcaaaaccgaaaacggacttaaaaacacccccaaaattttggatgacattttcgcctctctcgtccagaataaaactacaagcgatctctctaagagaccacaggggctgactattaaaccctccattctcggctttgacacccctcattactggctctgcgataatcgcctactgtgtctgcaggaccctaataacaagtcaaattggaacgtgtttagagagtgttggaaacaggggcagcctgtgatggtaagtggagtccatcataagctgaactctgaactctggaagccagaatcattccggaaagagtttggagagcaggaggtggatcttgttaactgcagaactaacgaaattatcactggggccaccgttggcgacttctgggacggcttcgaagatgtccctaataggctgaaaaacgaaaaagagcccatggtactgaagctcaaggattggccgcccggggaagatttccgggatatgatgccttcccggtttgatgacctgatggctaatatccctctaccagaatatactagacgggacggtaaactaaacttggccagtaggctacccaactacttcgtgaggccagatttaggccccaaaatgtacaacgcttacggcctgatcacccccgaggatagaaagtacggaaccactaacctccatcttgatgtgtcagatgctgcaaatgtgatggtgtacgtgggcatcccaaagggtcagtgcgagcaggaggaggaggtgttgaaaaccattcaggacggcgattccgacgagctcaccatcaagaggttcatcgaggggaaggagaagccaggagccctgtggcatatctatgcagcgaaagacaccgagaagatcagagaattcctcaaaaaagttagcgaggagcaaggccaagaaaatccagccgaccacgaccctatacatgatcagtcctggtaccttgatagatcgttgcgcaaacgtttgcaccaggagtatggcgttcagggctgggcgattgtccagtttctcggcgatgtggtatttatccctgcaggagccccacaccaggttcacaatctttatagctgcattaaagtggcggaggacttcgtgtcccctgaacacgttaaacattgcttttggttaactcaagagttcaggtatctttcccagacacacaccaatcatgaagacaagctgcaggtgaaaaacgtgatataccatgccgtcaaagatgcagtagctatgctgaaggcatctgagtctagttttgggaagccctag

SEQ ID NO: 198530 - DNA, 3966 bp, Artificial Sequence
  derived and/or modified sequence
atggtgctgaccctgggggagagctggcctgtgctggtgggccgccgcttcctgagcctgtctgctgctgatggcagtgatggcagccatgacagctgggatgtggagcgggtggccgagtggccctggctgagcggcaccatccgggctgtgagccacacagatgtgaccaagaaggacctgaaggtgtgtgtggagtttgatggagagagctggaggaagaggcgctggattgaggtgtacagcctgctgcggcgggccttcctggtggagcacaacctggtgctggccgagaggaagagccctgagatcagcgagcgcatcgtgcagtggccagccatcacctacaagcccctgctggacaaggccggcctgggcagcatcacctctgtgcgcttcctgggggaccagcagagggtcttcctgagcaaggacctgctgaagcccatccaggatgtgaacagcctgcggctgagcctgacagacaaccagatcgtgtccaaggagttccaggccctgattgtgaagcacctggatgagagccacctgctgaagggggacaagaacctggtgggcagcgaggtgaagatctacagcctggaccccagcacccagtggttcagcgccaccgtcatcaatggaaatcctgccagcaagaccctgcaggtgaactgtgaggagatcccagccctgaagatcgtggaccccagcctcatccacgtggaggtggtgcatgacaacctggtgacctgtggcaacagcgccagaattggagctgtgaagaggaagagcagcgagaacaacggcaccctggtgtccaagcaggccaagagctgcagcgaggccagccccagcatgtgccctgtgcagagcgtgcccaccaccgtcttcaaggagatcctgctgggctgcacagctgccaccccacccagcaaggacccccggcagcagagcaccccccaggccgccaacagcccccccaacctgggcgccaagatcccccagggctgccacaagcagagcctgcctgaggagatcagcagctgcctgaacaccaagtctgaggccctgcggaccaagccagatgtgtgcaaggccggcctgctgagcaagagcagccagattggaactggagacctgaagatcctgacagagcccaagggcagctgcacccagcccaagaccaacacagaccaggagaaccggctggagagcgtgccccaggccctgaccggcctgcccaaggagtgcctgcccaccaaggccagcagcaaggccgagctggagatcgccaaccccccagagctgcagaagcacctggagcacgcccccagccccagtgatgtgtccaatgcccctgaggtgaaggccggcgtgaacagcgacagccccaacaactgcagcggcaagaaggtggagcccagcgccctggcctgccgcagccagaacctgaaggagagctctgtgaaggtggacaatgaaagctgctgcagccgcagcaacaacaagatccagaatgcccccagcaggaagtctgtgctgacagatcctgccaagctgaagaagctgcagcagagcggggaggcctttgtgcaggatgacagctgtgtgaacatcgtggcccagctgcccaagtgccgggagtgccgcctggacagcctgaggaaggacaaggagcagcagaaggacagccctgtgttctgccgcttcttccacttccggcggctgcagttcaacaagcatggagtgctgcgggtggagggcttcctgacccccaacaagtatgacaatgaggccatcggcctgtggctgcccctgaccaagaatgtggtgggcatcgacctggacacagccaagtacatcctggccaacattggagaccacttctgccagatggtgatcagcgagaaggaggccatgagcaccatcgagccccaccggcaggtggcctggaagagagctgtgaagggcgtgcgggagatgtgtgatgtgtgtgacaccaccatcttcaacctgcactgggtgtgcccccgctgtggctttggagtgtgtgtggactgctacaggatgaagaggaagaactgccagcagggcgccgcctacaagaccttctcctggctgaagtgtgtgaagagccagatccacgagcctgagaacctgatgcccacccagatcatccctgggaaggccctgtatgatgtgggggacatcgtgcacagcgtgcgggccaagtggggcatcaaggccaactgcccctgcagcaaccggcagttcaagctgttcagcaagccagccagcaaggaggacctgaagcagaccagcctggccggggagaagcccaccctgggcgctgtgctgcagcagaaccccagcgtgctggagcctgctgctgtgggcggggaggccgccagcaagccagctggctccatgaagccagcctgcccagccagcaccagccccctgaactggctggccgacctgaccagcggaaatgtgaacaaggagaacaaggagaagcagcccaccatgcccatcctgaagaatgagatcaagtgcctgccccccctgccccccctgagcaagagcagcacagtgctgcacaccttcaacagcaccatcctgacccctgtgagcaacaacaacagcggcttcctgaggaacctgctgaacagcagcacaggcaagacagaaaatggcctgaagaacacccccaagatcctggatgacatctttgccagcctggtgcagaacaagaccaccagtgacctgagcaagaggccccagggcctgaccatcaagcccagcatcctgggctttgacaccccccactactggctgtgtgacaaccggctgctgtgcctgcaggaccccaacaacaagagcaactggaatgtgttccgggagtgctggaagcagggccagcctgtgatggtgtctggagtgcaccacaagctgaacagcgagctgtggaagccagagagcttcaggaaggagtttggagagcaggaggtggacctggtgaactgcaggaccaatgagatcatcaccggggccaccgtgggggacttctgggatggctttgaagatgtgcccaaccggctgaagaatgagaaggagcccatggtgctgaagctgaaggactggcccccaggagaggacttccgggacatgatgcccagcagatttgatgacctgatggccaacatccccctgcctgagtacaccaggagagatggcaagctgaacctggccagccggctgcccaactactttgtgcggccagacctgggccccaagatgtacaatgcctacggcctcatcaccccagaggacagaaaatatggcaccaccaacctgcacctggatgtgtctgatgctgccaacgtgatggtgtatgtgggcatccccaagggccagtgtgagcaggaggaggaggtgctgaagaccatccaggatggagacagtgatgagctgaccatcaagcgcttcatcgagggcaaggagaagccaggggccctgtggcacatctatgctgccaaggacacagagaagatccgggagttcctgaagaaggtgtctgaggagcagggccaggagaacccagctgaccatgaccccatccatgaccagagctggtacctggacaggagcctgaggaagaggctgcaccaggagtatggagtgcagggctgggccatcgtgcagttcctgggagatgtggtgttcatcccagctggggccccccaccaggtgcacaacctgtacagctgcatcaaggtggccgaggactttgtgtccccagagcacgtgaagcactgcttctggctgacccaggagttccgctacctgagccagacccacaccaaccacgaggacaagctgcaggtgaagaatgtcatctaccacgctgtgaaggatgctgtggccatgctgaaggccagcgagagcagctttgggaagccctag

SEQ ID NO: 198531 - DNA, 513 bp, Artificial Sequence
  derived and/or modified sequence
atggtgctgaccctgggggagagctggcctgtgctggtgggccgccgcttcctgagcctgtctgctgctgatggcagtgatggcagccatgacagctgggatgtggagcgggtggccgagtggccctggctgagcggcaccatccgggctgtgagccacacagatgtgaccaagaaggacctgaaggtgtgtgtggagtttgatggagagagctggaggaagaggcgctggattgaggtgtacagcctgctgcggcgggccttcctggtggagcacaacctggtgctggccgagaggaagagccctgagatcagcgagcgcatcgtgcagtggccagccatcacctacaagcccctgctggacaaggccggcctgggcagcatcacctctgtgcgcttcctgggggaccagcagagggtcttcctgagcaaggacctgctgaagcccatccaggatgtgaacagcctgcggctgagcctgacagacaaccagatcgtgtccaaggagttctag

SEQ ID NO: 198532 - DNA, 2136 bp, Artificial Sequence
  derived and/or modified sequence
atggtgctgaccctgggggagagctggcctgtgctggtgggccgccgcttcctgagcctgtctgctgctgatggcagtgatggcagccatgacagctgggatgtggagcgggtggccgagtggccctggctgagcggcaccatccgggctgtgagccacacagatgtgaccaagaaggacctgaaggtgtgtgtggagtttgatggagagagctggaggaagaggcgctggattgaggtgtacagcctgctgcggcgggccttcctggtggagcacaacctggtgctggccgagaggaagagccctgagatcagcgagcgcatcgtgcagtggccagccatcacctacaagcccctgctggacaaggccggcctgggcagcatcacctctgtgcgcttcctgggggaccagcagagggtcttcctgagcaaggacctgctgaagcccatccaggatgtgaacagcctgcggctgagcctgacagacaaccagatcgtgtccaaggagttccaggccctgattgtgaagcacctggatgagagccacctgctgaagggggacaagaacctggtgggcagcgaggtgaagatctacagcctggaccccagcacccagtggttcagcgccaccgtcatcaatggaaatcctgccagcaagaccctgcaggtgaactgtgaggagatcccagccctgaagatcgtggaccccagcctcatccacgtggaggtggtgcatgacaacctggtgacctgtggcaacagcgccagaattggagctgtgaagaggaagagcagcgagaacaacggcaccctggtgtccaagcaggccaagagctgcagcgaggccagccccagcatgtgccctgtgcagagcgtgcccaccaccgtcttcaaggagatcctgctgggctgcacagctgccaccccacccagcaaggacccccggcagcagagcaccccccaggccgccaacagcccccccaacctgggcgccaagatcccccagggctgccacaagcagagcctgcctgaggagatcagcagctgcctgaacaccaagtctgaggccctgcggaccaagccagatgtgtgcaaggccggcctgctgagcaagagcagccagattggaactggagacctgaagatcctgacagagcccaagggcagctgcacccagcccaagaccaacacagaccaggagaaccggctggagagcgtgccccaggccctgaccggcctgcccaaggagtgcctgcccaccaaggccagcagcaaggccgagctggagatcgccaaccccccagagctgcagaagcacctggagcacgcccccagccccagtgatgtgtccaatgcccctgaggtgaaggccggcgtgaacagcgacagccccaacaactgcagcggcaagaaggtggagcccagcgccctggcctgccgcagccagaacctgaaggagagctctgtgaaggtggacaatgaaagctgctgcagccgcagcaacaacaagatccagaatgcccccagcaggaagtctgtgctgacagatcctgccaagctgaagaagctgcagcagagcggggaggcctttgtgcaggatgacagctgtgtgaacatcgtggcccagctgcccaagtgccgggagtgccgcctggacagcctgaggaaggacaaggagcagcagaaggacagccctgtgttctgccgcttcttccacttccggcggctgcagttcaacaagcatggagtgctgcgggtggagggcttcctgacccccaacaagtatgacaatgaggccatcggcctgtggctgcccctgaccaagaatgtggtgggcatcgacctggacacagccaagtacatcctggccaacattggagaccacttctgccagatggtgatcagcgagaaggaggccatgagcaccatcgagccccaccggcaggtggcctggaagagagctgtgaagggcgtgcgggagatgtgtgatgtgtgtgacaccaccatcttcaacctgcactgggtgtgcccccgctgtggctttggagtgtgtgtggactgctacaggatgaagaggaagaactgccagcagggagaaaatagatttgacagccccccagcccccctgcacagctag

SEQ ID NO: 198533 - DNA, 366 bp, Artificial Sequence
  derived and/or modified sequence
atggtgctgaccctgggggagagctggcctgtgctggtgggccgccgcttcctgagcctgtctgctgctgatggcagtgatggcagccatgacagctgggatgtggagcgggtggccgagtggccctggctgagcggcaccatccgggctgtgagccacacagatgtgaccaagaaggacctgaaggtgtgtgtggagtttgatggagagagctggaggaagaggcgctggattgaggtgtacagcctgctgcggcgggccttcctggtggagcacaacctggtgctggccgagaggaagagccctgagatcagcgagcgcatcgtgcagtggccagccatcacctacaagcccctgctggactag

SEQ ID NO: 198534 - DNA, 3984 bp, Artificial Sequence
  derived and/or modified sequence
atggtgctgaccctgggggagagctggcctgtgctggtgggccgccgcttcctgagcctgtctgctgctgatggcagtgatggcagccatgacagctgggatgtggagcgggtggccgagtggccctggctgagcggcaccatccgggctgtgagccacacagatgtgaccaagaaggacctgaaggtgtgtgtggagtttgatggagagagctggaggaagaggcgctggattgaggtgtacagcctgctgcggcgggccttcctggtggagcacaacctggtgctggccgagaggaagagccctgagatcagcgagcgcatcgtgcagtggccagccatcacctacaagcccctgctggacaaggccggcctgggcagcatcacctctgtgcgcttcctgggggaccagcagagggtcttcctgagcaaggacctgctgaagcccatccaggatgtgaacagcctgcggctgagcctgacagacaaccagatcgtgtccaaggagttccaggccctgattgtgaagcacctggatgagagccacctgctgaagggggacaagaacctggtgggcagcgaggtgaagatctacagcctggaccccagcacccagtggttcagcgccaccgtcatcaatggaaatcctgccagcaagaccctgcaggtgaactgtgaggagatcccagccctgaagatcgtggaccccagcctcatccacgtggaggtggtgcatgacaacctggtgacctgtggcaacagcgccagaattggagctgtgaagaggaagagcagcgagaacaacggcaccctggtgtccaagcaggccaagagctgcagcgaggccagccccagcatgtgccctgtgcagagcgtgcccaccaccgtcttcaaggagatcctgctgggctgcacagctgccaccccacccagcaaggacccccggcagcagagcaccccccaggccgccaacagcccccccaacctgggcgccaagatcccccagggctgccacaagcagagcctgcctgaggagatcagcagctgcctgaacaccaagtctgaggccctgcggaccaagccagatgtgtgcaaggccggcctgctgagcaagagcagccagattggaactggagacctgaagatcctgacagagcccaagggcagctgcacccagcccaagaccaacacagaccaggagaaccggctggagagcgtgccccaggccctgaccggcctgcccaaggagtgcctgcccaccaaggccagcagcaaggccgagctggagatcgccaaccccccagagctgcagaagcacctggagcacgcccccagccccagtgatgtgtccaatgcccctgaggtgaaggccggcgtgaacagcgacagccccaacaactgcagcggcaagaaggtggagcccagcgccctggcctgccgcagccagaacctgaaggagagctctgtgaaggtggacaatgaaagctgctgcagccgcagcaacaacaagatccagaatgcccccagcaggaagtctgtgctgacagatcctgccaagctgaagaagctgcagcagagcggggaggcctttgtgcaggatgacagctgtgtgaacatcgtggcccagctgcccaagtgccgggagtgccgcctggacagcctgaggaaggacaaggagcagcagaaggacagccctgtgttctgccgcttcttccacttccggcggctgcagttcaacaagcatggagtgctgcgggtggagggcttcctgacccccaacaagtatgacaatgaggccatcggcctgtggctgcccctgaccaagaatgtggtgggcatcgacctggacacagccaagtacatcctggccaacattggagaccacttctgccagatggtgatcagcgagaaggaggccatgagcaccatcgagccccaccggcaggtggcctggaagagagctgtgaagggcgtgcgggagatgtgtgatgtgtgtgacaccaccatcttcaacctgcactgggtgtgcccccgctgtggctttggagtgtgtgtggactgctacaggatgaagaggaagaactgccagcagggcgccgcctacaagaccttctcctggctgaagtgtgtgaagagccagatccacgagcctgagaacctgatgcccacccagatcatccctgggaaggccctgtatgatgtgggggacatcgtgcacagcgtgcgggccaagtggggcatcaaggccaactgcccctgcagcaaccggcagttcaagctgttcagcaagccagccagcaaggaggacctgaagcagaccagcctggccggggagaagcccaccctgggcgctgtgctgcagcagaaccccagcgtgctggagcctgctgctgtgggcggggaggccgccagcaagccagctggctccatgaagccagcctgcccagccagcaccagccccctgaactggctggccgacctgaccagcggaaatgtgaacaaggagaacaaggagaagcagcccaccatgcccatcctgaagaatgagatcaagtgcctgccccccctgccccccctgagcaagagcagcacagtgctgcacaccttcaacagcaccatcctgacccctgtgagcaacaacaacagcggcttcctgaggaacctgctgaacagcagcacaggcaagacagaaaatggcctgaagaacacccccaagatcctggatgacatctttgccagcctggtgcagaacaagaccaccagtgacctgagcaagaggccccagggcctgaccatcaagcccagcatcctgggctttgacaccccccactactggctgtgtgacaaccggctgctgtgcctgcaggaccccaacaacaagagcaactggaatgtgttccgggagtgctggaagcagggccagcctgtgatggtgtctggagtgcaccacaagctgaacagcgagctgtggaagccagagagcttcaggaaggagtttggagagcaggaggtggacctggtgaactgcaggaccaatgagatcatcaccggggccaccgtgggggacttctgggatggctttgaagatgtgcccaaccggctgaagaatgagaaggagcccatggtgctgaagctgaaggactggcccccaggagaggacttccgggacatgatgcccagcagatttgatgacctgatggccaacatccccctgcctgagtacaccaggagagatggcaagctgaacctggccagccggctgcccaactactttgtgcggccagacctgggccccaagatgtacaatgcctacggcctcatcaccccagaggacagaaaatatggcaccaccaacctgcacctggatgtgtctgatgctgccaacgtgatggtgtatgtgggcatccccaagggccagtgtgagcaggaggaggaggtgctgaagaccatccaggatggagacagtgatgagctgaccatcaagcgcttcatcgagggcaaggagaagccaggggccctgtggcacatctatgctgccaaggacacagagaagatccgggagttcctgaagaaggtgtctgaggagcagggccaggagaacccagctgaccatgaccccatccatgaccagagctggtacctggacaggagcctgaggaagaggctgcaccaggagtatggagtgcagggctgggccatcgtgcagttcctgggagatgtggtgttcatcccagctggggccccccaccaggtgcacaacctgtacagctgcatcaaggtggccgaggactttgtgtccccagagcacgtgaagcactgcttctggctgacccaggagttccgctacctgagccagacccacaccaaccacgaggacaagctgcaggtgaagaatgtcatctaccacgctgtgaaggatgctgtggccatgctgaaggtgaaccctgtgctggccaacctgaacctgcctgcccactggaagtag

SEQ ID NO: 198535 - DNA, 3810 bp, Artificial Sequence
  derived and/or modified sequence
atggtgctgaccctgggggagagctggcctgtgctggtgggccgccgcttcctgagcctgtctgctgctgatggcagtgatggcagccatgacagctgggatgtggagcgggtggccgagtggccctggctgagcggcaccatccgggctgtgagccacacagatgtgaccaagaaggacctgaagacctacaagcccctgctggacaaggccggcctgggcagcatcacctctgtgcgcttcctgggggaccagcagagggtcttcctgagcaaggacctgctgaagcccatccaggatgtgaacagcctgcggctgagcctgacagacaaccagatcgtgtccaaggagttccaggccctgattgtgaagcacctggatgagagccacctgctgaagggggacaagaacctggtgggcagcgaggtgaagatctacagcctggaccccagcacccagtggttcagcgccaccgtcatcaatggaaatcctgccagcaagaccctgcaggtgaactgtgaggagatcccagccctgaagatcgtggaccccagcctcatccacgtggaggtggtgcatgacaacctggtgacctgtggcaacagcgccagaattggagctgtgaagaggaagagcagcgagaacaacggcaccctggtgtccaagcaggccaagagctgcagcgaggccagccccagcatgtgccctgtgcagagcgtgcccaccaccgtcttcaaggagatcctgctgggctgcacagctgccaccccacccagcaaggacccccggcagcagagcaccccccaggccgccaacagcccccccaacctgggcgccaagatcccccagggctgccacaagcagagcctgcctgaggagatcagcagctgcctgaacaccaagtctgaggccctgcggaccaagccagatgtgtgcaaggccggcctgctgagcaagagcagccagattggaactggagacctgaagatcctgacagagcccaagggcagctgcacccagcccaagaccaacacagaccaggagaaccggctggagagcgtgccccaggccctgaccggcctgcccaaggagtgcctgcccaccaaggccagcagcaaggccgagctggagatcgccaaccccccagagctgcagaagcacctggagcacgcccccagccccagtgatgtgtccaatgcccctgaggtgaaggccggcgtgaacagcgacagccccaacaactgcagcggcaagaaggtggagcccagcgccctggcctgccgcagccagaacctgaaggagagctctgtgaaggtggacaatgaaagctgctgcagccgcagcaacaacaagatccagaatgcccccagcaggaagtctgtgctgacagatcctgccaagctgaagaagctgcagcagagcggggaggcctttgtgcaggatgacagctgtgtgaacatcgtggcccagctgcccaagtgccgggagtgccgcctggacagcctgaggaaggacaaggagcagcagaaggacagccctgtgttctgccgcttcttccacttccggcggctgcagttcaacaagcatggagtgctgcgggtggagggcttcctgacccccaacaagtatgacaatgaggccatcggcctgtggctgcccctgaccaagaatgtggtgggcatcgacctggacacagccaagtacatcctggccaacattggagaccacttctgccagatggtgatcagcgagaaggaggccatgagcaccatcgagccccaccggcaggtggcctggaagagagctgtgaagggcgtgcgggagatgtgtgatgtgtgtgacaccaccatcttcaacctgcactgggtgtgcccccgctgtggctttggagtgtgtgtggactgctacaggatgaagaggaagaactgccagcagggcgccgcctacaagaccttctcctggctgaagtgtgtgaagagccagatccacgagcctgagaacctgatgcccacccagatcatccctgggaaggccctgtatgatgtgggggacatcgtgcacagcgtgcgggccaagtggggcatcaaggccaactgcccctgcagcaaccggcagttcaagctgttcagcaagccagccagcaaggaggacctgaagcagaccagcctggccggggagaagcccaccctgggcgctgtgctgcagcagaaccccagcgtgctggagcctgctgctgtgggcggggaggccgccagcaagccagctggctccatgaagccagcctgcccagccagcaccagccccctgaactggctggccgacctgaccagcggaaatgtgaacaaggagaacaaggagaagcagcccaccatgcccatcctgaagaatgagatcaagtgcctgccccccctgccccccctgagcaagagcagcacagtgctgcacaccttcaacagcaccatcctgacccctgtgagcaacaacaacagcggcttcctgaggaacctgctgaacagcagcacaggcaagacagaaaatggcctgaagaacacccccaagatcctggatgacatctttgccagcctggtgcagaacaagaccaccagtgacctgagcaagaggccccagggcctgaccatcaagcccagcatcctgggctttgacaccccccactactggctgtgtgacaaccggctgctgtgcctgcaggaccccaacaacaagagcaactggaatgtgttccgggagtgctggaagcagggccagcctgtgatggtgtctggagtgcaccacaagctgaacagcgagctgtggaagccagagagcttcaggaaggagtttggagagcaggaggtggacctggtgaactgcaggaccaatgagatcatcaccggggccaccgtgggggacttctgggatggctttgaagatgtgcccaaccggctgaagaatgagaaggagcccatggtgctgaagctgaaggactggcccccaggagaggacttccgggacatgatgcccagcagatttgatgacctgatggccaacatccccctgcctgagtacaccaggagagatggcaagctgaacctggccagccggctgcccaactactttgtgcggccagacctgggccccaagatgtacaatgcctacggcctcatcaccccagaggacagaaaatatggcaccaccaacctgcacctggatgtgtctgatgctgccaacgtgatggtgtatgtgggcatccccaagggccagtgtgagcaggaggaggaggtgctgaagaccatccaggatggagacagtgatgagctgaccatcaagcgcttcatcgagggcaaggagaagccaggggccctgtggcacatctatgctgccaaggacacagagaagatccgggagttcctgaagaaggtgtctgaggagcagggccaggagaacccagctgaccatgaccccatccatgaccagagctggtacctggacaggagcctgaggaagaggctgcaccaggagtatggagtgcagggctgggccatcgtgcagttcctgggagatgtggtgttcatcccagctggggccccccaccaggtgcacaacctgtacagctgcatcaaggtggccgaggactttgtgtccccagagcacgtgaagcactgcttctggctgacccaggagttccgctacctgagccagacccacaccaaccacgaggacaagctgcaggtgaagaatgtcatctaccacgctgtgaaggatgctgtggccatgctgaaggccagcgagagcagctttgggaagccctag

SEQ ID NO: 198536 - DNA, 4884 bp, Artificial Sequence
  derived and/or modified sequence
taatgggggtcgcccgggagtcggaagggggaggggaaagggaggaggcagccaaggaattgtttttttctctggccccgccctcgcccggggggccaatggtgatgatctgtttcccccggagcctcgcccagctcctgtgtttcagccaatgagcggcggaagcggctccgaggggggcgggtccgggaggctgtgcgtgtcttgtgagagctcttgaaccaagtcagcgctggagtcggctaggcggctggaaacggcggctgccgccggtgactcagggaggcgggaggcgggggaggagctcttcctgcaggcgtggaaaccatggtgctcacgctcggagaaagttggccggtattggtggggaggaggtttctcagtctgtccgcagccgacggcagcgatggcagccacgacagctgggacgtggagcgcgtcgccgagtggccctggctctccgggaccattcgagctgtttcccacaccgacgttaccaagaaggatctgaaggtgtgtgtggaatttgatggggaatcttggaggaaaagaagatggatagaagtctacagccttctaaggagagcatttttagtagaacataatttggttttagctgaacgaaagtcacctgaaatttctgaacgaattgtacagtggcctgcaataacgtacaaacctctgttggacaaagctggtttgggatccataacttctgttcgctttctgggagatcaacaaagagtatttctttctaaagaccttttgaagcctatacaggatgtaaacagtcttcgactttctcttacggataatcagattgtcagtaaagaatttcaagctttgattgtgaagcatttagatgaaagccatcttttaaaaggtgacaaaaacttagttggttcagaagtaaaaatttatagcttggacccatctactcagtggttttcagcaaccgttataaatggaaacccagcatcaaaaactcttcaagtcaactgtgaggagattccagcactgaaaattgttgatccgtcactgattcatgttgaagttgtacacgataaccttgtgacatgtggtaattctgcaagaattggagctgtaaaacgcaagtcttctgagaataatggaaccctggtttccaaacaagcaaaatcttgctctgaggcctctcccagtatgtgtcctgtgcagtctgtacctacaacagtttttaaggagatactgcttggctgtactgcggcaactccacctagtaaggacccaagacagcaaagtactccccaggctgccaactctccacctaaccttggagcaaaaattcctcaaggatgtcataaacaaagtttaccagaggaaatttcttcctgtctaaatacaaagtctgaagctctgagaacaaaaccagatgtctgcaaagcagggttgctctcaaagtcctctcagattggaactggagacttgaaaattctgactgagccaaaaggcagctgtactcagcctaagacaaacactgatcaggaaaacagattggagtctgttccacaagcattgactggccttcctaaggagtgcttacctacaaaggcttcttctaaggcagaattggaaattgccaatcctcctgaactgcagaagcacctagaacatgcaccttccccatcggatgtttcaaatgcaccagaagtgaaagcaggtgtcaatagtgatagccctaataactgttcaggaaaaaaggtagaaccttcagctttagcttgccgatcacagaatttaaaggaatcttcagtaaaagtagataatgaaagctgttgttcaagaagcaacaataaaatccagaatgccccatccaggaagtcggttttgacagacccagctaaactcaaaaagctgcaacagagtggcgaggccttcgtacaggatgattcttgtgtgaacatcgtggcacagttgcctaaatgccgagagtgtcgcttggacagtctccgcaaggataaggagcaacagaaggactcacctgtgttttgccgcttctttcacttcaggaggttacaattcaacaaacatggtgtgttgcgggtagaaggcttcttaacaccaaacaagtatgacaatgaagcaattggcttgtggttacctttaaccaaaaacgttgtggggattgatttggacacagcaaagtacatcttggccaacattggagaccacttctgtcaaatggtgatttctgaaaaggaagctatgtcaactattgagccacacagacaggttgcttggaagcgagctgtcaaaggtgttcgagaaatgtgtgatgtgtgcgacaccaccatcttcaacctgcactgggtgtgtcctcggtgtgggtttggagtatgtgtggactgctaccggatgaagagaaagaattgccaacagggtgctgcttacaagactttctcttggctaaaatgtgtgaagagtcagatacatgaaccagagaacttaatgcccacacagatcattcctggaaaagcactctatgatgttggagacattgttcattctgtaagagcgaaatggggaataaaggcaaactgcccttgttcaaacaggcaattcaaactcttttcaaagccagcctcaaaggaagacctaaaacagacttctttagctggagaaaaaccgactcttggtgcagtgctccagcagaatccctcagtgttggagccagcagctgtgggtggggaagcagcctccaagccagccggcagcatgaagcctgcctgtccagccagcacatctcctctaaactggctggccgacctaaccagcgggaatgtcaacaaggaaaacaaggaaaaacaaccaacaatgccaattttaaagaatgaaatcaaatgccttccacccctcccacctttaagcaaatccagcacagtcctccatacgtttaacagcacaattttgacacccgtaagcaacaacaattctggtttcctccggaatctcttgaattcttctacaggaaagacagaaaatggactcaagaatacaccaaaaatccttgatgacatctttgcctctttggtgcaaaataagacgacttctgatttatctaagaggcctcaaggactaaccatcaagcccagcattctgggctttgacactcctcactattggctttgtgataatcgcttgctgtgcttgcaagaccccaacaataagagcaactggaatgtgtttagggagtgctggaaacaagggcagccagtgatggtgtctggagtgcatcataaattgaactctgaactttggaaacctgaatccttcaggaaagagtttggtgagcaggaagtagacctagttaattgtaggaccaatgaaatcatcacaggagccacagtaggagacttctgggatggatttgaagatgttccaaatcgtttgaaaaatgaaaaagaaccaatggtgttgaaacttaaggactggccaccaggagaagattttagagatatgatgccttccaggtttgatgatctgatggccaacattccactgcccgagtacacaaggcgagatggcaaactgaatttggcctctaggctgccaaactactttgttcggccagatctgggccccaagatgtataatgcttatggattaatcactcctgaagatcggaaatatggaacaacaaatcttcacttagatgtatctgatgcagctaatgtcatggtctatgtgggaattcccaaaggacagtgtgagcaagaagaagaagtccttaagaccatccaagatggagattctgacgaactcacaataaagcgatttattgaaggaaaagagaagccaggagcactgtggcacatatatgctgcaaaggacacggagaagataagggaatttcttaaaaaggtatcagaagagcaaggtcaagaaaacccagcagaccacgatcctattcatgatcaaagctggtatttagaccgatcattaagaaaacgtcttcatcaagagtatggagttcaaggctgggctattgtacagtttcttggggatgtggtgtttatcccggcaggagctccacatcaggttcataacttatatagctgcatcaaagtggctgaagattttgtttctccagagcatgttaaacactgcttctggcttactcaggaattccgatatctgtcacagactcataccaatcacgaagataaattacaggtgaagaatgttatctaccatgcagtgaaagatgcagttgctatgctgaaagccagtgaatccagttttggcaaaccttaatctccctgcacattggaaatgaattacaggcagctgttcaaactcttcaggcaggattcctgtggactttgagattcatgttacctcatcttcttttttaaactgtacccaacttgtgagggtactctgtctaatgtatatttctagtgtttacagacagtaaatgtgtatatgtagtaactatttacagaacatgcatccttaaactgtgacttctcacctagtgcagaacttttaccaggctgtaaaagcaaaacctcgtatcagctctggaacaatacctgcagttattcttcagctgtttggacaacttagattgggtttataactattaggaatcactgcacagtttatttgggttgtgttttgtgtctgagtcccctccctcatcccttagggtccagaagagcaatggaggaagtgacagctaatgttgcagttcttattgtatggcataggactggcattatatagcagaaatcaactactgtacaatttcttggggttaaccatctttagttaaatggaattttaatttaaatgacgctttgctaattttaagtgttaagcattttgcattaaaatattcat

SEQ ID NO: 198537 - DNA, 4621 bp, Artificial Sequence
  derived and/or modified sequence
ctcggctgcggggagaggggagagaaagggaggagctcttcctgcaggcgtggaaaccatggtgctcacgctcggagaaagttggccggtattggtggggaggaggtttctcagtctgtccgcagccgacggcagcgatggcagccacgacagctgggacgtggagcgcgtcgccgagtggccctggctctccgggaccattcgagctgtttcccacaccgacgttaccaagaaggatctgaaggtgtgtgtggaatttgatggggaatcttggaggaaaagaagatggatagaagtctacagccttctaaggagagcatttttagtagaacataatttggttttagctgaacgaaagtcacctgaaatttctgaacgaattgtacagtggcctgcaataacgtacaaacctctgttggacaaagctggtttgggatccataacttctgttcgctttctgggagatcaacaaagagtatttctttctaaagaccttttgaagcctatacaggatgtaaacagtcttcgactttctcttacggataatcagattgtcagtaaagaatttcaagctttgattgtgaagcatttagatgaaagccatcttttaaaaggtgacaaaaacttagttggttcagaagtaaaaatttatagcttggacccatctactcagtggttttcagcaaccgttataaatggaaacccagcatcaaaaactcttcaagtcaactgtgaggagattccagcactgaaaattgttgatccgtcactgattcatgttgaagttgtacacgataaccttgtgacatgtggtaattctgcaagaattggagctgtaaaacgcaagtcttctgagaataatggaaccctggtttccaaacaagcaaaatcttgctctgaggcctctcccagtatgtgtcctgtgcagtctgtacctacaacagtttttaaggagatactgcttggctgtactgcggcaactccacctagtaaggacccaagacagcaaagtactccccaggctgccaactctccacctaaccttggagcaaaaattcctcaaggatgtcataaacaaagtttaccagaggaaatttcttcctgtctaaatacaaagtctgaagctctgagaacaaaaccagatgtctgcaaagcagggttgctctcaaagtcctctcagattggaactggagacttgaaaattctgactgagccaaaaggcagctgtactcagcctaagacaaacactgatcaggaaaacagattggagtctgttccacaagcattgactggccttcctaaggagtgcttacctacaaaggcttcttctaaggcagaattggaaattgccaatcctcctgaactgcagaagcacctagaacatgcaccttccccatcggatgtttcaaatgcaccagaagtgaaagcaggtgtcaatagtgatagccctaataactgttcaggaaaaaaggtagaaccttcagctttagcttgccgatcacagaatttaaaggaatcttcagtaaaagtagataatgaaagctgttgttcaagaagcaacaataaaatccagaatgccccatccaggaagtcggttttgacagacccagctaaactcaaaaagctgcaacagagtggcgaggccttcgtacaggatgattcttgtgtgaacatcgtggcacagttgcctaaatgccgagagtgtcgcttggacagtctccgcaaggataaggagcaacagaaggactcacctgtgttttgccgcttctttcacttcaggaggttacaattcaacaaacatggtgtgttgcgggtagaaggcttcttaacaccaaacaagtatgacaatgaagcaattggcttgtggttacctttaaccaaaaacgttgtggggattgatttggacacagcaaagtacatcttggccaacattggagaccacttctgtcaaatggtgatttctgaaaaggaagctatgtcaactattgagccacacagacaggttgcttggaagcgagctgtcaaaggtgttcgagaaatgtgtgatgtgtgcgacaccaccatcttcaacctgcactgggtgtgtcctcggtgtgggtttggagtatgtgtggactgctaccggatgaagagaaagaattgccaacagggtgctgcttacaagactttctcttggctaaaatgtgtgaagagtcagatacatgaaccagagaacttaatgcccacacagatcattcctggaaaagcactctatgatgttggagacattgttcattctgtaagagcgaaatggggaataaaggcaaactgcccttgttcaaacaggcaattcaaactcttttcaaagccagcctcaaaggaagacctaaaacagacttctttagctggagaaaaaccgactcttggtgcagtgctccagcagaatccctcagtgttggagccagcagctgtgggtggggaagcagcctccaagccagccggcagcatgaagcctgcctgtccagccagcacatctcctctaaactggctggccgacctaaccagcgggaatgtcaacaaggaaaacaaggaaaaacaaccaacaatgccaattttaaagaatgaaatcaaatgccttccacccctcccacctttaagcaaatccagcacagtcctccatacgtttaacagcacaattttgacacccgtaagcaacaacaattctggtttcctccggaatctcttgaattcttctacaggaaagacagaaaatggactcaagaatacaccaaaaatccttgatgacatctttgcctctttggtgcaaaataagacgacttctgatttatctaagaggcctcaaggactaaccatcaagcccagcattctgggctttgacactcctcactattggctttgtgataatcgcttgctgtgcttgcaagaccccaacaataagagcaactggaatgtgtttagggagtgctggaaacaagggcagccagtgatggtgtctggagtgcatcataaattgaactctgaactttggaaacctgaatccttcaggaaagagtttggtgagcaggaagtagacctagttaattgtaggaccaatgaaatcatcacaggagccacagtaggagacttctgggatggatttgaagatgttccaaatcgtttgaaaaatgaaaaagaaccaatggtgttgaaacttaaggactggccaccaggagaagattttagagatatgatgccttccaggtttgatgatctgatggccaacattccactgcccgagtacacaaggcgagatggcaaactgaatttggcctctaggctgccaaactactttgttcggccagatctgggccccaagatgtataatgcttatggattaatcactcctgaagatcggaaatatggaacaacaaatcttcacttagatgtatctgatgcagctaatgtcatggtctatgtgggaattcccaaaggacagtgtgagcaagaagaagaagtccttaagaccatccaagatggagattctgacgaactcacaataaagcgatttattgaaggaaaagagaagccaggagcactgtggcacatatatgctgcaaaggacacggagaagataagggaatttcttaaaaaggtatcagaagagcaaggtcaagaaaacccagcagaccacgatcctattcatgatcaaagctggtatttagaccgatcattaagaaaacgtcttcatcaagagtatggagttcaaggctgggctattgtacagtttcttggggatgtggtgtttatcccggcaggagctccacatcaggttcataacttatatagctgcatcaaagtggctgaagattttgtttctccagagcatgttaaacactgcttctggcttactcaggaattccgatatctgtcacagactcataccaatcacgaagataaattacaggtgaagaatgttatctaccatgcagtgaaagatgcagttgctatgctgaaagccagtgaatccagttttggcaaaccttaatctccctgcacattggaaatgaattacaggcagctgttcaaactcttcaggcaggattcctgtggactttgagattcatgttacctcatcttcttttttaaactgtacccaacttgtgagggtactctgtctaatgtatatttctagtgtttacagacagtaaatgtgtatatgtagtaactatttacagaacatgcatccttaaactgtgacttctcacctagtgcagaacttttaccaggctgtaaaagcaaaacctcgtatcagctctggaacaatacctgcagttattcttcagctgtttggacaacttagattgggtttataactattaggaatcactgcacagtttatttgggttgtgttttgtgtctgagtcccctccctcatcccttagggtccagaagagcaatggaggaagtgacagctaatgttgcagttcttattgtatggcataggactggcattatatagcagaaatcaactactgtacaatttcttggggttaaccatctttagttaaatggaattttaatttaaatgacgctttgctaattttaagtgttaagcattttgcattaaaatattcatataata

SEQ ID NO: 198538 - DNA, 4928 bp, Artificial Sequence
  derived and/or modified sequence
actatcgctcctccctctagctgagtacgcctgaaaccgcacgttctcttccctgccctcccccgctaaccctgcaccgccctcaccctttcctgtgagattcttccgccaagtggaaggctcatcttcggtcgacagcctacgcggttgaagaacaatccacctcgcccagctcctgtgtttcagccaatgagcggcggaagcggctccgaggggggcgggtccgggaggctgtgcgtgtcttgtgagagctcttgaaccaagtcagcgctggagtcggctaggcggctggaaacggcggctgccgccggtgactcagggaggcgggaggcgggggaggagctcttcctgcaggcgtggaaaccatggtgctcacgctcggagaaagttggccggtattggtggggaggaggtttctcagtctgtccgcagccgacggcagcgatggcagccacgacagctgggacgtggagcgcgtcgccgagtggccctggctctccgggaccattcgagctgtttcccacaccgacgttaccaagaaggatctgaaggtgtgtgtggaatttgatggggaatcttggaggaaaagaagatggatagaagtctacagccttctaaggagagcatttttagtagaacataatttggttttagctgaacgaaagtcacctgaaatttctgaacgaattgtacagtggcctgcaataacgtacaaacctctgttggacaaagctggtttgggatccataacttctgttcgctttctgggagatcaacaaagagtatttctttctaaagaccttttgaagcctatacaggatgtaaacagtcttcgactttctcttacggataatcagattgtcagtaaagaatttcaagctttgattgtgaagcatttagatgaaagccatcttttaaaaggtgacaaaaacttagttggttcagaagtaaaaatttatagcttggacccatctactcagtggttttcagcaaccgttataaatggaaacccagcatcaaaaactcttcaagtcaactgtgaggagattccagcactgaaaattgttgatccgtcactgattcatgttgaagttgtacacgataaccttgtgacatgtggtaattctgcaagaattggagctgtaaaacgcaagtcttctgagaataatggaaccctggtttccaaacaagcaaaatcttgctctgaggcctctcccagtatgtgtcctgtgcagtctgtacctacaacagtttttaaggagatactgcttggctgtactgcggcaactccacctagtaaggacccaagacagcaaagtactccccaggctgccaactctccacctaaccttggagcaaaaattcctcaaggatgtcataaacaaagtttaccagaggaaatttcttcctgtctaaatacaaagtctgaagctctgagaacaaaaccagatgtctgcaaagcagggttgctctcaaagtcctctcagattggaactggagacttgaaaattctgactgagccaaaaggcagctgtactcagcctaagacaaacactgatcaggaaaacagattggagtctgttccacaagcattgactggccttcctaaggagtgcttacctacaaaggcttcttctaaggcagaattggaaattgccaatcctcctgaactgcagaagcacctagaacatgcaccttccccatcggatgtttcaaatgcaccagaagtgaaagcaggtgtcaatagtgatagccctaataactgttcaggaaaaaaggtagaaccttcagctttagcttgccgatcacagaatttaaaggaatcttcagtaaaagtagataatgaaagctgttgttcaagaagcaacaataaaatccagaatgccccatccaggaagtcggttttgacagacccagctaaactcaaaaagctgcaacagagtggcgaggccttcgtacaggatgattcttgtgtgaacatcgtggcacagttgcctaaatgccgagagtgtcgcttggacagtctccgcaaggataaggagcaacagaaggactcacctgtgttttgccgcttctttcacttcaggaggttacaattcaacaaacatggtgtgttgcgggtagaaggcttcttaacaccaaacaagtatgacaatgaagcaattggcttgtggttacctttaaccaaaaacgttgtggggattgatttggacacagcaaagtacatcttggccaacattggagaccacttctgtcaaatggtgatttctgaaaaggaagctatgtcaactattgagccacacagacaggttgcttggaagcgagctgtcaaaggtgttcgagaaatgtgtgatgtgtgcgacaccaccatcttcaacctgcactgggtgtgtcctcggtgtgggtttggagtatgtgtggactgctaccggatgaagagaaagaattgccaacagggtgctgcttacaagactttctcttggctaaaatgtgtgaagagtcagatacatgaaccagagaacttaatgcccacacagatcattcctggaaaagcactctatgatgttggagacattgttcattctgtaagagcgaaatggggaataaaggcaaactgcccttgttcaaacaggcaattcaaactcttttcaaagccagcctcaaaggaagacctaaaacagacttctttagctggagaaaaaccgactcttggtgcagtgctccagcagaatccctcagtgttggagccagcagctgtgggtggggaagcagcctccaagccagccggcagcatgaagcctgcctgtccagccagcacatctcctctaaactggctggccgacctaaccagcgggaatgtcaacaaggaaaacaaggaaaaacaaccaacaatgccaattttaaagaatgaaatcaaatgccttccacccctcccacctttaagcaaatccagcacagtcctccatacgtttaacagcacaattttgacacccgtaagcaacaacaattctggtttcctccggaatctcttgaattcttctacaggaaagacagaaaatggactcaagaatacaccaaaaatccttgatgacatctttgcctctttggtgcaaaataagacgacttctgatttatctaagaggcctcaaggactaaccatcaagcccagcattctgggctttgacactcctcactattggctttgtgataatcgcttgctgtgcttgcaagaccccaacaataagagcaactggaatgtgtttagggagtgctggaaacaagggcagccagtgatggtgtctggagtgcatcataaattgaactctgaactttggaaacctgaatccttcaggaaagagtttggtgagcaggaagtagacctagttaattgtaggaccaatgaaatcatcacaggagccacagtaggagacttctgggatggatttgaagatgttccaaatcgtttgaaaaatgaaaaagaaccaatggtgttgaaacttaaggactggccaccaggagaagattttagagatatgatgccttccaggtttgatgatctgatggccaacattccactgcccgagtacacaaggcgagatggcaaactgaatttggcctctaggctgccaaactactttgttcggccagatctgggccccaagatgtataatgcttatggattaatcactcctgaagatcggaaatatggaacaacaaatcttcacttagatgtatctgatgcagctaatgtcatggtctatgtgggaattcccaaaggacagtgtgagcaagaagaagaagtccttaagaccatccaagatggagattctgacgaactcacaataaagcgatttattgaaggaaaagagaagccaggagcactgtggcacatatatgctgcaaaggacacggagaagataagggaatttcttaaaaaggtatcagaagagcaaggtcaagaaaacccagcagaccacgatcctattcatgatcaaagctggtatttagaccgatcattaagaaaacgtcttcatcaagagtatggagttcaaggctgggctattgtacagtttcttggggatgtggtgtttatcccggcaggagctccacatcaggttcataacttatatagctgcatcaaagtggctgaagattttgtttctccagagcatgttaaacactgcttctggcttactcaggaattccgatatctgtcacagactcataccaatcacgaagataaattacaggtgaagaatgttatctaccatgcagtgaaagatgcagttgctatgctgaaagccagtgaatccagttttggcaaaccttaatctccctgcacattggaaatgaattacaggcagctgttcaaactcttcaggcaggattcctgtggactttgagattcatgttacctcatcttcttttttaaactgtacccaacttgtgagggtactctgtctaatgtatatttctagtgtttacagacagtaaatgtgtatatgtagtaactatttacagaacatgcatccttaaactgtgacttctcacctagtgcagaacttttaccaggctgtaaaagcaaaacctcgtatcagctctggaacaatacctgcagttattcttcagctgtttggacaacttagattgggtttataactattaggaatcactgcacagtttatttgggttgtgttttgtgtctgagtcccctccctcatcccttagggtccagaagagcaatggaggaagtgacagctaatgttgcagttcttattgtatggcataggactggcattatatagcagaaatcaactactgtacaatttcttggggttaaccatctttagttaaatggaattttaatttaaatgacgctttgctaattttaagtgttaagcattttgcattaaaatattcatataata

SEQ ID NO: 198539 - DNA, 565 bp, Artificial Sequence
  derived and/or modified sequence
attttgtttttgtgtttttgcagggaggagctcttcctgcaggcgtggaaaccatggtgctcacgctcggagaaagttggccggtattggtggggaggaggtttctcagtctgtccgcagccgacggcagcgatggcagccacgacagctgggacgtggagcgcgtcgccgagtggccctggctctccgggaccattcgagctgtttcccacaccgacgttaccaagaaggatctgaaggtgtgtgtggaatttgatggggaatcttggaggaaaagaagatggatagaagtctacagccttctaaggagagcatttttagtagaacataatttggttttagctgaacgaaagtcacctgaaatttctgaacgaattgtacagtggcctgcaataacgtacaaacctctgttggacaaagctggtttgggatccataacttctgttcgctttctgggagatcaacaaagagtatttctttctaaagaccttttgaagcctatacaggatgtaaacagtcttcgactttctcttacggataatcagattgtcagtaaagaatttca

SEQ ID NO: 198540 - DNA, 8741 bp, Artificial Sequence
  derived and/or modified sequence
gctggagtcggctaggcggctggaaacggcggctgccgccggtgactcagggaggcgggaggcgggggaggagctcttcctgcaggcgtggaaaccatggtgctcacgctcggagaaagttggccggtattggtggggaggaggtttctcagtctgtccgcagccgacggcagcgatggcagccacgacagctgggacgtggagcgcgtcgccgagtggccctggctctccgggaccattcgagctgtttcccacaccgacgttaccaagaaggatctgaaggtgtgtgtggaatttgatggggaatcttggaggaaaagaagatggatagaagtctacagccttctaaggagagcatttttagtagaacataatttggttttagctgaacgaaagtcacctgaaatttctgaacgaattgtacagtggcctgcaataacgtacaaacctctgttggacaaagctggtttgggatccataacttctgttcgctttctgggagatcaacaaagagtatttctttctaaagaccttttgaagcctatacaggatgtaaacagtcttcgactttctcttacggataatcagattgtcagtaaagaatttcaagctttgattgtgaagcatttagatgaaagccatcttttaaaaggtgacaaaaacttagttggttcagaagtaaaaatttatagcttggacccatctactcagtggttttcagcaaccgttataaatggaaacccagcatcaaaaactcttcaagtcaactgtgaggagattccagcactgaaaattgttgatccgtcactgattcatgttgaagttgtacacgataaccttgtgacatgtggtaattctgcaagaattggagctgtaaaacgcaagtcttctgagaataatggaaccctggtttccaaacaagcaaaatcttgctctgaggcctctcccagtatgtgtcctgtgcagtctgtacctacaacagtttttaaggagatactgcttggctgtactgcggcaactccacctagtaaggacccaagacagcaaagtactccccaggctgccaactctccacctaaccttggagcaaaaattcctcaaggatgtcataaacaaagtttaccagaggaaatttcttcctgtctaaatacaaagtctgaagctctgagaacaaaaccagatgtctgcaaagcagggttgctctcaaagtcctctcagattggaactggagacttgaaaattctgactgagccaaaaggcagctgtactcagcctaagacaaacactgatcaggaaaacagattggagtctgttccacaagcattgactggccttcctaaggagtgcttacctacaaaggcttcttctaaggcagaattggaaattgccaatcctcctgaactgcagaagcacctagaacatgcaccttccccatcggatgtttcaaatgcaccagaagtgaaagcaggtgtcaatagtgatagccctaataactgttcaggaaaaaaggtagaaccttcagctttagcttgccgatcacagaatttaaaggaatcttcagtaaaagtagataatgaaagctgttgttcaagaagcaacaataaaatccagaatgccccatccaggaagtcggttttgacagacccagctaaactcaaaaagctgcaacagagtggcgaggccttcgtacaggatgattcttgtgtgaacatcgtggcacagttgcctaaatgccgagagtgtcgcttggacagtctccgcaaggataaggagcaacagaaggactcacctgtgttttgccgcttctttcacttcaggaggttacaattcaacaaacatggtgtgttgcgggtagaaggcttcttaacaccaaacaagtatgacaatgaagcaattggcttgtggttacctttaaccaaaaacgttgtggggattgatttggacacagcaaagtacatcttggccaacattggagaccacttctgtcaaatggtgatttctgaaaaggaagctatgtcaactattgagccacacagacaggttgcttggaagcgagctgtcaaaggtgttcgagaaatgtgtgatgtgtgcgacaccaccatcttcaacctgcactgggtgtgtcctcggtgtgggtttggagtatgtgtggactgctaccggatgaagagaaagaattgccaacagggtgagaaccgatttgattctcctccagcccctctacacagttaaatcaagtgtttttgttgatttgtgtttggcgggtttcttgaagcatgtggagacagagtctgtaaagaacagttactacaaatcagttatttgcaggtgctgcttacaagactttctcttggctaaaatgtgtgaagagtcagatacatgaaccagagaacttaatgcccacacagatcattcctggaaaagcactctatgatgttggagacattgttcattctgtaagagcgaaatggggaataaaggcaaactgcccttgttcaaacaggcaattcaaactcttttcaaagccagcctcaaaggaagacctaaaacaggtatttactgcttatgttaaattcaacatctcttgtaattgtcatttgtctgtttttcaaataacccaaggatttctatcagtgcatttgaaaggaacctggggatagctatcaagtggaaagagagagagaaagaattcatacagttcatgtgacagttcagagacccgttctgacttttcacattactttcgtagactctactgtggcctcttgtagtaggttttacatttttgtttcttgaagaagcacaaagttctaaagtagtctacctaataagtagctgtcgaatttgtaaagggtttaaaaaaattttttgtgtattttgcagaattaaaattattaagataagctttaacatttttaaaattactaaatatattttgcctgtgtttatgcagagttgaaggaaatgatgaaatgaacctttagttgcccatcacacaatgtaaaaaatgttaattttctcagtcctcatatgtctctccttggtggcatccctctcctccccaccatcacatgtacgtcttgctgtcccttctccccctcgttccagtaatcagtatgccgcattgtgtttaataatcagaaatttacatttctataaagctgtggtgtcataaggcaggatgggagagcagaagacttgtaatatttggagtcagaactgaatttgagttcttttccttccacgtgctagttgtgttactttggctgaagtgagctggtttctatgtgcttcagcttcctcatcagtaatatagaaataagaagcaatattgatgattgggcatcacagaattacatcacatgtaaagagagggcctggaccacaacaggggtttgaatattttttttcctccttcttatgtatgtataaactcactcttgccagtttttaaaattattttcttctacagcagtcatcttagatttaatttatgggttcttttaagagctcatcacatttttaaagctaagtcaaaatagcattttctctttctctgcatcccatttccttctgaaatcaccgctttacctttcctgcctgcgtcatttattcgtttttaaccatgttttctgtgcctatcctgaattctgggatgagttcataggggagacaggcacaaactggtcattttaaaccagcatggtacatagagtaatagggatatgtaccagcaggggctggtgaaagggtgcggggggtaataccttgctgtgtttaagttgctgacatctctcctaccttttagttattctctactagtgcgggattactgcagctgtggggatacccagggctaactattaggtggttttgttctggatatttatcttacttgttggtcggctattaggagagaagaaaagaaaaggaagctgtcattcttcagcttatgtaaaatcgtcctttaatgcttaacacagacttctttagctggagaaaaaccgactcttggtgcagtgctccagcagaatccctcagtgttggagccagcagctgtgggtggggaagcagcctccaagccagccggcagcatgaagcctgcctgtccagccagcacatctcctctaaactggctggccgacctaaccagcgggaatgtcaacaaggaaaacaaggaaaaacaaccaacaatgccaattttaaagaatgaaatcaaatgccttccacccctcccacctttaagcaaatccagcacagtcctccatacgtttaacagcacaattttgacacccgtaagcaacaacaattctggtttcctccggaatctcttgaattcttctacaggaaagacagaaaatggactcaagaatacaccaaaaatccttgatgacatctttgcctctttggtgcaaaataagacgacttctgatttatctaagaggcctcaaggactaaccatcaagcccagcattctgggctttgacactcctcactattggctttgtgataatcgcttgctgtgcttgcaagaccccaacaataagagcaactggaatgtgtttagggagtgctggaaacaagggcaggtaatgtaggcctcccatcctcctgccctattcagaacccccttctcagttcctttagcagacttctgacaaccccaccccaggctttccccctccttcacctcctgttttattctttattgtttcaggtgaatataatcaggtcaggatgtggccatgggtcttactttttaaagcagatggtcctaagctggacttttccagtcaggtttttgttgcttcctaccagtccctgttgggtttttgacgagggcatccaggcttggtgattcctatggtaaacttcagcagaggaagtgagggtgtgactacaggctgatgggatttgggagatcagacaaaatgtgctacaaaatcatgcacccctcttacctgaatgaaaagcctgtgctgaaggcagttctaggtgggctagggccgcgtggtgtcacatagtccccaggtgcctgcttcaaagggcagtgttgttggatcttaagtgccggttaatatctttaggagaatttctaggcctgcttctgtgctttcttgttttggttctgttttctggatctctggcttctctgtttggccagatagggtctttgctaaaggaacactctgctcttggacaagaatttgggagaattgccaaacagaaagatgtgagtgtttaaccaaaaataaatttccaaaatgtttttctccatccagtgtactaataggatttgctcatttaatcatatatagacaagaaacaaaatgatgggctgaatacagtttatcggcaggctttctttcttgcttgtcaatattttaatgttagactatttcacataaaggttagagcttctgggttgtcttagacggccaaaagatttggcaccctcacacagccagtagtagtgaggggtgtcacaggccatattcctgcttggcaataacaggctcaagtacggtggggtcagtcaccctgtttcactggtgactggtgtcactggacactccttccagcgcttgtcttcttcacagtccgtcttgctgtaagtaatgagatcttactaggagaggtgatcctttctcctagatgcttacccatgtagtttgagagcaagggtgtgtagcagatgaatggtgaaggttggaggtgctttgggagctcagagaactaagccgaaactgtcacatcaccatctgagacggagcaccagctccatggaaatataccaatagcagtgtgaagagggactgccttcgggagtggggacagagctggcagagttcagactaaagttttccttctcttcatttagccagtgatggtgtctggagtgcatcataaattgaactctgaactttggaaacctgaatccttcaggaaagagtttggtgagcaggaagtagacctagttaattgtaggaccaatgaaatcatcacaggagccacagtaggagacttctgggatggatttgaagatgttccaaatcgtttgaaaaatgaaaaagaaccaatggtgttgaaacttaaggactggccaccaggagaagattttagagatatgatgccttccaggtttgatgatctgatggccaacattccactgcccgagtacacaaggcgagatggcaaactgaatttggcctctaggctgccaaactactttgttcggccagatctgggccccaagatgtataatgcttatggattaatcactcctgaagatcggaaatatggaacaacaaatcttcacttagatgtatctgatgcagctaatgtcatggtctatgtgggaattcccaaaggacagtgtgagcaagaagaagaagtccttaagaccatccaagatggagattctgacgaactcacaataaagcgatttattgaaggaaaagagaagccaggagcactgtggcacatatatgctgcaaaggacacggagaagataagggaatttcttaaaaaggtgtgctgcttatggcatgtgtgaacagaggcataaggaatagcaatattatgttactacatgtggtgaactgactggcttggctaggggaattgtcacaacctgaaaagttaaatctgtacctgtcagattgaataggctgaaggtggttgctaaggaacaaggattctaaatgattagggttacacttctaaaaaaagcaggccttgtcttttatgtctgtgttttgtgttagagtgcatttagagatttttgttctctgctttcaagttagaagttagttcatctgatcatctcccagcatatatctgtttttattgccttgagaatctgagcacttcagacgttcatgtatccttggccctgagtgaccatgttctgagtgagttgctaagtttggttttgtccactgtcatgtagcaagtggtcctacttgttactagcaagggttgcagggatttggaagattctaggtttcccctgtagttggcaggtttttttttcagcaagggctatgtgtggaaattctaggcaactagaaagatgagtcgtgttcagttttaaaattgtttggcactgaggctgccggttgcaactcaggtgtctttggctgatattcttcagtcattcatgagtcttggatatgaacattcgtaacctgttagctggccccaagtatgtctttaacaagcatttgtttgaatcaaagtgtttctggctaaggatcatttggctcttccagaaaaccggcttggtcaccatattgttcttttgatattgtcactctgagtctctgctttaccagttactggatcaaggataaacaagtctaatctgcagctgtctttgggactgtttcgtaagtcagattaagtaaaggcaggtttctaataactttaaaacaagttcatttataaggatactgagcctacttatgtttaaaaatctagactaaaatattgtttaaatacagtatttacaaacttatgcagagcctgtcagtcatggtttatgggaactgacatcacattttcttcgtcattcttctgttggttcattcagctgaagtctttgatactactagtcgtcttctgccaatgggggcacttaagttgaagaaggcctgacatttatgaactgccaacactgtttagaggaaaaaaatggcttattgggccttagcatgttactgagttgcataatattttgaatgtattctaggtatcagaagagcaaggtcaagaaaacccagcagaccacgatcctattcatgatcaaagctggtatttagaccgatcattaagaaaacgtcttcatcaagagtatggagttcaaggctgggctattgtacagtttcttggggatgtggtgtttatcccggcaggagctccacatcaggttcataacttatatagctgcatcaaagtggctgaagattttgtttctccagagcatgttaaacactgcttctggcttactcaggaattccgatatctgtcacagactcataccaatcacgaagataaattacaggtgaagaatgttatctaccatgcagtgaaagatgcagttgctatgctgaaagccagtgaatccagttttggcaaaccttaatctccctgcacattggaaatgaattacaggcagctgttcaaactcttcaggcaggattcctgtggactttgagattcatgttacctcatcttcttttttaaactgtacccaacttgtgagggtactctgtctaatgtatatttctagtgtttacagacagtaaatgtgtatatgtagtaactatttacagaacatgcatccttaaactgtgacttctcacctagtgcagaacttttaccaggctgtaaaagcaaaacctcgtatcagctctggaacaatacctgcagttattcttcagctgtttggacaacttagattgggtttataactattaggaatcactgcacagtttatttgggttgtgttttgtgtctgagtcccctccctcatcccttagggtccagaagagcaatggaggaagtgacagctaatgttgcagttcttattgtatggcataggactggcattatatagcagaaatcaactactgtacaatttcttggggttaaccatctttagttaaatggaattttaatttaaatgacgctttgctaattttaagtgttaagcattttgcattaaaatattcatataa

SEQ ID NO: 198541 - DNA, 709 bp, Artificial Sequence
  derived and/or modified sequence
attatccagtaactccacgcctttcttcatttatccttcaaaatggcggactttagacgttccacgatcagtaccacgtgcgcctgcgcctcccgcagccatttcgcccagcagcctaagctcggcgaggcgcctgcgcacgagcctccagagcactatcgctcctccctctagctgagtacgcctgaaaccgcacgttctcttccctgccctcccccgctaaccctgcaccgccctcaccctttcctgtgagattcttccgccaagtggaaggctcatcttcggtcgacagcctacgcggttgaagaacaatccaggaggagctcttcctgcaggcgtggaaaccatggtgctcacgctcggagaaagttggccggtattggtggggaggaggtttctcagtctgtccgcagccgacggcagcgatggcagccacgacagctgggacgtggagcgcgtcgccgagtggccctggctctccgggaccattcgagctgtttcccacaccgacgttaccaagaaggatctgaaggtgtgtgtggaatttgatggggaatcttggaggaaaagaagatggatagaagtctacagccttctaaggagagcatttttagtagaacataatttggttttagctgaacgaaagtcacctgaaatttctgaacgaattgtacagtggcctgcaataacgtacaaacctctgttggac

SEQ ID NO: 198542 - DNA, 4880 bp, Artificial Sequence
  derived and/or modified sequence
taatgggggtcgcccgggagtcggaagggggaggggaaagggaggaggcagccaaggaattgtttttttctctggccccgccctcgcccggggggccaatggtgatgatctgtttcccccggagcctcgcccagctcctgtgtttcagccaatgagcggcggaagcggctccgaggggggcgggtccgggaggctgtgcgtgtcttgtgagagctcttgaaccaagtcagcgctggagtcggctaggcggctggaaacggcggctgccgccggtgactcagggaggcgggaggcgggggaggagctcttcctgcaggcgtggaaaccatggtgctcacgctcggagaaagttggccggtattggtggggaggaggtttctcagtctgtccgcagccgacggcagcgatggcagccacgacagctgggacgtggagcgcgtcgccgagtggccctggctctccgggaccattcgagctgtttcccacaccgacgttaccaagaaggatctgaaggtgtgtgtggaatttgatggggaatcttggaggaaaagaagatggatagaagtctacagccttctaaggagagcatttttagtagaacataatttggttttagctgaacgaaagtcacctgaaatttctgaacgaattgtacagtggcctgcaataacgtacaaacctctgttggacaaagctggtttgggatccataacttctgttcgctttctgggagatcaacaaagagtatttctttctaaagaccttttgaagcctatacaggatgtaaacagtcttcgactttctcttacggataatcagattgtcagtaaagaatttcaagctttgattgtgaagcatttagatgaaagccatcttttaaaaggtgacaaaaacttagttggttcagaagtaaaaatttatagcttggacccatctactcagtggttttcagcaaccgttataaatggaaacccagcatcaaaaactcttcaagtcaactgtgaggagattccagcactgaaaattgttgatccgtcactgattcatgttgaagttgtacacgataaccttgtgacatgtggtaattctgcaagaattggagctgtaaaacgcaagtcttctgagaataatggaaccctggtttccaaacaagcaaaatcttgctctgaggcctctcccagtatgtgtcctgtgcagtctgtacctacaacagtttttaaggagatactgcttggctgtactgcggcaactccacctagtaaggacccaagacagcaaagtactccccaggctgccaactctccacctaaccttggagcaaaaattcctcaaggatgtcataaacaaagtttaccagaggaaatttcttcctgtctaaatacaaagtctgaagctctgagaacaaaaccagatgtctgcaaagcagggttgctctcaaagtcctctcagattggaactggagacttgaaaattctgactgagccaaaaggcagctgtactcagcctaagacaaacactgatcaggaaaacagattggagtctgttccacaagcattgactggccttcctaaggagtgcttacctacaaaggcttcttctaaggcagaattggaaattgccaatcctcctgaactgcagaagcacctagaacatgcaccttccccatcggatgtttcaaatgcaccagaagtgaaagcaggtgtcaatagtgatagccctaataactgttcaggaaaaaaggtagaaccttcagctttagcttgccgatcacagaatttaaaggaatcttcagtaaaagtagataatgaaagctgttgttcaagaagcaacaataaaatccagaatgccccatccaggaagtcggttttgacagacccagctaaactcaaaaagctgcaacagagtggcgaggccttcgtacaggatgattcttgtgtgaacatcgtggcacagttgcctaaatgccgagagtgtcgcttggacagtctccgcaaggataaggagcaacagaaggactcacctgtgttttgccgcttctttcacttcaggaggttacaattcaacaaacatggtgtgttgcgggtagaaggcttcttaacaccaaacaagtatgacaatgaagcaattggcttgtggttacctttaaccaaaaacgttgtggggattgatttggacacagcaaagtacatcttggccaacattggagaccacttctgtcaaatggtgatttctgaaaaggaagctatgtcaactattgagccacacagacaggttgcttggaagcgagctgtcaaaggtgttcgagaaatgtgtgatgtgtgcgacaccaccatcttcaacctgcactgggtgtgtcctcggtgtgggtttggagtatgtgtggactgctaccggatgaagagaaagaattgccaacagggtgctgcttacaagactttctcttggctaaaatgtgtgaagagtcagatacatgaaccagagaacttaatgcccacacagatcattcctggaaaagcactctatgatgttggagacattgttcattctgtaagagcgaaatggggaataaaggcaaactgcccttgttcaaacaggcaattcaaactcttttcaaagccagcctcaaaggaagacctaaaacagacttctttagctggagaaaaaccgactcttggtgcagtgctccagcagaatccctcagtgttggagccagcagctgtgggtggggaagcagcctccaagccagccggcagcatgaagcctgcctgtccagccagcacatctcctctaaactggctggccgacctaaccagcgggaatgtcaacaaggaaaacaaggaaaaacaaccaacaatgccaattttaaagaatgaaatcaaatgccttccacccctcccacctttaagcaaatccagcacagtcctccatacgtttaacagcacaattttgacacccgtaagcaacaacaattctggtttcctccggaatctcttgaattcttctacaggaaagacagaaaatggactcaagaatacaccaaaaatccttgatgacatctttgcctctttggtgcaaaataagacgacttctgatttatctaagaggcctcaaggactaaccatcaagcccagcattctgggctttgacactcctcactattggctttgtgataatcgcttgctgtgcttgcaagaccccaacaataagagcaactggaatgtgtttagggagtgctggaaacaagggcagccagtgatggtgtctggagtgcatcataaattgaactctgaactttggaaacctgaatccttcaggaaagagtttggtgagcaggaagtagacctagttaattgtaggaccaatgaaatcatcacaggagccacagtaggagacttctgggatggatttgaagatgttccaaatcgtttgaaaaatgaaaaagaaccaatggtgttgaaacttaaggactggccaccaggagaagattttagagatatgatgccttccaggtttgatgatctgatggccaacattccactgcccgagtacacaaggcgagatggcaaactgaatttggcctctaggctgccaaactactttgttcggccagatctgggccccaagatgtataatgcttatggattaatcactcctgaagatcggaaatatggaacaacaaatcttcacttagatgtatctgatgcagctaatgtcatggtctatgtgggaattcccaaaggacagtgtgagcaagaagaagaagtccttaagaccatccaagatggagattctgacgaactcacaataaagcgatttattgaaggaaaagagaagccaggagcactgtggcacatatatgctgcaaaggacacggagaagataagggaatttcttaaaaaggtatcagaagagcaaggtcaagaaaacccagcagaccacgatcctattcatgatcaaagctggtatttagaccgatcattaagaaaacgtcttcatcaagagtatggagttcaaggctgggctattgtacagtttcttggggatgtggtgtttatcccggcaggagctccacatcaggttcataacttatatagctgcatcaaagtggctgaagattttgtttctccagagcatgttaaacactgcttctggcttactcaggaattccgatatctgtcacagactcataccaatcacgaagataaattacaggtgaagaatgttatctaccatgcagtgaaagatgcagttgctatgctgaaagtgaatccagttttggcaaaccttaatctccctgcacattggaaatgaattacaggcagctgttcaaactcttcaggcaggattcctgtggactttgagattcatgttacctcatcttcttttttaaactgtacccaacttgtgagggtactctgtctaatgtatatttctagtgtttacagacagtaaatgtgtatatgtagtaactatttacagaacatgcatccttaaactgtgacttctcacctagtgcagaacttttaccaggctgtaaaagcaaaacctcgtatcagctctggaacaatacctgcagttattcttcagctgtttggacaacttagattgggtttataactattaggaatcactgcacagtttatttgggttgtgttttgtgtctgagtcccctccctcatcccttagggtccagaagagcaatggaggaagtgacagctaatgttgcagttcttattgtatggcataggactggcattatatagcagaaatcaactactgtacaatttcttggggttaaccatctttagttaaatggaattttaatttaaatgacgctttgctaattttaagtgttaagcattttgcattaaaatattcat

SEQ ID NO: 198543 - DNA, 3903 bp, Artificial Sequence
  derived and/or modified sequence
atggtgctcacgctcggagaaagttggccggtattggtggggaggaggtttctcagtctgtccgcagccgacggcagcgatggcagccacgacagctgggacgtggagcgcgtcgccgagtggccctggctctccgggaccattcgagctgtttcccacaccgacgttaccaagaaggatctgaagacgtacaaacctctgttggacaaagctggtttgggatccataacttctgttcgctttctgggagatcaacaaagagtatttctttctaaagaccttttgaagcctatacaggatgtaaacagtcttcgactttctcttacggataatcagattgtcagtaaagaatttcaagctttgattgtgaagcatttagatgaaagccatcttttaaaaggtgacaaaaacttagttggttcagaagtaaaaatttatagcttggacccatctactcagtggttttcagcaaccgttataaatggaaacccagcatcaaaaactcttcaagtcaactgtgaggagattccagcactgaaaattgttgatccgtcactgattcatgttgaagttgtacacgataaccttgtgacatgtggtaattctgcaagaattggagctgtaaaacgcaagtcttctgagaataatggaaccctggtttccaaacaagcaaaatcttgctctgaggcctctcccagtatgtgtcctgtgcagtctgtacctacaacagtttttaaggagatactgcttggctgtactgcggcaactccacctagtaaggacccaagacagcaaagtactccccaggctgccaactctccacctaaccttggagcaaaaattcctcaaggatgtcataaacaaagtttaccagaggaaatttcttcctgtctaaatacaaagtctgaagctctgagaacaaaaccagatgtctgcaaagcagggttgctctcaaagtcctctcagattggaactggagacttgaaaattctgactgagccaaaaggcagctgtactcagcctaagacaaacactgatcaggaaaacagattggagtctgttccacaagcattgactggccttcctaaggagtgcttacctacaaaggcttcttctaaggcagaattggaaattgccaatcctcctgaactgcagaagcacctagaacatgcaccttccccatcggatgtttcaaatgcaccagaagtgaaagcaggtgtcaatagtgatagccctaataactgttcaggaaaaaaggtagaaccttcagctttagcttgccgatcacagaatttaaaggaatcttcagtaaaagtagataatgaaagctgttgttcaagaagcaacaataaaatccagaatgccccatccaggaagtcggttttgacagacccagctaaactcaaaaagctgcaacagagtggcgaggccttcgtacaggatgattcttgtgtgaacatcgtggcacagttgcctaaatgccgagagtgtcgcttggacagtctccgcaaggataaggagcaacagaaggactcacctgtgttttgccgcttctttcacttcaggaggttacaattcaacaaacatggtgtgttgcgggtagaaggcttcttaacaccaaacaagtatgacaatgaagcaattggcttgtggttacctttaaccaaaaacgttgtggggattgatttggacacagcaaagtacatcttggccaacattggagaccacttctgtcaaatggtgatttctgaaaaggaagctatgtcaactattgagccacacagacaggttgcttggaagcgagctgtcaaaggtgttcgagaaatgtgtgatgtgtgcgacaccaccatcttcaacctgcactgggtgtgtcctcggtgtgggtttggagtatgtgtggactgctaccggatgaagagaaagaattgccaacagggtgctgcttacaagactttctcttggctaaaatgtgtgaagagtcagatacatgaaccagagaacttaatgcccacacagatcattcctggaaaagcactctatgatgttggagacattgttcattctgtaagagcgaaatggggaataaaggcaaactgcccttgttcaaacaggcaattcaaactcttttcaaagccagcctcaaaggaagacctaaaacagacttctttagctggagaaaaaccgactcttggtgcagtgctccagcagaatccctcagtgttggagccagcagctgtgggtggggaagcagcctccaagccagccggcagcatgaagcctgcctgtccagccagcacatctcctctaaactggctggccgacctaaccagcgggaatgtcaacaaggaaaacaaggaaaaacaaccaacaatgccaattttaaagaatgaaatcaaatgccttccacccctcccacctttaagcaaatccagcacagtcctccatacgtttaacagcacaattttgacacccgtaagcaacaacaattctggtttcctccggaatctcttgaattcttctacaggaaagacagaaaatggactcaagaatacaccaaaaatccttgatgacatctttgcctctttggtgcaaaataagacgacttctgatttatctaagaggcctcaaggactaaccatcaagcccagcattctgggctttgacactcctcactattggctttgtgataatcgcttgctgtgcttgcaagaccccaacaataagagcaactggaatgtgtttagggagtgctggaaacaagggcagccagtgatggtgtctggagtgcatcataaattgaactctgaactttggaaacctgaatccttcaggaaagagtttggtgagcaggaagtagacctagttaattgtaggaccaatgaaatcatcacaggagccacagtaggagacttctgggatggatttgaagatgttccaaatcgtttgaaaaatgaaaaagaaccaatggtgttgaaacttaaggactggccaccaggagaagattttagagatatgatgccttccaggtttgatgatctgatggccaacattccactgcccgagtacacaaggcgagatggcaaactgaatttggcctctaggctgccaaactactttgttcggccagatctgggccccaagatgtataatgcttatggattaatcactcctgaagatcggaaatatggaacaacaaatcttcacttagatgtatctgatgcagctaatgtcatggtctatgtgggaattcccaaaggacagtgtgagcaagaagaagaagtccttaagaccatccaagatggagattctgacgaactcacaataaagcgatttattgaaggaaaagagaagccaggagcactgtggcacatatatgctgcaaaggacacggagaagataagggaatttcttaaaaaggtatcagaagagcaaggtcaagaaaacccagcagaccacgatcctattcatgatcaaagctggtatttagaccgatcattaagaaaacgtcttcatcaagagtatggagttcaaggctgggctattgtacagtttcttggggatgtggtgtttatcccggcaggagctccacatcaggttcataacttatatagctgcatcaaagtggctgaagattttgtttctccagagcatgttaaacactgcttctggcttactcaggaattccgatatctgtcacagactcataccaatcacgaagataaattacaggtgaagaatgttatctaccatgcagtgaaagatgcagttgctatgctgaaagccagtgaatccagttttggcaaaccttaatctccctgcacattggaaatgaattacaggcagctgttcaaactcttcaggcaggattcctgtggactttgagattcatgttacctcatcttc

SEQ ID NO: 198544 - DNA, 3966 bp, Artificial Sequence
  derived and/or modified sequence
atggtgctgaccctgggcgagagctggcccgtgctggtgggccggaggttcctgtcgctgtcagccgccgatgggtctgacggtagccatgactcatgggatgtggaaagggtagcagaatggccctggctatctggaaccatcagggcagtttcacacaccgacgttactaaaaaggatctgaaggtctgcgtcgagtttgacggggagtcttggcggaagaggcgctggatcgaagtgtattccctgttacgtcgcgcgttccttgtcgagcacaaccttgtactcgccgagcgcaagtcaccagaaatctctgagagaatagtgcagtggccggccatcacctataagcccctccttgacaaggcaggccttgggtctatcacttcagtccggtttctgggcgatcagcagagagtctttcttagcaaggacctcctcaagcctatccaggacgtcaattcgctccgcttgagccttacggacaatcagattgtatccaaagagtttcaagctttgatcgtgaagcacctcgacgagagtcacctgctcaagggagacaagaatttggtcggctcagaggttaagatatacagcctcgacccttccactcaatggttttcagccactgttataaacggaaatccggcaagtaagactttacaggtgaactgcgaggaaataccagctctcaagattgtggatcctagtctgattcacgttgaggtggtgcacgacaatctggttacatgcggcaactcagccaggatcggggccgtaaagaggaagagctcggaaaataacggtactctcgtgtccaagcaagccaaatcttgctctgaggcttctccatccatgtgccctgtccaatccgtgcctacaactgtgttcaaggagattctgcttggctgcacagctgccactccaccaagcaaggatccccgtcaacaaagtaccccacaggctgcaaactctccaccaaatttgggggccaaaatcccccaggggtgccacaaacagtctctccctgaagagatctctagctgcctgaataccaaatccgaagctttgaggactaaacccgacgtttgcaaagccggcttactgtcgaaaagcagtcaaataggcaccggtgacctgaagattttaacggaaccaaagggaagttgcactcagccaaagactaacaccgaccaggaaaatagactagagtcagtacctcaggcactgactgggctcccaaaagaatgtctccccacaaaggcttcttccaaagctgaacttgaaatagcaaaccccccggagctccaaaagcatctggagcacgctcccagcccttcagatgtgtctaatgcacccgaggtcaaagctggcgtaaatagcgactctcccaacaattgctccggtaaaaaggtcgagccaagcgccttagcttgcaggagccagaacttaaaagaatcctccgttaaggtggacaatgagagctgctgtagccgcagtaataataagatacagaacgcgcctagcaggaaaagcgttctaacagaccctgctaagcttaagaagttacagcaatctggggaggcttttgtgcaggacgactcatgtgtgaacattgtagcccagctgccaaagtgccgagagtgtcggctggacagtctcagaaaagataaggagcaacagaaggacagcccggtattctgtcgattttttcatttcaggagactgcagttcaataaacacggagtcctgagggtggagggatttctgacgccaaacaaatatgacaacgaagccatcggtttgtggttgccgctcacgaagaatgtcgtcggcatcgacctggatactgccaagtatatcctagccaatatcggggaccatttctgtcagatggttatttctgaaaaagaggccatgtctacaattgaaccacacagacaagtggcatggaaacgggcagttaaaggtgtcagagagatgtgcgacgtttgcgatactacaatatttaacctgcactgggtgtgtccccgttgtggattcggtgtgtgcgtagactgttaccggatgaaacgaaaaaattgtcaacaaggcgccgcgtataagacattctcctggctgaaatgtgtgaaatcccagatccatgagccagagaatttaatgccaactcaaattataccaggcaaagccctgtatgacgttggcgatatcgttcactccgtacgcgcaaagtggggcatcaaagccaattgtccttgttccaaccgccaatttaaactattctccaagcctgcgagtaaggaggacctcaagcagaccagcctggcaggcgaaaaacccactcttggtgccgtcttgcagcagaacccctctgtcctagaacctgctgccgttgggggcgaggctgcaagcaagcccgcgggcagtatgaagccagcctgcccagcgtccacctctccactgaactggttggccgatctaacttctggtaatgtcaacaaggagaacaaggagaaacagccaaccatgcccatcttgaaaaatgagattaaatgtctcccccccctgcccccgctctccaagtctagtactgtcctccacaccttcaattcaacaatccttaccccggtatccaataataactcaggatttctgcggaatttgctaaattctagtaccggtaagactgagaacggtctgaaaaacacacccaaaattttggatgacatcttcgccagcctggtgcagaataagaccacctctgatttgtctaaacgacctcagggcctgacaatcaaaccttcaatccttggatttgacacaccacactattggctctgtgacaacagactgttatgcctgcaggatcccaataataaatccaactggaatgtctttcgcgaatgttggaagcaagggcagcctgtcatggtgagcggcgtccaccataaactgaatagcgagctttggaagcctgaatcctttagaaaagagttcggcgagcaggaggtcgatctcgtgaattgtaggacaaacgagatcattacaggtgctacagttggagatttttgggacgggttcgaagatgtgcctaatcgcctgaagaacgagaaagaacccatggtgttgaaacttaaggactggcctccaggcgaggattttagggacatgatgccctcccggttcgacgatctcatggcaaatatccctctgcccgaatatacgcgccgcgatggaaagctcaatcttgccagtcgtctccctaactatttcgtgagacctgatctgggacctaaaatgtacaacgcttatgggcttatcactccggaagaccgcaaatacggcactacaaacctccatttggacgtgtcagacgccgccaatgttatggtttatgtgggaatacccaaaggtcagtgcgaacaggaggaagaggtactcaagacaatacaggatggtgatagcgacgagcttaccatcaagcgcttcatagaggggaaggaaaagccaggcgcactctggcatatctatgctgctaaggataccgagaagatcagggagtttctgaaaaaagtttccgaggagcaggggcaagagaatccagctgatcatgacccgatacacgatcagtcatggtatcttgacagatcactgagaaaacggttacaccaggagtacggtgtgcagggctgggcaattgtgcaattccttggcgacgtagtgttcatccctgcgggggcaccccatcaggtgcacaatttgtattcctgcattaaggtcgccgaggactttgtttctcccgagcacgtgaaacactgcttttggctgacccaggagtttcgttatttatcacaaacccacactaatcacgaggacaaactccaggtcaagaatgtcatctaccacgctgtgaaagatgctgtcgccatgctgaaagctagcgagtcatcattcgggaaaccctag

SEQ ID NO: 198545 - DNA, 3966 bp, Artificial Sequence
  derived and/or modified sequence
atggtgctgaccctgggcgagagctggcccgtgctggtgggccggcggtttctgtccctgagtgccgcagacggttccgatgggagtcacgattcatgggatgtagagagggtggctgaatggccttggctcagtggtactatcagagcagtgtcacatacagacgtcactaagaaggatctcaaggtttgcgttgaatttgacggggaatcatggcggaaaagaagatggatagaggtttacagcctcctgaggagggcatttctggttgagcataatttagtcctggccgagcgcaaaagccccgagatttccgagcgcattgtccaatggccagccattacatacaaaccgcttctggacaaggctgggctcggctccatcaccagtgtccgcttcttgggagaccagcaacgggtgtttctctccaaagatttgttgaagccaattcaagacgtgaattccctcagactgtccctaacagataaccaaatcgtgagcaaagagtttcaggccctgattgtgaaacacttagacgagagccatctgcttaaaggagacaaaaaccttgtgggcagcgaagtcaaaatttactcactcgacccctccacgcagtggttctcagccaccgtgattaatggtaatccagccagcaaaaccttgcaagttaattgcgaggagattcctgccctaaagatcgtggaccccagtttaatacatgtcgaggttgtgcatgataacctggttacttgtggcaacagcgccaggatcggagcggtgaagcggaagtcgagtgaaaacaatgggacgctggttagtaaacaggctaagagctgtagcgaggccagtccttccatgtgcccggttcagtctgtgcctacgacggtgtttaaggagatcctgctgggatgcactgccgcgacccccccttccaaggacccacgccaacagagcactccccaggccgcaaactcgccccccaacctgggcgctaagattccccagggctgtcataaacaaagcttgcccgaagagatatccagctgtctgaacactaagtcagaagctttgaggacaaaacccgacgtctgcaaagccggtttgctcagcaagagttcacagatcggcactggtgacctgaagattctgaccgagcccaagggaagctgtactcaaccgaaaactaatactgaccaagagaaccgactggaatctgtcccgcaggccttaactggactgcccaaggaatgcctgcccacgaaagctagtagtaaggcagagttagagatcgctaacccacccgagttacaaaagcacctcgaacatgctccgagccctagcgatgtgagcaacgcccctgaggtgaaagctggcgtgaactctgattcaccaaataattgttcgggcaaaaaggtggagcctagcgccctagcttgcaggtcccagaacctcaaggaatcctccgtgaaagtggataacgagtcatgctgttcacgcagtaacaacaagatccagaatgctccatcaagaaaaagtgttctaaccgatccagccaaactgaagaagctgcaacagtctggcgaggcgtttgtccaggacgatagctgtgttaacatagtggctcaactgccaaagtgtcgagagtgcagactagactcactgcgcaaggacaaggaacagcaaaaggactccccggttttctgcaggttttttcatttccgcagactgcaatttaacaaacacggggtcctgcgagtggaggggtttttgacacctaacaagtatgacaatgaagctataggactgtggctcccgctgacgaagaacgttgtcggaatcgacctggacactgctaaatatatcctggccaatattggggatcacttttgccagatggtgatctctgagaaggaagccatgagtacgatcgagccacatcggcaggtggcttggaagcgagcagtgaagggagtgcgcgagatgtgtgatgtctgcgacacgacaatttttaacctgcattgggtctgcccgcgttgtggatttggagtctgcgttgattgctacagaatgaagaggaagaattgccagcagggggctgcttacaaaacttttagctggttaaagtgcgtaaaatctcagatccatgaacctgagaatctgatgcccacccagatcatccctggtaaagccctatacgacgtaggcgacattgttcatagtgtccgtgccaaatggggcattaaggctaactgcccctgctctaatcggcagttcaaactcttcagtaaaccagcttccaaggaggatcttaaacagacatctctggcaggagaaaagcctaccttgggcgccgtactacaacagaaccctagcgtgctggagcctgccgcggtcggcggcgaggcagccagtaaacccgccggatctatgaaaccagcatgcccagctagcacttccccgctgaactggctagccgacctcacttccggaaatgtgaacaaggagaacaaggagaaacaacccaccatgccaattctgaaaaatgagatcaagtgtctgcccccactgcctcctctgtcaaagagctctacagtgctccacacctttaactctacgatcctgacccctgtgagcaataacaatagcgggttcctcaggaacctactgaattcttctaccggcaaaacagaaaacggactcaagaacacacctaaaattttggacgatatattcgcctcacttgtacagaacaaaaccacttcagatctctctaagcggccccaaggccttacaatcaagccatcaattttgggattcgatacgccacattactggctgtgcgacaacaggcttttatgtctgcaggacccaaataacaagagcaactggaacgtgttccgagagtgctggaaacagggtcagcccgtgatggttagtggcgtccaccataagctgaactccgagctgtggaagcccgagagctttaggaaggagtttggcgagcaggaggtcgatttggtgaactgcaggacgaatgaaatcattaccggcgctaccgtcggggacttctgggacggattcgaagatgttcccaatcgacttaagaatgagaaggagccaatggtgttgaagctgaaagactggcccccgggtgaggatttccgggatatgatgccatctcgttttgacgatctgatggctaacatccccttgccagagtatactcgcagagacgggaaattgaacctggccagcagactgcctaactacttcgtgcgaccggacctcggaccaaaaatgtacaacgcatatggccttatcacccctgaggatcggaagtacggcacaactaatcttcacctcgacgttagcgacgcagcaaatgttatggtctatgtcgggatcccgaaaggccagtgtgaacaggaagaagaggtactgaagacaatacaggacggagatagtgacgaactgacgattaaaaggtttatcgaaggaaaagaaaagcctggcgcgctttggcatatttatgctgccaaggatactgaaaagattagagaattcttgaaaaaggtcagcgaggaacaaggtcaagagaaccctgctgatcatgatcctatccacgatcaatcttggtacctggaccggtctttaagaaagaggctgcaccaggagtacggagtacaggggtgggctatagttcagttcttaggcgacgtagtatttatcccggctggggcaccccaccaggtgcataatctgtatagctgcatcaaagtggccgaggacttcgtgtcaccagagcacgtcaaacattgcttctggctgacacaggaattccggtatctatcccaaacacatacgaaccacgaggacaaactgcaggttaagaatgtcatataccatgccgtgaaagacgccgttgccatgcttaaagccagcgagagctcctttggtaagccctag

SEQ ID NO: 198546 - DNA, 3966 bp, Artificial Sequence
  derived and/or modified sequence
atggtgctgaccctgggcgagagctggcccgtgctggtgggccggaggtttctcagtctcagtgccgctgacggcagtgacggatctcatgatagctgggacgtcgaaagagtggcagagtggccttggttgtccggtacgatcagagctgtgtcccacaccgatgtcaccaagaaggacctcaaggtgtgtgttgaattcgacggtgagtcatggaggaagcgaaggtggatagaggtatactccctgctaaggcgagcttttttggtggagcataacttagtgctagccgaacggaaatcaccggagatatcagaacgtatcgtgcagtggccagcaatcacatacaagcctctgttggacaaggcagggctggggtcaatcacgtctgtgcgtttcctaggagaccagcagcgcgtgttcctgagtaaggaccttctaaagccaatccaagatgtcaatagtttacgtctcagtctcaccgacaatcaaattgtgtccaaagagtttcaggcacttatcgtgaagcaccttgacgagtcccatttgcttaaaggagacaaaaacctagtaggaagtgaggtgaagatttactccttagacccaagcacacagtggttttctgcgaccgtgatcaatgggaatccagcctcaaagaccctccaggtgaattgcgaggagatcccggcgctgaagatagtcgatcctagcctcattcacgtcgaggtcgtccatgacaatttggtcacatgtggaaatagcgcacggatcggggcagttaagagaaaatcctccgaaaataacggaaccctggttagtaagcaggccaagagttgctcagaggccagcccatctatgtgcccggtgcagtcggtgcctaccacggtttttaaggagatattacttgggtgcacagctgcgacaccaccttccaaagaccctaggcagcagtccaccccacaggctgcaaacagcccaccaaatttgggagctaagattccccaggggtgccataagcagtcactgccagaagaaatctcatcctgcctaaacaccaagtcagaggcgcttcggacgaagccagacgtttgtaaagcagggctgctgagtaaaagctcccagattgggactggagatctgaagatcttaaccgaaccgaaagggtcatgtacccaacccaaaaccaatacggatcaggagaaccgcttggagtcagtaccacaggcccttacagggctgcctaaagagtgcctccccaccaaggcttcgtctaaagccgaactggagatagctaatccccccgaactgcaaaagcacctagaacatgcaccttcaccgtccgatgtgtcaaacgcaccagaagttaaagcgggggtgaactcagatagccctaataattgctccggcaaaaaggttgaaccttcagccctggcctgccggtctcagaacttaaaagagagctctgtgaaagtggataacgaaagttgttgctcaagatcaaataataagattcagaacgcccctagtcgcaaatccgtcctgaccgaccccgctaagctgaagaagctgcaacagagtggagaagcctttgtgcaggatgactcatgcgttaatattgttgcccagttgcctaagtgccgggagtgtcgccttgacagtctgcgtaaggacaaggaacaacagaaagattctcctgttttttgcagattttttcacttcagacgcctgcagtttaacaaacacggagtccttcgtgtcgaggggtttctgacacccaacaaatacgacaacgaggccattggattgtggctgcccctgaccaagaatgttgtcggaatagacctggatactgctaagtatatcctggctaacatcggtgatcatttttgccaaatggtcatctctgaaaaggaggccatgagtaccattgagccccacaggcaggttgcctggaagagagccgtgaagggcgtacgggagatgtgcgatgtgtgtgacaccaccatcttcaacttacactgggtgtgtccccgatgtggctttggagtttgtgttgattgttaccgcatgaaacgcaagaattgccagcagggggccgcctacaagaccttcagctggttgaagtgtgtgaagagtcagattcatgagcccgagaaccttatgccgacccaaatcatccctggcaaagccttatatgatgtcggggacatagtgcattccgtgcgcgcgaagtggggaatcaaggctaattgtccctgttccaaccgccagtttaagcttttcagcaaacccgccagcaaggaagacctgaaacaaacaagcctcgccggggaaaaacccacattaggcgccgtcctgcagcagaatccttcagtcctggagcccgccgctgttgggggggaagcagccagcaaacccgctggttctatgaagccagcctgtcctgcttccacttccccgctgaattggttggcagacctgacttccggaaatgttaataaggaaaacaaggagaaacagcctacgatgccgattcttaagaacgagatcaagtgcttaccccccctgcccccgttgtctaagtccagtactgtcctgcacactttcaacagtactattttgacgcctgtgtccaataacaattccggctttttgcgcaatcttctcaattctagtaccggtaagactgagaatggtttgaagaacacccccaagatacttgatgatatcttcgcttccctcgttcagaataaaacaaccagcgatttgtccaaacggccccagggactaaccatcaagccatccatccttgggttcgacaccccacactactggctttgcgataacaggctgttatgtctgcaagatccaaataataaatccaactggaatgtttttagggagtgctggaagcagggtcagccagttatggtgagtggcgtacaccataaattaaattcagagctgtggaaacccgagagctttcggaaggaatttggtgagcaggaagtcgatctcgtcaattgccggactaacgagataatcacaggggccaccgtcggtgatttttgggacggattcgaggacgttccaaacagactgaagaatgaaaaagagccaatggttctcaaacttaaggactggccgccgggcgaggatttccgcgacatgatgccaagccggttcgacgaccttatggcaaatatccccctccctgagtacacccgacgtgatgggaaactgaacctggctagtcggctccctaattatttcgtgcgacctgacctgggacccaaaatgtataatgcatacggactgattaccccagaagaccgcaaatacggcaccacaaacctgcacctggatgttagcgacgctgctaacgtgatggtgtatgttggcatacctaaagggcaatgtgaacaggaggaggaagttttgaaaacgattcaagatggggactccgatgaactgaccattaagcggttcatagaaggcaaagagaaaccaggggcactatggcatatttatgctgctaaggacaccgagaaaatcagagagtttctgaagaaagtgagtgaggagcagggacaagagaacccagctgaccatgaccccatccacgatcaatcctggtaccttgaccggtctctgcggaaacgtctccaccaggaatacggggtgcaagggtgggcaattgtgcagttcctcggtgacgtcgtcttcatacccgccggggctccacatcaggtacacaacctgtatagctgtattaaagtggccgaagacttcgtcagccccgagcacgttaaacactgtttttggctgacccaggaattccgctacctgagtcagactcacactaaccatgaggacaagctccaagtcaagaacgtgatttatcacgccgtgaaggatgcagtcgcaatgctgaaggctagcgaatcatccttcggcaagccttag

SEQ ID NO: 198547 - DNA, 513 bp, Artificial Sequence
  derived and/or modified sequence
atggtgctgaccctgggcgagagctggcccgtgctggtgggccggaggttcctgagtctttctgcagctgatgggtcagacggatcacatgacagctgggacgtggagagagtcgcggagtggccgtggctgagtggaacaataagagctgtaagtcacacagacgtgactaagaaagaccttaaagtgtgtgtggagtttgacggggaatcctggagaaaacggcggtggattgaggtctacagcctcttgcgaagggctttcttggttgaacacaaccttgtgctggctgagagaaaaagccctgagatatcggagagaattgtccagtggcccgcaattacttacaagcctctcctcgataaggctggtctcggcagcataacttcggtccgctttcttggtgatcagcagagagtgttcctgtcaaaagatctgctgaagcctattcaggacgtgaactctctccgcctcagccttacggacaaccagatcgtatcgaaagaattctag

SEQ ID NO: 198548 - DNA, 2136 bp, Artificial Sequence
  derived and/or modified sequence
atggtgctgaccctgggcgagagctggcccgtgctggtgggccggcggttccttagcctgagtgccgcagacggctccgacggctctcatgatagctgggatgtcgagcgcgtagccgagtggccttggcttagcggtacgataagggcagtctctcacacagatgtaacgaaaaaggacctgaaagtttgtgtggagttcgacggtgaaagctggcgtaaacgccggtggattgaagtatacagtctactccgcagggcattcttagtcgagcacaatttagtcctagctgaacggaagagccccgagatctccgaaagaatcgtgcaatggcccgctatcacctacaaacctttgctggacaaggcgggactaggaagtatcaccagcgttagatttctgggagaccaacagcgggtgttcctgagcaaagatctcctcaagcctattcaggacgtgaacagtcttcgtctgtccctcactgataatcagatcgtgtccaaggagtttcaggccctcatcgtcaagcacttagacgagagtcatctactcaagggggataaaaatctggtcgggagcgaggtgaagatctacagcctcgacccttccacacagtggttcagcgccactgttattaatgggaatcccgccagcaaaacactccaagtaaactgcgaggaaatcccagcacttaaaattgttgacccgagtttaatccatgtggaggttgtgcacgacaacctcgtaacttgcgggaatagtgcgagaattggggcagttaagcgaaaatcctcagagaataatgggaccctggtcagcaaacaggcaaagagctgctccgaggcatccccgagtatgtgccccgtacagtccgtaccgacgacggtgtttaaggagatcctgctgggctgcacggcagccaccccacctagtaaggatccccggcagcagtccacaccacaggctgccaattcaccccccaacctgggggccaagattccccagggctgccataaacaaagccttcccgaagaaatctcgagctgcctcaacacaaaaagtgaggccctgagaacaaagccagacgtgtgtaaagcgggactgctcagcaaaagctcccagatcgggacaggagatctaaaaatcctgacagagcctaagggctcatgcacacagcccaaaacaaacacagatcaagagaacagactcgaaagtgttccacaggcgctcacaggactccccaaggaatgcttgcctacaaaggcatctagcaaggccgaattagagatcgccaaccctcccgaactgcagaaacatctcgagcatgcacctagtccatccgacgtttcaaatgctcccgaggtgaaggctggggtgaacagcgatagccccaataactgctccgggaagaaagttgagcctagtgccttggcctgccgtagccagaatctgaaagaatccagcgtgaaagttgacaatgagtcatgctgcagtcgcagtaacaacaagattcagaatgcgccttcgcgcaaatccgttctcacagatcccgctaagctgaagaaacttcagcagtcaggggaagcctttgtgcaggatgatagttgtgttaacatcgtagcccagcttcctaagtgtcgtgagtgccggttggacagcttgcggaaggataaggagcaacaaaaggatagtcctgtattctgcagatttttccacttcaggcggctgcaatttaacaagcacggggttttgcgggtcgagggcttccttacccccaacaagtacgataacgaggctattggcttgtggctccctctgacaaagaatgtggtagggatcgacctggataccgccaagtatatcttggccaacatcggtgaccacttctgtcaaatggtgatttctgaaaaagaggcaatgtccacaattgaacctcataggcaggtggcatggaagcgcgccgtcaagggcgtgcgtgagatgtgcgatgtctgtgatacaactatttttaatttacactgggtctgtccgaggtgcgggtttggggtgtgtgtggattgctaccgaatgaagcgcaaaaactgtcagcagggagagaaccggtttgactcaccacctgcaccgcttcactcctag

SEQ ID NO: 198549 - DNA, 366 bp, Artificial Sequence
  derived and/or modified sequence
atggtgctgaccctgggcgagagctggcccgtgctggtgggccggaggtttctttctttgagcgcagcggacggcagcgacgggtctcatgattcttgggatgtagaaagggtggcagagtggccctggctcagtgggaccatccgtgccgtatcacacacagatgtcactaagaaggatctgaaagtgtgtgtcgagttcgatggcgaatcctggagaaaacggagatggattgaggtgtatagcctgctgcgacgcgcctttttggtcgaacacaatctagtgctcgcagagcgaaagagcccagaaatatctgaaaggatcgttcaatggcctgcaattacatataaaccactcctcgactag

SEQ ID NO: 198550 - DNA, 3984 bp, Artificial Sequence
  derived and/or modified sequence
atggtgctgaccctgggcgagagctggcccgtgctggtgggccggcgctttctcagcttgagcgcagctgatggcagtgatggtagtcatgactcctgggatgttgaaagagtcgctgagtggccttggttgtccggcacaattcgggccgtctcacacactgacgtcactaaaaaagatctgaaagtgtgcgtggagttcgacggcgaatcatggcggaagcgccgttggatagaggtctatagcctgttgcgcagagcatttcttgttgaacacaatttggtgctggctgagaggaaatcacctgaaataagcgaaaggattgtgcagtggcccgcaattacatacaagcccctgctcgataaggcaggccttggcagtataacatccgtccgcttcctcggcgatcagcaacgcgtctttctgtcaaaggatctcctgaagccaatacaagatgtaaactccttacggttaagtctcacagacaatcagattgtgtccaaggagtttcaggcgttgatcgtgaaacacctagatgaatcacatctgttaaaaggagataaaaatctagttggctcagaggttaaaatctattcactggatccctccacgcagtggttttccgccactgtgatcaacggtaacccagccagcaagacactccaagtgaactgtgaggagattcctgcacttaagattgtggatcccagtctgatccacgtggaagtggtacacgacaatctcgtaacatgcggcaatagcgcgcgcatcggggcggtcaagcgcaaatcttcagagaacaatggaacactagtttctaaacaggccaaatcatgttcggaggccagtcctagcatgtgtcctgtgcagtcggtgcctactaccgtgtttaaggagatcctccttgggtgcacagctgctacccctccatcaaaggacccgagacagcagagcacccctcaggccgctaactcgcccccaaacctgggagccaaaatccctcaggggtgtcacaaacaatctctgccggaggaaatttcaagttgtctgaacaccaagtccgaagccctacgtacaaagcccgatgtctgtaaagcaggcttactgagtaaatcatctcagattgggactggcgatctgaagatcttaacagagcctaaggggtcatgtactcagccaaagaccaacacagaccaagagaacaggttggaaagcgtgccccaggcactaacaggactccccaaggaatgcttgcccactaaggcttcctcaaaggccgagctagaaatcgcaaatccacctgaactccagaaacacctggaacacgccccaagcccctctgatgtgagtaacgcacctgaagtgaaagccggagtgaattctgacagcccgaacaactgctccggtaagaaggtggaaccatccgctctcgcttgtagatcacagaatttgaaagagtctagcgtgaaagttgacaatgaatcatgctgttcaaggtccaataacaagattcagaacgcaccttcacgcaagtccgtcttgaccgaccctgccaaactgaagaaactgcagcagagtggcgaggcattcgtgcaggacgattcttgcgtcaatattgtggctcagctgcctaagtgccgggagtgcaggttggattccttgcgcaaagacaaggagcaacagaaagactctcccgtgttttgtcgattctttcattttagaaggctccagtttaataagcatggggtccttagggtggaaggatttctgacaccgaataaatatgacaacgaagccattggattgtggctgcccctcacaaaaaatgttgtgggtatcgatctcgacacagctaagtacattctagcaaatattggcgatcacttctgccagatggtaatctcagaaaaagaggcgatgtcgaccatcgaaccccaccggcaggtggcgtggaagagggctgtgaagggtgtacgtgaaatgtgtgatgtgtgtgacaccactatctttaatctacactgggtctgtccccgctgtgggttcggagtgtgcgtcgattgttatcgcatgaagaggaagaattgtcagcaaggcgcagcatacaaaactttttcctggcttaaatgcgtgaagagccagattcatgagccagagaaccttatgccaactcaaataattccaggaaaggccctgtacgacgtgggcgatattgtccattcagtgagagccaagtggggcatcaaagctaactgtccttgctcaaatcgccagttcaagttgttctcaaagcctgctagtaaagaggatcttaagcaaacctccctcgccggggagaaacctaccctgggggctgtcctccagcagaacccttccgtgctcgaaccagccgccgtcgggggagaagcagccagtaagcccgcgggctccatgaaaccagcctgtccagcaagtacttctcccttgaactggttggccgatctgaccagtggcaacgtaaacaaggaaaacaaagaaaaacaaccaacaatgccaatcctcaagaatgaaattaaatgcctcccacctcttcctcctctgtccaagtcctctactgtgcttcacacctttaattcaacgatcttgacccccgtgagcaacaataacagcgggtttctcaggaatctcctgaactcttctacgggtaagacggagaatggcttgaagaacacaccgaagattctcgatgacattttcgctagcctggtgcagaacaaaacgacttccgatctcagcaaacgaccacaaggattgacaatcaaaccaagcatcctgggatttgatacacctcactactggctatgcgacaaccgcttattgtgtcttcaagaccccaacaacaagagcaattggaacgtctttcgggagtgttggaaacagggccaacccgtgatggtgtccggcgtccatcacaaactgaatagcgaactttggaaaccagagagcttcaggaaagagttcggcgaacaggaagtcgatctggtgaactgccgcaccaacgagatcatcacgggtgctacagtcggggatttctgggacgggtttgaggatgtcccgaatcgtctaaagaatgaaaaggagccaatggtactcaaattgaaagactggcccccaggggaggatttccgggatatgatgccgagtaggttcgacgatctgatggccaatatcccactacctgagtacaccagaagagatgggaagttgaatctggcatcaaggttgcccaattacttcgtgcggccagacctcggccccaaaatgtacaacgcctacggtctgatcacacctgaagaccgcaagtacggcaccacaaatttgcacctggatgttagcgacgccgccaacgtgatggtttatgtaggcatacccaagggccagtgtgagcaggaggaagaagtgctgaagaccatccaggacggagactccgacgagctcacgataaagcgtttcatcgagggcaaggaaaagccaggggccctttggcacatctacgcagctaaggacaccgagaagatcagagagttcttaaagaaggtgtcagaagaacagggacaggagaatccagcagatcatgacccgatccacgatcagtcatggtaccttgacaggtccctgcgcaaacggctgcaccaagagtatggggtgcagggatgggccattgtccagtttcttggcgatgtggtgtttatccctgccggggcaccgcaccaagtgcacaacctgtatagctgtataaaggtggcggaggattttgttagcccagagcatgtgaagcactgtttttggcttacccaggaattcagatacctgagtcagacccataccaatcacgaggataaacttcaagtgaaaaatgtgatataccacgccgtgaaagacgccgtcgccatgttgaaagtaaatccggtactggccaacctcaacttgccagcccactggaagtag

SEQ ID NO: 198551 - DNA, 3810 bp, Artificial Sequence
  derived and/or modified sequence
atggtgctgaccctgggcgagagctggcccgtgctggtgggccggagattcctgtccctttcagccgccgacgggtctgatgggagccacgacagttgggacgtcgagcgagtcgccgagtggccctggctttctgggaccatacgagcggtcagtcatactgatgtcaccaagaaagacctaaagacctacaagcctctgctggacaaggccgggctggggagcattacttccgtccggttcctgggcgaccagcagagggtatttctttcaaaagacctgctgaagccaatccaggatgttaattccctgaggctctccctgactgataatcagatagtcagtaaagaatttcaggcactgatagtgaaacaccttgacgaatcccacttgttgaaaggtgacaaaaacctggtgggctccgaggtgaaaatttactcactggacccatcaactcagtggttcagtgctactgttattaatggcaatccggccagcaaaacactacaagtgaactgcgaggaaatcccggctctcaagatagtcgatcccagcctgatacacgtcgaggtggtccatgacaatttggtgacttgcggaaacagtgctcggattggcgcggtcaagcggaagtcgagtgagaacaatggtacgctggtgagcaaacaggccaaatcctgttccgaggccagtccctctatgtgtccagtgcagtccgtgcccaccaccgtgtttaaagaaatattgctcggatgtactgccgcaacaccaccttcaaaagatccaaggcaacagtccactccccaggctgcgaacagcccacctaacttaggcgccaagatcccccagggatgccataagcagtcacttcccgaggaaatcagctcctgcctgaacactaaatccgaagccttaaggactaagcctgacgtttgcaaagctgggctactcagcaagtccagccagattggaacaggagatttgaagatcctaaccgagccaaagggaagttgtacccagcccaagacaaatactgatcaggaaaataggctcgaatctgtgccccaggctcttacgggtctaccaaaggaatgtttgcctacaaaggcgtcttccaaagccgagctcgagattgcaaatccccccgaactccagaagcatcttgaacacgctccctcaccaagcgacgtaagtaatgcccccgaagtgaaagcaggggtcaacagtgatagtcccaacaactgctccggcaaaaaagtggagccttctgctctggcttgccgctcgcaaaacctgaaagagtcgagcgtcaaggtggataatgagagctgctgctccagatcgaacaacaagatccagaatgccccttcacgaaagagtgtactgacggatcccgcaaagcttaaaaaacttcagcagtcaggagaagccttcgtgcaggatgacagctgcgtaaatatcgtcgctcagctgcccaaatgcagagaatgccggctggattcactccggaaggacaaggaacagcagaaggactcaccagttttttgcagattttttcacttcagacgactgcagtttaataagcacggcgtcttacgggtggaaggcttccttacccctaataagtacgataatgaagcaatcggcctgtggttgcccctcacgaagaacgtggtcggaatcgatttagacacagccaagtatatattggcaaatatcggggaccacttctgccaaatggtaatctcagagaaagaagcgatgagtactattgagccacacagacaggtggcatggaaaagggcagtgaagggagtccgcgagatgtgcgacgtctgtgacacaaccatcttcaatcttcactgggtatgccctagatgtggatttggagtatgtgtggactgctatagaatgaaacgcaagaattgtcagcagggcgcagcctataaaacctttagttggctgaagtgcgtcaaaagccagattcatgaacctgaaaatctgatgcccacccagatcatcccagggaaagccctttacgacgtgggcgatattgttcacagcgtgagagcaaagtgggggatcaaggctaactgtccctgcagcaaccgccagtttaagctattctccaagcccgcttccaaagaggatctgaaacagacatcgctggccggcgagaagccaactcttggtgcagtgctgcaacagaatccgtcggttctggaacctgccgcggtaggaggggaagcagcatcaaaaccagctggcagcatgaaacccgcatgtccggcttctacttcaccattgaattggcttgccgatctgaccagtggtaacgtcaacaaagagaataaggaaaagcagccgaccatgcctattctaaagaacgagatcaagtgcctgcctccactccctcctctttcaaagtcatctaccgtcctccatacctttaactcgacaatactgacgcccgtgtctaacaataactctggatttctgagaaacctactaaattcttctactggcaaaacagagaacggacttaaaaacactccgaagatcttggacgacatcttcgccagcctcgtccagaacaagaccacctccgatctgagcaagaggcctcaggggctaaccatcaaaccgtccatcctcgggtttgatacacctcattattggttgtgtgataatcgactgctatgcctccaggacccaaataacaagagtaactggaatgtgttcagagagtgctggaagcaagggcaacccgtgatggtcagcggcgtgcatcataagttaaactctgaactgtggaagcccgagagcttcagaaaagagttcggcgaacaggaagtcgacctggtgaattgtcgtacaaacgagataattacaggggccacggtgggcgatttttgggacggttttgaggatgtccctaataggttaaagaacgagaaagaacccatggttctgaaactgaaggactggccccccggggaggactttcgggatatgatgccatcccgatttgatgatcttatggcgaatattccactgccggaatacactagacgcgatgggaaattgaacctagctagtcgactgcccaattattttgtgaggcccgatctcgggcctaaaatgtacaatgcatacggcctcataactcctgaagatagaaagtatggcaccaccaacttgcatctggacgtgagcgacgctgctaacgtgatggtgtatgtgggcatccccaaaggccaatgcgagcaagaggaagaagtgctaaagacaatacaggacggcgatagcgacgagcttaccattaaacggttcatcgaggggaaagagaaacctggcgccctgtggcacatatacgccgcaaaggacactgagaaaattcgcgaatttctgaaaaaggtcagtgaggagcagggacaggaaaatcccgctgaccacgaccctattcatgaccaaagctggtacttggatcgctctctcagaaagaggctccatcaagaatacggggtgcagggttgggctatcgtccagttccttggggacgtggtatttatccccgcgggtgccccccaccaggttcataacttgtactcgtgcatcaaggtggccgaggactttgtgtctccagaacacgtgaagcactgcttctggcttacacaggagtttaggtacctcagccagactcacaccaaccatgaggataaactccaagtgaagaatgtgatttatcatgccgtgaaggatgcagtagcaatgttgaaagcctccgagtccagtttcggtaagccatag

SEQ ID NO: 198552 - DNA, 3966 bp, Artificial Sequence
  derived and/or modified sequence
atggtcctgactctaggtgaatcgtggcccgtgctagtaggcagacgcttcttaagcctgagtgcggctgacggctccgacggctctcacgattcttgggacgtggaacgcgtagcggaatggccttggttaagcggcactattagggcagtgtctcacaccgacgtgacgaaaaaagacctgaaggtatgcgtcgaattcgacggggaatcctggaggaaaagaaggtggatagaggtgtattctttgctgaggagggcctttctcgttgaacacaacctggtcctcgccgagaggaagtcacctgaaattagtgagcggatagtccagtggcccgcaataacttacaagcccctgctggacaaagctggcctaggctcaatcacctccgttcgcttcctgggagatcagcagagagtgtttctcagtaaagacttgttgaagcccatccaagacgtgaactcgctgcggctctccctcactgacaaccagatagttagtaaagaatttcaggccctcattgttaagcacctggacgagagccacctcctgaagggggataagaatttggtaggtagtgaagtgaaaatctattccctggacccgtcaacgcaatggttcagcgcaaccgtaatcaacggcaatcctgccagtaaaactcttcaagtaaactgcgaagagatcccggctctcaaaatcgtggatccgagcctgattcatgtggaggtagttcatgacaatctggtgacctgcgggaactctgccagaatcggcgcagtgaaaagaaagtcctcagagaacaacggcacattggtgtcgaagcaggccaagagctgctcagaggcctccccctccatgtgccccgtgcagtccgtgccaaccactgtgttcaaagagatcctcctgggctgcaccgccgcaacacctccttctaaggatccacgacagcagagtacccctcaagctgcaaactccccgcctaacctcggcgcaaaaataccccagggatgccataaacagagtctacctgaggagataagttcctgcttgaacaccaaatcagaagctctgcgcaccaaacccgacgtctgtaaggctgggctcctgagtaaatcctcgcagatcggcaccggggacctgaaaatcctgaccgaacctaagggcagttgtacacaaccaaagactaacacagaccaggaaaaccgacttgagagtgttcctcaggccctgacaggactgccaaaggaatgcctgcctaccaaggcttctagcaaggcagagctcgaaattgccaatcccccagaactgcagaagcatctggaacacgcaccctcaccctccgacgtctctaacgcccctgaggtgaaagccggtgttaactcggactctccaaataattgttcgggaaaaaaggtagagcctagcgctcttgcttgcagatcacagaacctgaaagaatcgtctgttaaggttgataacgagtcctgttgctcacgctcaaataacaagatccagaatgccccttctcgaaaaagtgtgctgactgacccggcaaaattgaaaaagttacagcaatccggagaggcttttgtgcaggacgacagctgtgttaatatcgtcgctcagctacctaaatgtagagagtgtcgcttggattccttgcgcaaggacaaggagcagcagaaagacagccccgtgttctgccgcttcttccacttccggaggctgcagttcaataagcatggagtgctgcgtgttgaaggatttctgacccccaacaagtacgacaatgaagccatcggcctgtggctgcctctgacaaaaaacgtggtaggcattgacctagacactgctaaatatatcctggccaacattggagaccacttttgccagatggtgatctcagaaaaggaagcaatgagcacaattgagccccataggcaggtggcgtggaagcgtgctgttaagggcgtgcgggagatgtgtgacgtctgcgatacaacaatcttcaacctccattgggtgtgccctcgctgcggattcggagtctgcgtagattgctacagaatgaaacggaaaaattgtcaacagggagccgcatataagaccttcagttggttgaagtgcgtaaagagccagatccatgagcccgagaatcttatgccaacacagataattcccggaaaggccctgtacgatgtgggcgacatcgttcacagcgtgcgcgcaaagtggggcatcaaagcaaactgcccatgttcaaacaggcaatttaagctgttctctaagccagcgtccaaagaggatctgaaacaaacttcactcgccggagagaagcctactcttggagctgtcctgcagcagaacccttcggtcttggaacccgcagctgtgggaggagaagcagccagcaaacctgcgggatcgatgaagcccgcatgtccagcctctacgtccccacttaactggttggcggacctgacctccggaaatgtaaataaggaaaataaggaaaaacagcctaccatgccgatcctcaaaaatgaaatcaaatgtctgcctccactacccccactaagcaagagttcaacggtccttcacactttcaacagtaccatcctcacccccgtatcaaataacaattctggattcctgcgtaatctcctcaactcgtctactggcaaaaccgagaatggtctgaagaacacacctaaaatcctggacgacatttttgccagccttgtacagaataagaccaccagtgacctgtctaaacgccctcagggactgaccatcaagccaagtattctgggctttgatacaccccactactggctgtgtgacaaccggttattgtgcctccaagaccccaataacaagagcaattggaacgtgtttagggagtgttggaaacaggggcagcctgttatggtgtctggcgttcaccataagctcaactctgagctgtggaaacctgaatccttccgcaaagaattcggggagcaggaggtggaccttgtgaattgtcggacgaacgagataattaccggagccaccgtgggagacttttgggacggctttgaagatgtccctaaccgtttgaaaaacgaaaaggagcccatggtcctgaaacttaaagattggccccctggcgaggactttcgcgacatgatgccatccagatttgacgacctgatggccaatatcccactgcccgagtatactcgacgcgacggcaagctgaacctggccagtagactgcctaattatttcgttcgtccagatctcgggcctaaaatgtataatgcctacggactgatcacccctgaagaccgtaagtacggcacaaccaatctccatctggatgtgtctgatgctgccaatgttatggtgtatgttggaatcccaaaaggccaatgcgagcaagaagaagaagtattaaaaacaattcaagatggcgacagcgacgaactgacaattaagcgcttcatagagggcaaggagaaaccaggcgctctgtggcacatctacgctgctaaagatactgaaaaaatcagagagtttctgaagaaggtgagcgaagagcagggccaggaaaatccggctgatcatgacccaatacacgaccagagttggtacctggaccgaagcctgagaaagcggctgcatcaggaatacggcgttcagggatgggcaatcgtacagtttttgggcgatgttgtgtttatacctgccggtgcaccccatcaggtacacaatctctatagctgcattaaggtcgctgaggactttgtctctccagaacatgttaagcactgcttttggctgacccaggagtttcgatacctatctcagacacacactaatcacgaagataaattgcaagtcaagaatgtgatctatcacgctgtcaaggacgccgtggctatgctcaaggcatccgagtcgtccttcggcaaaccatag

SEQ ID NO: 198553 - DNA, 3966 bp, Artificial Sequence
  derived and/or modified sequence
atggttctgactctgggagaatcttggcccgtcctcgttgggaggaggtttctgtctctctctgctgccgatggctcggacgggagccacgatagctgggatgtcgagcgcgtagcagagtggccatggctgtccgggactatacgcgcagtgagccatactgacgtcacgaaaaaagatctaaaggtctgtgtagagttcgacggagaatcatggaggaaaagacgctggattgaggtttacagcttactgcgccgagccttcctagttgagcacaacctggtgctcgccgagcggaagtcaccagaaatatcagaaaggatcgtccagtggccggctatcacatataagcctttgctggataaggctggactgggctcgatcacctccgtcagatttcttggggatcagcaaagggtgtttttgtcaaaggatctcctgaagcccattcaggacgtgaattctttgagactgtccctgaccgataaccagattgtaagtaaagaattccaagccctgattgttaagcacctggacgaaagccacctgctgaaaggggataaaaatctcgtgggaagcgaggtgaagatctacagccttgatccctcaacacaatggttctccgccacagtcatcaacggtaaccctgcctccaagaccctgcaagttaactgtgaggagatcccagctctcaagattgtggacccctcactgattcacgtggaagttgtacatgacaacctcgttacgtgtggtaactccgccaggataggggcagtaaagaggaaaagcagcgaaaacaacggtaccctcgtgagtaagcaggccaaatcttgcagcgaagcttctccctcaatgtgtccagtgcaatccgttcccaccacagtattcaaagaaattcttctcggatgtaccgccgcaacaccaccatccaaggatccacgacaacagtcaactccccaggcggcaaactctccacctaatctgggagctaagattccccagggctgccacaagcaatccctccccgaggagatttctagctgtcttaataccaaaagtgaagcactgcgaacgaagcccgatgtgtgcaaggcaggcttgctcagcaagtcctctcagattggcaccggggatctcaagatcctcaccgagcccaaagggtcctgcactcagccaaagactaacaccgatcaggagaaccgcctggagagcgtgcctcaggccctgaccgggctgcccaaggagtgcctgcctacgaaggcctcgagtaaggcggagctggaaattgctaatcctcctgaactgcaaaagcatttagagcacgctccttcccccagcgatgtttctaacgcaccagaggttaaggcaggtgttaactccgattcgcccaataactgcagtgggaagaaagttgagcctagcgcactggcgtgccgatctcagaacctgaaggaaagtagtgttaaagtggataacgaatcatgttgttcaaggagcaataacaagattcaaaatgctcccagtcgcaagtcggtgctgactgatcctgccaagttgaagaagctgcagcagtccggtgaggcatttgtccaagacgactcctgcgtgaatatagtcgctcagctaccaaaatgcagggagtgtaggctggactccctgcgcaaggacaaggagcaacagaaggattcaccagtgttctgtcgcttttttcacttccgaagactacagttcaacaagcatggcgtgttacgggtggaaggcttcctgactcctaataagtacgataacgaggcaattggactctggctgcccctcactaagaacgtagtgggaattgatctcgatactgccaaatacattctggcgaatattggcgaccatttctgccagatggtcatcagcgaaaaggaagctatgtctacgattgaaccccaccgccaggtggcctggaagagggctgtaaaaggtgtgagggaaatgtgcgacgtgtgcgatacgacaatctttaacctgcactgggtgtgtccgcgttgcggctttggcgtgtgtgtggactgctataggatgaagagaaagaattgtcagcagggcgctgcctacaagacatttagttggctcaagtgcgtcaagagtcagattcacgaacccgaaaacctgatgcccactcaaatcatacccggtaaggccctttatgatgtaggcgatatcgtacactctgtgagggcaaaatggggtatcaaggcgaattgcccttgctctaatcgtcagttcaagctgttctccaagccagcatcaaaggaagatctaaagcaaaccagcctggcgggtgagaaacccacgctgggggcagtcctgcagcaaaacccctcagtcttagagcctgccgcagtgggtggcgaggcagcaagcaagcctgccggaagtatgaagcccgcttgtccagcctctacgtctcccctcaattggctggccgatttgacctctggaaatgtcaataaggaaaacaaagagaaacagccaacaatgcccatactgaagaatgagataaagtgtctcccccctctgccacctctatccaagtcctcaacggtattacacaccttcaattctactattctgacacccgtgtccaataacaactcagggtttttacgcaatttgctaaacagcagtactggaaagactgaaaatggcttaaaaaacactccgaagatcctggatgacatcttcgcgtccctagtacagaacaaaacaaccagcgacctctcaaagaggccccaggggctaactatcaagccttcaatcctcggcttcgatactccccattattggctctgcgataataggcttttatgcttacaagacccaaataacaaaagcaattggaatgtctttcgcgagtgctggaagcagggccagcccgtcatggttagcggagtgcaccacaagctgaactctgaactgtggaaacccgaatccttccggaaggaattcggagagcaggaggtagacctagttaactgtagaaccaatgagatcataacaggagctacagtgggcgatttctgggacggatttgaggacgtcccgaaccggctgaaaaacgaaaaggagcccatggtacttaaactgaaggactggcctccaggggaagactttagggacatgatgcccagccgatttgatgatctcatggctaacatacctctgccggagtatacgcgacgagacgggaaactcaacctggccagccggctacctaattatttcgtgcggccagatttaggccctaagatgtataatgcttacggactgattaccccggaagatcgtaaatatggtacaactaacctgcacttggatgtttcagatgctgccaatgtgatggtgtatgtgggtatccccaaggggcaatgtgaacaagaagaagaagtcctaaagactatccaagatggggattccgatgaactgacaatcaagaggttcatcgagggcaaagagaagcccggagcactgtggcacatatatgcggcaaaagataccgaaaagataagagagttcctgaagaaggtaagtgaggagcagggacaggaaaaccccgcagatcacgaccctatccatgaccagagttggtacctggatcggagtctgaggaaaaggctccaccaggaatatggggtgcaggggtgggcaattgtgcaatttcttggggatgttgtgttcatcccagccggagctccacaccaggtacacaacctgtacagctgcatcaaagtggccgaggatttcgtgagtcccgaacacgtcaagcattgtttctggctgacacaggaatttcgatacctgtcccagactcatacgaaccacgaggataaattgcaggtcaaaaacgtcatttaccatgccgtcaaagatgccgtagccatgctgaaagcatccgagtcttccttcggcaagccgtag

SEQ ID NO: 198554 - DNA, 3966 bp, Artificial Sequence
  derived and/or modified sequence
atggtcttgacactgggagagagctggccggtgctagtcggccgacgattcttgagtctgtcagcagccgacgggtctgatggcagccacgatagctgggacgtggagcgggtcgctgagtggccgtggctgagtgggacaattcgcgctgtctcccatacggatgtgaccaaaaaggatttaaaggtgtgcgtggaatttgacggggagtcttggcgtaagcggcgatggatcgaggtgtactccttgcttaggagagcgttcttggtggagcataacctcgtgttagcagagcggaagagtccagagatttcagagcgaatcgtgcaatggcccgcaataacttacaagcccctgctggacaaggcgggtctcggaagcatcacctcagtgcgattcttgggtgaccagcaaagggtcttcctctctaaagacttgctgaagccaattcaggacgttaatagtctgcggctgtccctgacggacaaccagattgtcagcaaggagttccaagctctgattgttaagcacctcgatgagtctcacctgctcaagggtgacaaaaatctggtgggttcagaggtcaaaatctactccctagacccaagtacccaatggttcagtgcgacggtaatcaatgggaaccctgcctccaagaccctgcaagtcaactgcgaggagatcccagccctgaagattgtcgatccttcgttgattcacgtcgaagtggtgcacgataatctggtcacatgcggtaatagtgctcgcatcggagctgtcaaaagaaagtcttccgaaaataatggtacactggttagcaagcaggctaagagctgctcagaagcttctccaagcatgtgtccagttcagagtgtgccaaccaccgtgtttaaagaaatccttttagggtgcaccgctgccacacccccatccaaagatcctagacagcagagcaccccccaggccgctaattcaccgccaaatttgggggctaaaataccacaggggtgccacaagcagtccttgccagaggagatttccagctgcttaaacacaaaaagcgaggcactgaggacaaagcccgacgtatgcaaagctggtttgctgagcaagagctctcagattgggactggtgatcttaagattctgaccgaacctaagggctcctgtacccagcccaaaactaacacagatcaagagaatcgcctggagtcagtacctcaagctctcaccggacttcccaaagagtgtctccctacaaaggcttcttcaaaggctgaactcgagattgccaaccctcctgagctgcaaaaacacctggagcacgctccttcccccagcgacgtatctaacgctccagaggtcaaggcaggcgttaacagtgatagccccaacaattgctctgggaagaaagtggagccatctgctttggcgtgcaggagccaaaatcttaaagaatcctcagtgaaggtggacaatgagtcctgctgctcgcggtcaaataataaaatccaaaatgctcccagtaggaagagtgtgctcaccgatcccgctaagctgaagaagctccagcagtccggagaggcctttgtccaggatgactcctgcgtcaacattgtggctcagcttccaaagtgccgagagtgtcggttagatagcctgaggaaggataaggagcaacaaaaggacagtccggtgttctgtcgcttttttcattttcgacgcctgcagttcaacaagcatggcgttttgagagttgaggggttcctcactcccaataagtacgataatgaggccataggtctgtggctcccattgactaagaacgttgtggggattgaccttgatacagctaagtacattcttgcgaacataggagaccacttctgccaaatggtaattagcgagaaggaagccatgagcacgatcgagccccataggcaggttgcatggaagcgggctgtgaagggcgtgcgcgaaatgtgcgacgtctgcgataccactattttcaatctgcattgggtgtgtcctagatgcggattcggcgtctgcgttgattgttataggatgaagcgcaagaactgtcagcagggcgctgcatacaaaaccttctcctggctgaaatgcgtgaaaagccagattcacgagcctgagaatcttatgcctacacagattattccaggcaaagctctgtacgatgttggggatattgttcacagcgtaagggccaaatggggcatcaaggcaaactgcccttgttccaatcgtcagttcaagctgttttccaaacctgccagcaaggaggacctcaagcagaccagcctcgccggagagaagccgaccctcggggcagtccttcaacagaacccctcagtccttgagccagccgctgtcggaggcgaagcggcaagtaagcccgctggtagcatgaagcccgcttgtccagcttcaacttcgccgctcaattggctagctgatttgacaagcggaaatgtgaacaaagagaataaggagaagcagccgaccatgccaatacttaagaacgaaatcaagtgcctgcctccactccctcccctgtctaaatcctctaccgtcctccacacctttaactcgactattctcactcctgtgtctaacaacaattccggcttcttaaggaacctgctcaacagtagtactggaaagaccgaaaatggtctgaaaaacacccctaagatcctggacgacattttcgcctctctggtgcagaacaaaacaacaagcgacctgagcaagcgaccacagggcttgaccatcaaacctagtatcctaggcttcgacacaccacattactggctctgcgataatcgactgctgtgtctgcaggacccaaacaacaaaagtaattggaacgtgttcagagagtgttggaagcagggacaacccgtgatggtgtctggagtgcatcacaagctgaattctgagctgtggaagccggaaagttttaggaaagaattcggcgagcaggaggtggacctggttaactgtagaactaacgaaattatcactggcgcaacagttggagatttttgggacggctttgaagacgtgccaaatagactgaagaacgagaaagaacctatggtgctgaagttgaaggattggcccccaggcgaagactttagagatatgatgccatctagatttgacgacctgatggctaacatccctctcccagagtacacccgccgtgacggcaagctcaacctggctagtcgtctgcctaattatttcgtaagaccagacctggggcctaaaatgtataacgcttacggccttatcacccctgaggacaggaagtacgggaccacaaatctgcatctcgatgtcagcgatgctgctaacgtaatggtttacgtggggatccccaagggacagtgcgagcaggaggaggaggtgttgaagacgattcaggatggagacagcgacgagctgacaattaagaggtttattgaaggaaaggaaaagccgggtgccctctggcacatttacgccgctaaagacaccgagaagattagagagtttctcaagaaggtttccgaagaacagggccaggagaaccccgcagatcacgaccccattcacgaccaatcctggtatctggaccggagcctgaggaagcggcttcatcaggaatatggggtgcagggatgggcaatagtacagtttctgggagatgtcgtgttcatacctgctggggctccacatcaagtccacaatctctactcttgcataaaagtagccgaggacttcgtaagccccgagcatgtgaagcattgtttctggctcacacaggagttcaggtacctgagccagacacacaccaatcacgaggacaagctacaggttaaaaatgtcatttaccacgcagtgaaagatgctgtggcaatgcttaaggcctctgagagcagcttcggtaagccctag

SEQ ID NO: 198555 - DNA, 513 bp, Artificial Sequence
  derived and/or modified sequence
atggttctcaccctaggcgagtcctggcctgtcctggtgggccgtcgattcctgtctttgtctgctgcggacgggtctgacggcagccatgattcctgggatgtggagcgcgtagcagagtggccgtggctgagtgggactatcagagctgtttcacacacagacgttaccaaaaaggatctgaaggtgtgtgtcgagttcgatggagagtcctggcgcaaaaggcggtggatcgaggtctacagcctgcttcgaagagcctttcttgtcgaacacaatttagtgctcgccgagagaaaatctccagaaatcagcgaaaggattgtccagtggccagcaatcacctataaacctctactggataaagcaggcctgggatctattacctcagtaaggtttctgggcgatcagcagcgcgtatttcttagcaaggatctgttgaagcctattcaggatgtgaattcactaaggctcagcttgactgacaatcagatagtcagtaaagaattttag

SEQ ID NO: 198556 - DNA, 2136 bp, Artificial Sequence
  derived and/or modified sequence
atggtgttgacactcggcgagtcctggcctgtgctggtagggaggcggttcttgagtctgtccgccgcagacggcagcgacggcagtcatgactcatgggatgtcgaacgggtggctgagtggccttggctgtcaggcacaattcgcgctgtcagccatacagacgtgactaagaaagatctcaaagtttgcgtggagtttgatggagaatcctggcgcaagagaagatggatcgaggtctattctctccttcgtagagcatttttggtagaacacaatctggttctggctgaacgaaagtcccctgaaatttccgaaagaatcgtgcaatggcccgctatcacatacaagcctttgctggataaagccggtctgggctctataacttccgttcgctttctgggagatcagcagcgggttttcctcagcaaggatctactgaagcctattcaggatgtgaattccctgcgcctttccttaactgacaatcagatagtgagcaaagagttccaggcgttaatagtcaaacacttagacgagtctcacctgttgaaaggcgacaaaaacctggtgggatctgaggtaaagatctattctcttgacccctccacccagtggttctctgccaccgttattaacggaaacccagcctcaaaaaccctccaggttaactgcgaggagatacctgcactcaagatcgtcgaccctagtctcatacacgttgaggtggtgcatgacaatctcgtgacttgtggcaattctgcccgaattggggctgtcaagagaaaatcctcagaaaataacggaacactagtttcgaaacaggctaagagctgtagtgaggcttctccgagtatgtgtcctgtgcaatccgtacccaccacagtctttaaggagatcttgctcggctgtaccgctgctactcccccaagcaaggaccctcgtcagcagagcactcctcaagccgctaactcccccccaaacctcggcgctaaaataccacagggatgtcataaacaaagcctgcccgaggagatttccagttgcctcaatactaagtctgaggcgcttagaaccaagccagacgtctgtaaggcaggcctccttagtaagagttcccagataggaactggggatctcaagattcttaccgagccaaaagggtcttgtacacaacctaagaccaataccgatcaggagaatcggcttgagtccgtgccgcaggccctgaccggcctgcccaaagaatgcctgccaaccaaagcatcatccaaagcggagctggaaatcgccaaccctcccgaactgcagaagcatttggagcatgccccatctccctccgacgtcagcaacgcccctgaggtgaaggccggagtgaatagtgacagtcccaataattgctcagggaaaaaggtcgaaccctctgcactcgcttgtagaagtcagaacctgaaagaaagctccgtgaaggtggataatgagtcctgttgtagtagatcaaacaacaaaatacagaacgcaccatcccggaaatccgtattgaccgatcctgccaagctgaagaagctgcagcagtcaggtgaagccttcgtgcaggacgactcttgtgtgaacattgttgcccagctgccaaaatgtcgcgagtgccggctggactctttacggaaagacaaggaacagcagaaggacagtcctgtattctgccgatttttccactttaggaggctccagttcaataagcatggcgtgctgagagtggaaggcttcctcaccccaaacaagtacgataacgaagctatcggactgtggctccccttgactaagaacgtggttggaattgacctcgacactgcaaagtacattctggcgaatataggcgatcatttctgtcagatggtgatctccgagaaggaagctatgagtacgattgagccccataggcaggtggcttggaagcgtgcggtaaaaggcgtccgggagatgtgtgatgtgtgcgacaccacgatcttcaatctgcactgggtctgtcctcgttgcggattcggagtatgcgtcgattgctatcgaatgaagcgcaagaattgccaacagggagagaacaggttcgactcacctcctgcaccactccactcttag

SEQ ID NO: 198557 - DNA, 366 bp, Artificial Sequence
  derived and/or modified sequence
atggtgcttaccctgggcgagagctggccagtcctcgtcggtagacggtttctgagcctatctgccgctgatggatcagatggatctcatgactcttgggatgtcgaacgggtggccgagtggccttggctgagtggcaccatccgcgctgtgtcccacaccgatgtcacaaagaaggacctgaaagtctgcgttgaatttgacggagagtcatggaggaagaggcgctggattgaggtatatagcctcctgagaagagcattcctggtcgaacataatttggtgctggcagagaggaagtcacccgaaatctcagaacgaatcgtgcagtggcccgcaattacgtacaagccccttctcgattag

SEQ ID NO: 198558 - DNA, 3984 bp, Artificial Sequence
  derived and/or modified sequence
atggttctcacactcggagagagttggccggtacttgttggtaggcggttcttaagcctgtcagccgcagacggctctgacggcagtcatgattcttgggacgtcgaacgtgtcgctgagtggccctggctgagcgggaccataagagctgtatcccacaccgacgtgaccaaaaaggatctgaaggtttgtgtagagtttgatggggaaagctggaggaagcggcgatggatcgaggtttactcactgttgcggagagcattcctagtggagcacaacctggtgctggccgagaggaagtctcccgaaatcagcgagcgaattgtgcagtggcctgccataacttataaaccattgttggacaaagccggtctgggcagcataacgtctgtcaggttcctgggggatcaacagagggtctttctgagtaaggacttgctgaagccgattcaagatgttaactccctccgtctgagtctaaccgacaaccaaatcgtttcgaaggaattccaggctctcatcgtgaagcaccttgacgagagtcacctgcttaagggcgataagaatcttgtggggagcgaagtgaaaatatatagcctcgacccttctacgcagtggttttccgctactgtaattaatggaaatcctgccagcaagacgctgcaggtgaactgtgaagagatcccagcactcaagatcgttgacccttcactgatacacgtggaggtagttcacgacaacctcgtgacctgcggcaactcagcccgtattggcgctgtgaagagaaagtcgtcagagaataacggcactctcgtgagcaaacaggctaagtcttgtagcgaagcatccccttccatgtgtcctgtgcaatcagtgcccaccaccgtatttaaggagatactgctgggttgcaccgctgcaaccccacccagcaaggatccacgacagcagtctaccccccaagcagcgaactccccaccaaacctgggtgcaaagattccacaaggctgtcacaagcagtcactcccagaagaaatatcgtcttgtctgaatacaaagtctgaggccctgcgtaccaaacctgacgtgtgtaaggccggacttttgagtaagagctcacaaataggaactggcgatctgaagattttgacagaaccaaagggatcctgtacacagccaaagacgaatacagaccaggagaatcggcttgaatccgtaccccaggccctcacaggattgccaaaggaatgtctgcccacgaaagcatccagcaaagctgagcttgaaatcgcaaacccgcctgaactccagaagcacctggaacacgctccctctccctctgacgtttcgaatgctccagaagttaaggcaggagtgaacagcgattctcctaataactgctccggaaaaaaggtggaacccagcgctctggcttgtagaagccagaatctcaaggagtcatcagtgaaagtggataatgagagctgctgctctagatcgaacaataagatacagaacgctccctctagaaaatcagtcttaaccgatccagccaagttaaagaagttgcaacagtccggcgaggctttcgtccaagatgacagctgtgtgaatatcgtcgcccaactcccaaaatgcagggagtgtcggctggacagcctgagaaaagacaaggaacaacagaaagatagcccggttttctgcaggttttttcatttccggagactgcaatttaacaagcatggcgtgctgcgggtggaaggctttttgacacccaataaatacgacaacgaggctattggcctttggctgcccttgacaaagaacgttgttggtatcgaccttgacacagccaaatatattcttgccaacatcggtgaccacttttgccagatggttatcagtgagaaagaagccatgtccactatcgaaccccataggcaagttgcttggaaacgagcagtgaaaggcgttcgggagatgtgcgacgtgtgtgatacaacaatctttaatctgcactgggtctgcccacgctgcggttttggcgtgtgcgttgactgttaccgaatgaagaggaagaactgtcagcagggtgccgcttacaaaacatttagctggctgaagtgcgtgaaatcacagatacacgagcctgaaaacctgatgcccacccagattatccctggtaaagctctgtacgatgtgggggatatagtacactctgttagagcaaagtggggcattaaggctaattgtccctgctctaataggcaattcaagctgttctccaagccggcatcgaaagaggatctgaaacagacaagcctggctggggaaaaaccaactttgggcgctgtgctgcagcagaacccttcagttttggagcctgcagccgtcggaggtgaggccgcaagcaagccagcgggatcaatgaaacccgcttgccccgcttctacaagtccgttgaactggctcgccgatctcacctccggaaacgtaaataaggagaataaggaaaaacagcctacaatgcctatcctgaagaacgagatcaagtgcctgccccctctgccccctctgagcaaatccagcaccgtacttcatacctttaattccaccatcctcacaccagtgagtaacaacaattccggatttctgaggaatctgctaaatagctccaccggcaagactgaaaacggattaaaaaatacccctaagatactggacgacattttcgcaagcctggttcaaaataaaaccacgagcgacctgagcaaaaggccacaaggacttaccatcaagccatctatccttggctttgacacaccccactattggctctgtgacaaccggttactgtgtttgcaggaccccaataataaatctaattggaatgtcttccgggaatgttggaaacaggggcagcctgtgatggtttccggtgtgcaccataagctaaacagtgagctatggaaaccggaatccttccgtaaggaatttggggagcaggaggtggacctcgtaaattgtcggaccaacgaaatcatcacgggggctaccgtcggcgatttctgggatgggtttgaagatgtgcccaataggctgaagaatgagaaagaaccaatggtactgaaactgaaggattggccgcctggggaggactttagggatatgatgccatcgcggttcgacgatctgatggccaatatcccattaccggagtacactagacgagatggtaaactgaacttggctagcaggctccctaactactttgtgagaccagatctggggccaaaaatgtacaatgcgtacggacttatcacccccgaggacaggaaatacggaacaacgaacctccacctggacgtgagcgatgctgccaatgtgatggtgtatgtgggcattccaaagggtcagtgcgagcaagaggaagaggtcctcaaaacgattcaggacggcgactctgatgagctaaccatcaaaagattcatagagggaaaggagaaacccggtgctttatggcacatctacgctgccaaggatactgaaaaaatacgtgagtttctcaagaaggtttctgaagaacaggggcaggaaaatcccgctgaccatgatcctatacacgatcagagctggtacctggaccgctctctccggaaaaggctgcatcaggagtacggcgttcaagggtgggcaattgtgcagttccttggagatgtggttttcatacccgctggcgctccgcatcaagtgcataatctttatagctgcattaaagtggcagaggactttgtgtcccctgagcacgtgaagcactgtttctggctgactcaggagttcagatatctctctcagacccacacaaatcacgaagataagctacaagtcaagaatgtcatctatcacgcagtgaaagacgccgtagctatgctcaaagtgaacccagtgctggctaacctcaacctaccagcccattggaagtag

SEQ ID NO: 198559 - DNA, 3810 bp, Artificial Sequence
  derived and/or modified sequence
atggtgctcacacttggcgagagctggccggtcctcgtgggaaggaggttcttgtcactatccgccgctgacggttccgacggttcacatgattcatgggatgtagagagggttgcggaatggccttggctctcaggtaccatccgcgctgtatcacatactgatgttaccaagaaggacctcaagacttacaaaccgctcctggataaggctgggcttgggtctattacctccgtgaggttcctgggtgatcaacagagagtgttcctgagcaaagatctcctaaaaccaatccaggacgttaactctctccggctcagtttgacagacaaccagatcgtgagcaaagagttccaggcattgattgtaaagcacctcgatgaatcacacctgttgaaaggagacaagaaccttgtgggaagcgaggtaaagatctattcgctggatccaagtacccaatggttttctgcgacagtgattaacggtaatccagcctccaagactctgcaggtgaactgcgaagaaattccagccctgaagattgtggacccttcccttatccacgtggaggtggtgcacgacaacctcgttacctgtgggaacagtgctcgaatcggggctgtcaaacgcaaaagtagcgagaataacgggaccttagtctcaaaacaggccaaatcctgctcagaggcaagtccgagtatgtgccccgtacagtcggtgcccaccaccgtgtttaaagaaatcctcctcggttgcaccgccgctacacccccaagcaaggaccctaggcagcaatctaccccacaggctgccaattcaccccctaacctgggggctaagattccgcagggctgccataagcaatctctgcccgaggagattagctcatgcctcaacactaagtccgaagcgctgcgcacaaagcccgatgtatgtaaggcgggacttttatcgaaatcatcccagattggcacaggggacttaaagattttgacggaaccaaagggatcatgtacccaacccaagacgaacactgaccaggaaaaccggctcgaaagtgtcccacaggcgttgactggattgcccaaggaatgtttgccaaccaaggcatcttctaaggccgaactagagatcgctaacccgccagagctccaaaaacatttggaacacgccccttcaccatcagatgtctccaacgcacctgaagtgaaagccggtgtcaactcagatagccctaacaattgttctggaaagaaagtcgagccttctgccttagcttgccggtcccagaacctaaaggaatctagcgttaaagtggataacgaatcctgttgcagcaggagcaacaacaaaattcagaatgcaccatcgcgtaagtccgttttaactgatcccgcaaagctgaaaaaactgcagcagagcggcgaagcctttgtgcaggatgattcatgtgttaacatcgttgcccagttgcccaaatgtcgggagtgtcgactggactcattgaggaaggacaaggagcaacagaaagattcacctgtgttttgccgttttttccattttagaaggctccagttcaacaagcacggagtcctcagggtagagggattcctgacaccaaataagtatgacaacgaggcgatcggattatggctccccctgaccaaaaatgtagtagggattgatctcgacaccgcaaaatacattcttgccaatattggggaccatttctgccaaatggtcatcagcgaaaaggaagctatgagtacgatcgagccccatagacaagttgcctggaagagggctgttaagggtgtgcgcgagatgtgtgatgtgtgcgacacgactattttcaacctgcattgggtttgcccaaggtgtggcttcggcgtgtgcgtggactgttatcggatgaaaagaaaaaactgccagcaaggagcagcctacaaaacattttcgtggctgaaatgcgtgaaatcccaaattcatgagccagaaaacctgatgccaactcagataatccccggtaaggcgctgtatgatgtcggtgatattgtacattctgtgagagctaagtggggtatcaaagctaactgcccgtgctcgaatcggcagttcaaactgttttctaagcccgcaagtaaagaagatttgaagcagacttcactggccggagaaaagccaacactcggcgcagtcctgcaacagaacccaagcgtgctggagcctgcggcagtgggaggggaggctgcttctaagccagccggaagcatgaagccagcttgcccggcaagcaccagtcccctcaattggctcgccgacctgaccagcggcaacgtgaataaagaaaacaaggagaagcaacctactatgccgatcctaaagaacgagattaagtgtttacctcctctgccacctctctcgaagtcaagtacggtcctgcacacgttcaacagcactattctaacccctgttagcaacaacaacagcggattcctgcgcaatctacttaacagctctacaggcaagaccgagaatggcttgaagaacactcccaaaattcttgatgacattttcgccagcctggtgcagaacaagacaacctcagatctgtccaagcgtccccaggggctgaccatcaagccatctattctcggttttgacacaccacattactggctgtgtgacaacaggttgctctgtttacaggacccaaataacaagagcaactggaatgtgtttcgggagtgctggaagcagggacagcccgtcatggtttctggtgtgcatcacaaactgaactctgaactttggaagcccgaaagtttcaggaaggaattcggggagcaagaggtggatctggtgaattgcagaaccaacgagataatcaccggggcaaccgtaggtgatttttgggacgggttcgaggacgtccccaataggcttaaaaacgaaaaggaaccaatggtgcttaagctgaaggactggccccctggcgaggatttcagggacatgatgcccagtcggttcgacgacctgatggcgaacattccactgcctgagtatacaaggagagacgggaaactcaacttggctagcaggctgcctaactactttgttcgacccgatcttgggccaaagatgtacaatgcttatggcctgatcacaccggaagacagaaagtacggcacaaccaaccttcatttagatgttagcgatgccgctaatgtgatggtttacgtggggattccgaagggtcaatgcgaacaggaagaggaggtgttgaagaccatacaggatggggatagcgatgagctcaccataaaacggtttattgagggaaaggagaagcccggagcactctggcacatctacgccgctaaagataccgagaagatcagggaatttttgaaaaaggtctccgaagagcaaggccaagagaaccctgcagaccacgatccaatacatgaccagtcttggtacctggataggtcactgcgaaaacgactgcatcaagaatacggagtgcagggttgggcgatcgttcaattcctgggagatgtcgtgttcatcccagccggagctccacaccaagtgcataacctatattcatgcataaaagtggcggaagatttcgtgagccctgaacatgtcaaacactgcttttggctgacccaggagttccgatacctgtctcagacacataccaatcacgaggataagttacaggtcaagaatgtcatttatcacgctgtgaaggacgcggtggcaatgctgaaagccagtgagagctcctttgggaaaccgtag

SEQ ID NO: 198560 - DNA, 3966 bp, Artificial Sequence
  derived and/or modified sequence
atggtgctgaccctgggcgagagctggcccgtgctggtgggcagaagattcctgagcctgagcgccgccgacggcagcgacggcagccacgacagctgggacgtggagagagtggccgagtggccctggctgagcggcaccatcagagccgtgagccacaccgacgtgaccaagaaggacctgaaggtgtgcgtggagttcgacggcgagagctggagaaagagaagatggatcgaggtgtacagcctgctgagaagagccttcctggtggagcacaacctggtgctggccgagagaaagagccccgagatcagcgagagaatcgtgcagtggcccgccatcacctacaagcccctgctggacaaggccggcctgggcagcatcaccagcgtgagattcctgggcgaccagcagagagtgttcctgagcaaggacctgctgaagcccatccaggacgtgaacagcctgagactgagcctgaccgacaaccagatcgtgagcaaggagttccaggccctgatcgtgaagcacctggacgagagccacctgctgaagggcgacaagaacctggtgggcagcgaggtgaagatctacagcctggaccccagcacccagtggttcagcgccaccgtgatcaacggcaaccccgccagcaagaccctgcaggtgaactgcgaggagatccccgccctgaagatcgtggaccccagcctgatccacgtggaggtggtgcacgacaacctggtgacctgcggcaacagcgccagaatcggcgccgtgaagagaaagagcagcgagaacaacggcaccctggtgagcaagcaggccaagagctgcagcgaggccagccccagcatgtgccccgtgcagagcgtgcccaccaccgtgttcaaggagatcctgctgggctgcaccgccgccaccccccccagcaaggaccccagacagcagagcaccccccaggccgccaacagcccccccaacctgggcgccaagatcccccagggctgccacaagcagagcctgcccgaggagatcagcagctgcctgaacaccaagagcgaggccctgagaaccaagcccgacgtgtgcaaggccggcctgctgagcaagagcagccagatcggcaccggcgacctgaagatcctgaccgagcccaagggcagctgcacccagcccaagaccaacaccgaccaggagaacagactggagagcgtgccccaggccctgaccggcctgcccaaggagtgcctgcccaccaaggccagcagcaaggccgagctggagatcgccaacccccccgagctgcagaagcacctggagcacgcccccagccccagcgacgtgagcaacgcccccgaggtgaaggccggcgtgaacagcgacagccccaacaactgcagcggcaagaaggtggagcccagcgccctggcctgcagaagccagaacctgaaggagagcagcgtgaaggtggacaacgagagctgctgcagcagaagcaacaacaagatccagaacgcccccagcagaaagagcgtgctgaccgaccccgccaagctgaagaagctgcagcagagcggcgaggccttcgtgcaggacgacagctgcgtgaacatcgtggcccagctgcccaagtgcagagagtgcagactggacagcctgagaaaggacaaggagcagcagaaggacagccccgtgttctgcagattcttccacttcagaagactgcagttcaacaagcacggcgtgctgagagtggagggcttcctgacccccaacaagtacgacaacgaggccatcggcctgtggctgcccctgaccaagaacgtggtgggcatcgacctggacaccgccaagtacatcctggccaacatcggcgaccacttctgccagatggtgatcagcgagaaggaggccatgagcaccatcgagccccacagacaggtggcctggaagagagccgtgaagggcgtgagagagatgtgcgacgtgtgcgacaccaccatcttcaacctgcactgggtgtgccccagatgcggcttcggcgtgtgcgtggactgctacagaatgaagagaaagaactgccagcagggcgccgcctacaagaccttcagctggctgaagtgcgtgaagagccagatccacgagcccgagaacctgatgcccacccagatcatccccggcaaggccctgtacgacgtgggcgacatcgtgcacagcgtgagagccaagtggggcatcaaggccaactgcccctgcagcaacagacagttcaagctgttcagcaagcccgccagcaaggaggacctgaagcagaccagcctggccggcgagaagcccaccctgggcgccgtgctgcagcagaaccccagcgtgctggagcccgccgccgtgggcggcgaggccgccagcaagcccgccggcagcatgaagcccgcctgccccgccagcaccagccccctgaactggctggccgacctgaccagcggcaacgtgaacaaggagaacaaggagaagcagcccaccatgcccatcctgaagaacgagatcaagtgcctgccccccctgccccccctgagcaagagcagcaccgtgctgcacaccttcaacagcaccatcctgacccccgtgagcaacaacaacagcggcttcctgagaaacctgctgaacagcagcaccggcaagaccgagaacggcctgaagaacacccccaagatcctggacgacatcttcgccagcctggtgcagaacaagaccaccagcgacctgagcaagagaccccagggcctgaccatcaagcccagcatcctgggcttcgacaccccccactactggctgtgcgacaacagactgctgtgcctgcaggaccccaacaacaagagcaactggaacgtgttcagagagtgctggaagcagggccagcccgtgatggtgagcggcgtgcaccacaagctgaacagcgagctgtggaagcccgagagcttcagaaaggagttcggcgagcaggaggtggacctggtgaactgcagaaccaacgagatcatcaccggcgccaccgtgggcgacttctgggacggcttcgaggacgtgcccaacagactgaagaacgagaaggagcccatggtgctgaagctgaaggactggccccccggcgaggacttcagagacatgatgcccagcagattcgacgacctgatggccaacatccccctgcccgagtacaccagaagagacggcaagctgaacctggccagcagactgcccaactacttcgtgagacccgacctgggccccaagatgtacaacgcctacggcctgatcacccccgaggacagaaagtacggcaccaccaacctgcacctggacgtgagcgacgccgccaacgtgatggtgtacgtgggcatccccaagggccagtgcgagcaggaggaggaggtgctgaagaccatccaggacggcgacagcgacgagctgaccatcaagagattcatcgagggcaaggagaagcccggcgccctgtggcacatctacgccgccaaggacaccgagaagatcagagagttcctgaagaaggtgagcgaggagcagggccaggagaaccccgccgaccacgaccccatccacgaccagagctggtacctggacagaagcctgagaaagagactgcaccaggagtacggcgtgcagggctgggccatcgtgcagttcctgggcgacgtggtgttcatccccgccggcgccccccaccaggtgcacaacctgtacagctgcatcaaggtggccgaggacttcgtgagccccgagcacgtgaagcactgcttctggctgacccaggagttcagatacctgagccagacccacaccaaccacgaggacaagctgcaggtgaagaacgtgatctaccacgccgtgaaggacgccgtggccatgctgaaggccagcgagagcagcttcggcaagccctag

SEQ ID NO: 198561 - DNA, 513 bp, Artificial Sequence
  derived and/or modified sequence
atggtgctgaccctgggcgagagctggcccgtgctggtgggcagaagattcctgagcctgagcgccgccgacggcagcgacggcagccacgacagctgggacgtggagagagtggccgagtggccctggctgagcggcaccatcagagccgtgagccacaccgacgtgaccaagaaggacctgaaggtgtgcgtggagttcgacggcgagagctggagaaagagaagatggatcgaggtgtacagcctgctgagaagagccttcctggtggagcacaacctggtgctggccgagagaaagagccccgagatcagcgagagaatcgtgcagtggcccgccatcacctacaagcccctgctggacaaggccggcctgggcagcatcaccagcgtgagattcctgggcgaccagcagagagtgttcctgagcaaggacctgctgaagcccatccaggacgtgaacagcctgagactgagcctgaccgacaaccagatcgtgagcaaggagttctag

SEQ ID NO: 198562 - DNA, 2136 bp, Artificial Sequence
  derived and/or modified sequence
atggtgctgaccctgggcgagagctggcccgtgctggtgggcagaagattcctgagcctgagcgccgccgacggcagcgacggcagccacgacagctgggacgtggagagagtggccgagtggccctggctgagcggcaccatcagagccgtgagccacaccgacgtgaccaagaaggacctgaaggtgtgcgtggagttcgacggcgagagctggagaaagagaagatggatcgaggtgtacagcctgctgagaagagccttcctggtggagcacaacctggtgctggccgagagaaagagccccgagatcagcgagagaatcgtgcagtggcccgccatcacctacaagcccctgctggacaaggccggcctgggcagcatcaccagcgtgagattcctgggcgaccagcagagagtgttcctgagcaaggacctgctgaagcccatccaggacgtgaacagcctgagactgagcctgaccgacaaccagatcgtgagcaaggagttccaggccctgatcgtgaagcacctggacgagagccacctgctgaagggcgacaagaacctggtgggcagcgaggtgaagatctacagcctggaccccagcacccagtggttcagcgccaccgtgatcaacggcaaccccgccagcaagaccctgcaggtgaactgcgaggagatccccgccctgaagatcgtggaccccagcctgatccacgtggaggtggtgcacgacaacctggtgacctgcggcaacagcgccagaatcggcgccgtgaagagaaagagcagcgagaacaacggcaccctggtgagcaagcaggccaagagctgcagcgaggccagccccagcatgtgccccgtgcagagcgtgcccaccaccgtgttcaaggagatcctgctgggctgcaccgccgccaccccccccagcaaggaccccagacagcagagcaccccccaggccgccaacagcccccccaacctgggcgccaagatcccccagggctgccacaagcagagcctgcccgaggagatcagcagctgcctgaacaccaagagcgaggccctgagaaccaagcccgacgtgtgcaaggccggcctgctgagcaagagcagccagatcggcaccggcgacctgaagatcctgaccgagcccaagggcagctgcacccagcccaagaccaacaccgaccaggagaacagactggagagcgtgccccaggccctgaccggcctgcccaaggagtgcctgcccaccaaggccagcagcaaggccgagctggagatcgccaacccccccgagctgcagaagcacctggagcacgcccccagccccagcgacgtgagcaacgcccccgaggtgaaggccggcgtgaacagcgacagccccaacaactgcagcggcaagaaggtggagcccagcgccctggcctgcagaagccagaacctgaaggagagcagcgtgaaggtggacaacgagagctgctgcagcagaagcaacaacaagatccagaacgcccccagcagaaagagcgtgctgaccgaccccgccaagctgaagaagctgcagcagagcggcgaggccttcgtgcaggacgacagctgcgtgaacatcgtggcccagctgcccaagtgcagagagtgcagactggacagcctgagaaaggacaaggagcagcagaaggacagccccgtgttctgcagattcttccacttcagaagactgcagttcaacaagcacggcgtgctgagagtggagggcttcctgacccccaacaagtacgacaacgaggccatcggcctgtggctgcccctgaccaagaacgtggtgggcatcgacctggacaccgccaagtacatcctggccaacatcggcgaccacttctgccagatggtgatcagcgagaaggaggccatgagcaccatcgagccccacagacaggtggcctggaagagagccgtgaagggcgtgagagagatgtgcgacgtgtgcgacaccaccatcttcaacctgcactgggtgtgccccagatgcggcttcggcgtgtgcgtggactgctacagaatgaagagaaagaactgccagcagggcgagaacagattcgacagcccccccgcccccctgcacagctag

SEQ ID NO: 198563 - DNA, 366 bp, Artificial Sequence
  derived and/or modified sequence
atggtgctgaccctgggcgagagctggcccgtgctggtgggcagaagattcctgagcctgagcgccgccgacggcagcgacggcagccacgacagctgggacgtggagagagtggccgagtggccctggctgagcggcaccatcagagccgtgagccacaccgacgtgaccaagaaggacctgaaggtgtgcgtggagttcgacggcgagagctggagaaagagaagatggatcgaggtgtacagcctgctgagaagagccttcctggtggagcacaacctggtgctggccgagagaaagagccccgagatcagcgagagaatcgtgcagtggcccgccatcacctacaagcccctgctggactag

SEQ ID NO: 198564 - DNA, 3984 bp, Artificial Sequence
  derived and/or modified sequence
atggtgctgaccctgggcgagagctggcccgtgctggtgggcagaagattcctgagcctgagcgccgccgacggcagcgacggcagccacgacagctgggacgtggagagagtggccgagtggccctggctgagcggcaccatcagagccgtgagccacaccgacgtgaccaagaaggacctgaaggtgtgcgtggagttcgacggcgagagctggagaaagagaagatggatcgaggtgtacagcctgctgagaagagccttcctggtggagcacaacctggtgctggccgagagaaagagccccgagatcagcgagagaatcgtgcagtggcccgccatcacctacaagcccctgctggacaaggccggcctgggcagcatcaccagcgtgagattcctgggcgaccagcagagagtgttcctgagcaaggacctgctgaagcccatccaggacgtgaacagcctgagactgagcctgaccgacaaccagatcgtgagcaaggagttccaggccctgatcgtgaagcacctggacgagagccacctgctgaagggcgacaagaacctggtgggcagcgaggtgaagatctacagcctggaccccagcacccagtggttcagcgccaccgtgatcaacggcaaccccgccagcaagaccctgcaggtgaactgcgaggagatccccgccctgaagatcgtggaccccagcctgatccacgtggaggtggtgcacgacaacctggtgacctgcggcaacagcgccagaatcggcgccgtgaagagaaagagcagcgagaacaacggcaccctggtgagcaagcaggccaagagctgcagcgaggccagccccagcatgtgccccgtgcagagcgtgcccaccaccgtgttcaaggagatcctgctgggctgcaccgccgccaccccccccagcaaggaccccagacagcagagcaccccccaggccgccaacagcccccccaacctgggcgccaagatcccccagggctgccacaagcagagcctgcccgaggagatcagcagctgcctgaacaccaagagcgaggccctgagaaccaagcccgacgtgtgcaaggccggcctgctgagcaagagcagccagatcggcaccggcgacctgaagatcctgaccgagcccaagggcagctgcacccagcccaagaccaacaccgaccaggagaacagactggagagcgtgccccaggccctgaccggcctgcccaaggagtgcctgcccaccaaggccagcagcaaggccgagctggagatcgccaacccccccgagctgcagaagcacctggagcacgcccccagccccagcgacgtgagcaacgcccccgaggtgaaggccggcgtgaacagcgacagccccaacaactgcagcggcaagaaggtggagcccagcgccctggcctgcagaagccagaacctgaaggagagcagcgtgaaggtggacaacgagagctgctgcagcagaagcaacaacaagatccagaacgcccccagcagaaagagcgtgctgaccgaccccgccaagctgaagaagctgcagcagagcggcgaggccttcgtgcaggacgacagctgcgtgaacatcgtggcccagctgcccaagtgcagagagtgcagactggacagcctgagaaaggacaaggagcagcagaaggacagccccgtgttctgcagattcttccacttcagaagactgcagttcaacaagcacggcgtgctgagagtggagggcttcctgacccccaacaagtacgacaacgaggccatcggcctgtggctgcccctgaccaagaacgtggtgggcatcgacctggacaccgccaagtacatcctggccaacatcggcgaccacttctgccagatggtgatcagcgagaaggaggccatgagcaccatcgagccccacagacaggtggcctggaagagagccgtgaagggcgtgagagagatgtgcgacgtgtgcgacaccaccatcttcaacctgcactgggtgtgccccagatgcggcttcggcgtgtgcgtggactgctacagaatgaagagaaagaactgccagcagggcgccgcctacaagaccttcagctggctgaagtgcgtgaagagccagatccacgagcccgagaacctgatgcccacccagatcatccccggcaaggccctgtacgacgtgggcgacatcgtgcacagcgtgagagccaagtggggcatcaaggccaactgcccctgcagcaacagacagttcaagctgttcagcaagcccgccagcaaggaggacctgaagcagaccagcctggccggcgagaagcccaccctgggcgccgtgctgcagcagaaccccagcgtgctggagcccgccgccgtgggcggcgaggccgccagcaagcccgccggcagcatgaagcccgcctgccccgccagcaccagccccctgaactggctggccgacctgaccagcggcaacgtgaacaaggagaacaaggagaagcagcccaccatgcccatcctgaagaacgagatcaagtgcctgccccccctgccccccctgagcaagagcagcaccgtgctgcacaccttcaacagcaccatcctgacccccgtgagcaacaacaacagcggcttcctgagaaacctgctgaacagcagcaccggcaagaccgagaacggcctgaagaacacccccaagatcctggacgacatcttcgccagcctggtgcagaacaagaccaccagcgacctgagcaagagaccccagggcctgaccatcaagcccagcatcctgggcttcgacaccccccactactggctgtgcgacaacagactgctgtgcctgcaggaccccaacaacaagagcaactggaacgtgttcagagagtgctggaagcagggccagcccgtgatggtgagcggcgtgcaccacaagctgaacagcgagctgtggaagcccgagagcttcagaaaggagttcggcgagcaggaggtggacctggtgaactgcagaaccaacgagatcatcaccggcgccaccgtgggcgacttctgggacggcttcgaggacgtgcccaacagactgaagaacgagaaggagcccatggtgctgaagctgaaggactggccccccggcgaggacttcagagacatgatgcccagcagattcgacgacctgatggccaacatccccctgcccgagtacaccagaagagacggcaagctgaacctggccagcagactgcccaactacttcgtgagacccgacctgggccccaagatgtacaacgcctacggcctgatcacccccgaggacagaaagtacggcaccaccaacctgcacctggacgtgagcgacgccgccaacgtgatggtgtacgtgggcatccccaagggccagtgcgagcaggaggaggaggtgctgaagaccatccaggacggcgacagcgacgagctgaccatcaagagattcatcgagggcaaggagaagcccggcgccctgtggcacatctacgccgccaaggacaccgagaagatcagagagttcctgaagaaggtgagcgaggagcagggccaggagaaccccgccgaccacgaccccatccacgaccagagctggtacctggacagaagcctgagaaagagactgcaccaggagtacggcgtgcagggctgggccatcgtgcagttcctgggcgacgtggtgttcatccccgccggcgccccccaccaggtgcacaacctgtacagctgcatcaaggtggccgaggacttcgtgagccccgagcacgtgaagcactgcttctggctgacccaggagttcagatacctgagccagacccacaccaaccacgaggacaagctgcaggtgaagaacgtgatctaccacgccgtgaaggacgccgtggccatgctgaaggtgaaccccgtgctggccaacctgaacctgcccgcccactggaagtag

SEQ ID NO: 198565 - DNA, 3810 bp, Artificial Sequence
  derived and/or modified sequence
atggtgctgaccctgggcgagagctggcccgtgctggtgggcagaagattcctgagcctgagcgccgccgacggcagcgacggcagccacgacagctgggacgtggagagagtggccgagtggccctggctgagcggcaccatcagagccgtgagccacaccgacgtgaccaagaaggacctgaagacctacaagcccctgctggacaaggccggcctgggcagcatcaccagcgtgagattcctgggcgaccagcagagagtgttcctgagcaaggacctgctgaagcccatccaggacgtgaacagcctgagactgagcctgaccgacaaccagatcgtgagcaaggagttccaggccctgatcgtgaagcacctggacgagagccacctgctgaagggcgacaagaacctggtgggcagcgaggtgaagatctacagcctggaccccagcacccagtggttcagcgccaccgtgatcaacggcaaccccgccagcaagaccctgcaggtgaactgcgaggagatccccgccctgaagatcgtggaccccagcctgatccacgtggaggtggtgcacgacaacctggtgacctgcggcaacagcgccagaatcggcgccgtgaagagaaagagcagcgagaacaacggcaccctggtgagcaagcaggccaagagctgcagcgaggccagccccagcatgtgccccgtgcagagcgtgcccaccaccgtgttcaaggagatcctgctgggctgcaccgccgccaccccccccagcaaggaccccagacagcagagcaccccccaggccgccaacagcccccccaacctgggcgccaagatcccccagggctgccacaagcagagcctgcccgaggagatcagcagctgcctgaacaccaagagcgaggccctgagaaccaagcccgacgtgtgcaaggccggcctgctgagcaagagcagccagatcggcaccggcgacctgaagatcctgaccgagcccaagggcagctgcacccagcccaagaccaacaccgaccaggagaacagactggagagcgtgccccaggccctgaccggcctgcccaaggagtgcctgcccaccaaggccagcagcaaggccgagctggagatcgccaacccccccgagctgcagaagcacctggagcacgcccccagccccagcgacgtgagcaacgcccccgaggtgaaggccggcgtgaacagcgacagccccaacaactgcagcggcaagaaggtggagcccagcgccctggcctgcagaagccagaacctgaaggagagcagcgtgaaggtggacaacgagagctgctgcagcagaagcaacaacaagatccagaacgcccccagcagaaagagcgtgctgaccgaccccgccaagctgaagaagctgcagcagagcggcgaggccttcgtgcaggacgacagctgcgtgaacatcgtggcccagctgcccaagtgcagagagtgcagactggacagcctgagaaaggacaaggagcagcagaaggacagccccgtgttctgcagattcttccacttcagaagactgcagttcaacaagcacggcgtgctgagagtggagggcttcctgacccccaacaagtacgacaacgaggccatcggcctgtggctgcccctgaccaagaacgtggtgggcatcgacctggacaccgccaagtacatcctggccaacatcggcgaccacttctgccagatggtgatcagcgagaaggaggccatgagcaccatcgagccccacagacaggtggcctggaagagagccgtgaagggcgtgagagagatgtgcgacgtgtgcgacaccaccatcttcaacctgcactgggtgtgccccagatgcggcttcggcgtgtgcgtggactgctacagaatgaagagaaagaactgccagcagggcgccgcctacaagaccttcagctggctgaagtgcgtgaagagccagatccacgagcccgagaacctgatgcccacccagatcatccccggcaaggccctgtacgacgtgggcgacatcgtgcacagcgtgagagccaagtggggcatcaaggccaactgcccctgcagcaacagacagttcaagctgttcagcaagcccgccagcaaggaggacctgaagcagaccagcctggccggcgagaagcccaccctgggcgccgtgctgcagcagaaccccagcgtgctggagcccgccgccgtgggcggcgaggccgccagcaagcccgccggcagcatgaagcccgcctgccccgccagcaccagccccctgaactggctggccgacctgaccagcggcaacgtgaacaaggagaacaaggagaagcagcccaccatgcccatcctgaagaacgagatcaagtgcctgccccccctgccccccctgagcaagagcagcaccgtgctgcacaccttcaacagcaccatcctgacccccgtgagcaacaacaacagcggcttcctgagaaacctgctgaacagcagcaccggcaagaccgagaacggcctgaagaacacccccaagatcctggacgacatcttcgccagcctggtgcagaacaagaccaccagcgacctgagcaagagaccccagggcctgaccatcaagcccagcatcctgggcttcgacaccccccactactggctgtgcgacaacagactgctgtgcctgcaggaccccaacaacaagagcaactggaacgtgttcagagagtgctggaagcagggccagcccgtgatggtgagcggcgtgcaccacaagctgaacagcgagctgtggaagcccgagagcttcagaaaggagttcggcgagcaggaggtggacctggtgaactgcagaaccaacgagatcatcaccggcgccaccgtgggcgacttctgggacggcttcgaggacgtgcccaacagactgaagaacgagaaggagcccatggtgctgaagctgaaggactggccccccggcgaggacttcagagacatgatgcccagcagattcgacgacctgatggccaacatccccctgcccgagtacaccagaagagacggcaagctgaacctggccagcagactgcccaactacttcgtgagacccgacctgggccccaagatgtacaacgcctacggcctgatcacccccgaggacagaaagtacggcaccaccaacctgcacctggacgtgagcgacgccgccaacgtgatggtgtacgtgggcatccccaagggccagtgcgagcaggaggaggaggtgctgaagaccatccaggacggcgacagcgacgagctgaccatcaagagattcatcgagggcaaggagaagcccggcgccctgtggcacatctacgccgccaaggacaccgagaagatcagagagttcctgaagaaggtgagcgaggagcagggccaggagaaccccgccgaccacgaccccatccacgaccagagctggtacctggacagaagcctgagaaagagactgcaccaggagtacggcgtgcagggctgggccatcgtgcagttcctgggcgacgtggtgttcatccccgccggcgccccccaccaggtgcacaacctgtacagctgcatcaaggtggccgaggacttcgtgagccccgagcacgtgaagcactgcttctggctgacccaggagttcagatacctgagccagacccacaccaaccacgaggacaagctgcaggtgaagaacgtgatctaccacgccgtgaaggacgccgtggccatgctgaaggccagcgagagcagcttcggcaagccctag

SEQ ID NO: 198566 - protein, 419 aa, Artificial Sequence
  derived and/or modified sequence
MSCAGRAGPARLAALALLTCSLWPARADNASQEYYTALINVTVQEPGRGAPLTFRIDRGRYGLDSPKAEVRGQVLAPLPLHGVADHLGCDPQTRFFVPPNIKQWIALLQRGNCTFKEKISRAAFHNAVAVVIYNNKSKEEPVTMTHPGTGDIIAVMITELRGKDILSYLEKNISVQMTIAVGTRMPPKNFSRGSLVFVSISFIVLMIISSAWLIFYFIQKIRYTNARDRNQRRLGDAAKKAISKLTTRTVKKGDKETDPDFDHCAVCIESYKQNDVVRILPCKHVFHKSCVDPWLSEHCTCPMCKLNILKALGIVPNLPCTDNVAFDMERLTRTQAVNRRSALGDLAGDNSLGLEPLRTSGISPLPQDGELTPRTGEINIAVTKEWFIIASFGLLSALTLCYMIIRATASLNANEVEWF

SEQ ID NO: 198567 - DNA, 1260 bp, Artificial Sequence
  derived and/or modified sequence
atgagctgcgccggcagagccggccccgccagactggccgccctggccctgctgacctgcagcctgtggcccgccagagccgacaacgccagccaggagtactacaccgccctgatcaacgtgaccgtgcaggagcccggcagaggcgcccccctgaccttcagaatcgacagaggcagatacggcctggacagccccaaggccgaggtgagaggccaggtgctggcccccctgcccctgcacggcgtggccgaccacctgggctgcgacccccagaccagattcttcgtgccccccaacatcaagcagtggatcgccctgctgcagagaggcaactgcaccttcaaggagaagatcagcagagccgccttccacaacgccgtggccgtggtgatctacaacaacaagagcaaggaggagcccgtgaccatgacccaccccggcaccggcgacatcatcgccgtgatgatcaccgagctgagaggcaaggacatcctgagctacctggagaagaacatcagcgtgcagatgaccatcgccgtgggcaccagaatgccccccaagaacttcagcagaggcagcctggtgttcgtgagcatcagcttcatcgtgctgatgatcatcagcagcgcctggctgatcttctacttcatccagaagatcagatacaccaacgccagagacagaaaccagagaagactgggcgacgccgccaagaaggccatcagcaagctgaccaccagaaccgtgaagaagggcgacaaggagaccgaccccgacttcgaccactgcgccgtgtgcatcgagagctacaagcagaacgacgtggtgagaatcctgccctgcaagcacgtgttccacaagagctgcgtggacccctggctgagcgagcactgcacctgccccatgtgcaagctgaacatcctgaaggccctgggcatcgtgcccaacctgccctgcaccgacaacgtggccttcgacatggagagactgaccagaacccaggccgtgaacagaagaagcgccctgggcgacctggccggcgacaacagcctgggcctggagcccctgagaaccagcggcatcagccccctgccccaggacggcgagctgacccccagaaccggcgagatcaacatcgccgtgaccaaggagtggttcatcatcgccagcttcggcctgctgagcgccctgaccctgtgctacatgatcatcagagccaccgccagcctgaacgccaacgaggtggagtggttctag

SEQ ID NO: 198568 - DNA, 1260 bp, Artificial Sequence
  derived and/or modified sequence
atgtcctgtgccgggagggccggcccagctaggttggccgcgcttgcccttctgacttgtagcctgtggcccgcccgagcagataacgccagtcaagagtactatactgctctgattaacgtcaccgtccaagagcccggaagaggtgcgccgctgactttccgcatagatcgcggcagatacggcttagattcccctaaggccgaagtgagaggccaggtgttggccccactgcccctccacggagtggccgaccatctgggctgcgatccgcaaactcgattcttcgtgcctcctaacataaagcaatggatcgcactgcttcaaagaggtaattgcacatttaaggagaagattagtcgtgctgcattccataacgcggtcgcagtggtgatctacaataacaaaagcaaagaagaaccagtgaccatgactcaccctgggactggagatatcatcgcagtgatgatcactgagttgcgcggaaaggacatactctcttacctcgaaaaaaacattagcgtgcagatgacaattgccgtggggaccaggatgcctcccaaaaatttcagccgggggtcccttgtctttgtgtcaatttcctttattgttctgatgataatcagttctgcctggctcattttctattttatccagaaaatcagatacacaaacgcgcgcgaccggaaccaacggcgattgggagatgctgcaaaaaaagccatttctaaattgacgaccaggaccgtaaagaaaggggataaagagactgacccggatttcgatcattgcgctgtgtgcattgagagttataagcagaacgacgtggtcaggatcctcccttgcaaacatgtcttccacaagtcctgtgtcgatccatggctcagtgagcactgcacgtgccccatgtgcaagcttaatattctgaaagccctcggcattgtcccaaatctgccctgtacggataacgtggctttcgacatggaaaggctgactcgcacccaggccgtgaaccgtaggagcgcactcggtgatctggccggagacaactcgcttggattggaaccgctgaggacgtccggtattagtccgctgccgcaggacggtgagctgacaccaagaactggcgagatcaatattgctgtgaccaaagaatggtttatcattgcaagcttcggactgctaagtgcgttaaccctctgttacatgatcatcagggcgacggcctccctcaacgcaaacgaggtagaatggttctag

SEQ ID NO: 198569 - DNA, 1260 bp, Artificial Sequence
  derived and/or modified sequence
atgagctgtgccggccgggccggccctgcccggctggccgccctggccctgctgacctgcagcctgtggccagcccgggctgacaatgccagccaggagtactacacagccctgatcaacgtgacagtgcaggagcccggccgcggggcccccctgaccttcagaattgaccggggccgctatggcctggacagccccaaggccgaggtgcggggccaggtgctggcccccctgcccctgcatggagtggccgaccacctgggctgtgacccccagacccgcttctttgtgccccccaacatcaagcagtggatcgccctgctgcagaggggcaactgcaccttcaaggagaagatcagccgggccgccttccacaatgctgtggccgtggtgatctacaacaacaagagcaaggaggagcctgtgaccatgacccaccctggcactggagacatcatcgctgtgatgatcacagagctgcggggcaaggacatcctgagctacctggagaagaacatctctgtgcagatgaccatcgctgtgggcaccaggatgccacccaagaacttcagccggggcagcctggtgtttgtgtccatctccttcatcgtgctgatgatcatcagcagcgcctggctgatcttctacttcatccagaagatccgctacaccaatgcccgggacaggaaccagaggcggctgggagatgctgccaagaaggccatcagcaagctgaccaccaggacagtgaagaagggggacaaggagacagatcctgactttgaccactgtgctgtgtgcatcgagagctacaagcagaatgatgtggtgcgcatcctgccctgcaagcacgtgttccacaagagctgtgtggacccctggctgtctgagcactgcacctgccccatgtgcaagctgaacatcctgaaggccctgggcatcgtgcccaacctgccctgcacagacaacgtggcctttgacatggagcggctgaccaggacccaggccgtgaacagaagaagtgccctgggggacctggccggggacaacagcctgggcctggagcccctgcggaccagcggcatcagccccctgccccaggatggagagctgacccccaggactggagagatcaacattgctgtgaccaaggagtggttcatcatcgccagctttggcctgctgagcgccctgaccctgtgctacatgatcatccgggccacagccagcctgaatgccaatgaggtggagtggttctag

SEQ ID NO: 198570 - DNA, 1260 bp, Artificial Sequence
  derived and/or modified sequence
atgagctgcgccggccgggccggccccgcccggctggccgccctggcattactgacctgctcgctgtggccggcacgcgctgataatgctagccaggaatattacaccgccctgatcaatgtgactgtccaggagcccggaagaggagccccactcacctttcggatcgacaggggaaggtacggattggacagcccgaaggcagaggtaaggggccaggtcttagcacccctgccattgcacggggtcgctgaccacttaggttgtgacccacagactaggttctttgttcctcctaatatcaaacagtggattgctctgctacagcgtggcaactgtacatttaaagagaagatttctagagcagcctttcataacgccgtggcggtggtgatttacaacaacaagtctaaggaagaaccggtgactatgacgcaccccggaaccggcgacataatcgccgtcatgatcaccgaactgaggggtaaggatatcctctcttatttagaaaaaaacatttctgtccagatgacaattgcagttggaacgcggatgccccccaaaaatttctcgagaggaagccttgtcttcgtcagcatcagctttatagttctcatgataatctccagcgcctggcttatcttctatttcattcagaagattaggtacacaaatgcccgcgaccgcaatcagcgccgtttaggagacgctgcaaagaaggctatctctaaactaaccactcgaactgttaagaaaggagacaaggagacagaccctgacttcgaccactgtgctgtatgcattgagagctataaacagaacgacgtggtgagaatattgccgtgcaaacacgtgttccataaaagttgcgtagatccttggctttcagaacattgtacttgccctatgtgtaaactgaacattctgaaggctctcggaattgtccccaacttgccttgcacagacaatgtagctttcgacatggagaggcttactcgaacacaggccgtaaataggcggtccgcgctgggggatctcgccggagacaactccctaggtctcgaaccgttgcgaacaagtggcatcagtccactgccacaggatggcgagttgacacctcggacaggagagattaatatcgctgtcaccaaagagtggtttatcattgcctcattcggcctgctgtcagctcttacattatgctatatgatcattcgggcgacggccagtctgaatgcaaacgaagtggaatggttctag

SEQ ID NO: 198571 - DNA, 1260 bp, Artificial Sequence
  derived and/or modified sequence
atgtcatgtgccggaagggccggtcctgctagactggccgcactggccctactgacctgctcactctggccagctagagcagataacgcctcccaagagtattacaccgccttgattaatgtgactgtccaggagcccggaagaggcgcacccctgacgttccgcattgatcgtggcagatatggactcgattcccccaaggccgaagtgcggggacaggtcctagccccactgccactgcacggagtcgccgaccacctgggatgtgaccctcagacacgcttcttcgtgccccctaacatcaagcagtggatcgccctgctgcagcgcggaaactgtacttttaaggagaaaattagccgggcagcttttcacaacgcagtagccgttgtaatctacaacaacaaaagcaaagaggagccagtcaccatgactcatcctggaaccggtgacataatcgctgtgatgatcacagagttaagggggaaggatatactgtcataccttgagaaaaacatatccgtgcagatgaccattgcagttggtacacgaatgcctccaaaaaacttctctcggggaagcctggtgtttgttagcatttctttcatcgtgttaatgataatctccagtgcctggcttatattctacttcatacagaagatcagatacacaaatgctagggacaggaatcaacgtagactgggtgacgctgcaaagaaggccatttctaaacttaccaccagaacagttaagaaaggggataaggagaccgaccctgattttgaccattgcgccgtgtgcattgagagctacaagcagaatgatgtcgtgcgcattcttccctgcaagcacgtattccataagagctgtgtagatccatggttatccgagcattgcacttgccccatgtgtaagcttaacatactgaaagctctggggatcgtacccaatttgccttgcacggacaatgtggcctttgatatggaacgcctgacccggacacaggctgtcaacagaagatctgccctgggcgacctggcgggagataactccctagggcttgaacccctcagaacatctggtataagccccctgccgcaggacggtgagctcacccctcggacgggcgaaatcaacatcgccgttactaaagagtggttcattattgcttctttcggtctgttgagcgccctgaccttgtgttacatgataatacgggctacagcttccctgaacgcaaacgaggttgaatggttttag

SEQ ID NO: 198572 - DNA, 2263 bp, Artificial Sequence
  derived and/or modified sequence
cggcagccgcgcgagagggactttgtgttccgctgaccctcctcggggcgcttcctcccgtgccgcccttcccctcccccgccgcgtccttgcgaggcgcctcccattcggtgggaccgacccggggggatggagggggcacgcttctacaaccctcctgggaccccgaagagacgcccgcgtgcgacctgagacgccgccctcgccgagggcccatgggcgcgtccccacaggcgggcagtggacgtgagggcggcgagcggcggggccgcggcgtccaggagggccgcgctcgggctcggccccgcgcaggccgcgcgcgcgcgctcccgccgccgcccgggccgcgcccgccccgcctctaggcgccggccccggagcccggtccgcgagcagcggcggctgccggagggacgatgagctgcgcggggcgggcgggccctgcccggctcgccgcgctcgccctgctgacctgcagcctgtggccggcacgggcagacaacgcgagccaggagtactacacggcgctcatcaacgtgacggtgcaggagcccggccgcggcgccccgctcacgtttcgcatcgaccgcgggcgctacgggcttgactcccccaaggccgaggtccgcggccaggtgctggcgccgctgcccctccacggagttgctgatcatctgggctgtgatccacaaacccggttctttgtccctcctaatatcaaacagtggattgccttgctgcagaggggaaactgcacgtttaaagagaaaatatcacgggccgctttccacaatgcagttgctgtagtcatctacaataataaatccaaagaggagccagttaccatgactcatccaggcactggagatattattgctgtcatgataacagaattgaggggtaaggatattttgagttatctggagaaaaacatctctgtacaaatgacaatagctgttggaactcgaatgccaccgaagaacttcagccgtggctctctagtcttcgtgtcaatatcctttattgttttgatgattatttcttcagcatggctcatattctacttcattcagaagatcaggtacacaaatgcacgcgacaggaaccagcgtcgtctcggagatgcagccaagaaagccatcagtaaattgacaaccaggacagtaaagaagggtgacaaggaaactgacccagactttgatcattgtgcagtctgcatagagagctataagcagaatgatgtcgtccgaattctcccctgcaagcatgttttccacaaatcctgcgtggatccctggcttagtgaacattgtacctgtcctatgtgcaaacttaatatattgaaggccctgggaattgtgccgaatttgccatgtactgataacgtagcattcgatatggaaaggctcaccagaacccaagctgttaaccgaagatcagccctcggcgacctcgccggcgacaactcccttggccttgagccacttcgaacttcggggatctcacctcttcctcaggatggggagctcactccgagaacaggagaaatcaacattgcagtaacaaaagaatggtttattattgccagttttggcctcctcagtgccctcacactctgctacatgatcatcagagccacagctagcttgaatgctaatgaggtagaatggttttgaagaagaaaaaacctgctttctgactgattttgccttgaaggaaaaaagaacctatttttgtgcatcatttaccaatcatgccacacaagcatttatttttagtacattttattttttcataaaattgctaatgccaaagctttgtattaaaagaaataaataataaaataaaaagtctgtgctgttgagtcttattaaccagacctgtgttttgagggctgatttgaagctcgcagacccagattgcatttgtttgtgtttcagagacagaatgtgctcctggctcccgtgagaggaacagggattgacacttactattggtgtcttcacattggctcctacccacatagggcgcaagagcggggacatcctgctggtgatgccgcttaggatggtcagttgatttactcattcttcaagggggacattcactctgtgataatttcttctctgtggttgatcagcctccaccagagctgcagcacccccagcagcagggacttgtaacatttgctccccactgtgcccctgcacccaacagagtgctttgcacatcgtaagtgctcaataaatatttgtggaatgaa

SEQ ID NO: 198573 - protein, 391 aa, Artificial Sequence
  derived and/or modified sequence
MDMASESVGGKILFATDDFFAPAENLIKSDSPCFKEHEYTEFGKWMDGWETRRKRIPGHDWCVLRLGIQGVIRGFDVDVSYFTGDYAPRVSIQAANLEEDKLPEIPERGTRTGAAATPEEFEAIAELKSDDWSYLVPMTELKPGNPASGHNYFLVNSQQRWTHIRLNIFPDGGIARLRVFGTGQKDWTATDPKEPADLVAIAFGGVCVGFSNAKFGHPNNIIGVGGAKSMADGWETARRLDRPPILENDENGILLVPGCEWAVFRLAHPGVITRIEIDTKYFEGNAPDSCKVDGCILTTQEEEAVIRQKWILPAHKWKPLLPVTKLSPNQSHLFDSLTLELQDVITHARLTIVPDGGVSRLRLRGFPSSICLLRPREKPMLKFSVSFKANP

SEQ ID NO: 198574 - DNA, 1176 bp, Artificial Sequence
  derived and/or modified sequence
atggatatggcaagcgaatccgtcgggggaaaaattctgttcgccaccgacgattttttcgcaccggccgaaaatctgataaagagcgactcaccctgcttcaaagagcacgaatacactgaattcggaaagtggatggatggctgggagactcgcaggaagaggatccctggccacgattggtgtgtgttgcgactgggcatacagggtgtgatccgtggtttcgatgttgacgtgtcatattttacgggggattacgctcctcgagtgtccattcaggcagcgaatttggaggaagataaactgcccgaaattccagaaaggggtaccaggacaggagcagccgccactcccgaggaattcgaggctatagcagagctgaaaagtgacgattggagctacctggtccctatgactgaactgaaaccaggcaaccccgcttctgggcataactactttttggtcaattctcagcagcggtggacccatattcgccttaatatttttcccgacggaggtatagcacgactgcgagtgtttggcacgggacagaaggactggaccgccacagaccctaaggagccagccgatctggtggcgattgcttttggaggggtatgcgttgggttttctaatgctaaatttggtcaccccaataatataataggagttgggggtgcaaagagtatggccgatggatgggaaaccgccagaagacttgacagacccccaatccttgagaatgatgaaaacgggatactgctcgtgcctggctgtgagtgggcagtattccggctggctcaccctggcgttatcacgcgtattgagattgacacaaagtatttcgaaggaaatgcacccgatagctgtaaagtggacggctgtattctgactacacaggaggaggaggccgtcattcgtcagaagtggatcttacctgcacacaaatggaagcccttgttacctgtgaccaaactgtctccaaaccagtctcatctgtttgattctctaacacttgagctgcaggatgtaattacccacgcacgactaaccatcgtgcccgatggaggcgtcagccgcctgaggttgcggggttttccttcctcgatatgtcttctccgtccgagagaaaaaccaatgttaaaattctccgtgtcttttaaggccaacccttag

SEQ ID NO: 198575 - DNA, 1176 bp, Artificial Sequence
  derived and/or modified sequence
atggacatggccagcgagagcgtgggcggcaagatcctgtttgccacagatgacttctttgccccagctgagaacctgatcaagagtgacagcccctgcttcaaggagcacgagtacacagaatttgggaagtggatggatggctgggagaccaggaggaagagaattcctggccatgactggtgtgtgctgcggctgggcatccagggcgtcatccggggctttgatgtggatgtgtcctacttcaccggggactatgccccccgggtgtccatccaggccgccaacctggaggaggacaagctgcctgagatccctgagcggggcaccaggactggagctgctgccaccccagaggagtttgaggccatcgccgagctgaagagtgatgactggagctacctggtgcccatgacagagctgaagccaggcaacccagccagcggccacaactacttcctggtgaacagccagcagcgctggacccacatccggctgaacatcttcccagatggcggcatcgcccggctgcgggtgtttggcaccggccagaaggactggacagccacagaccccaaggagcctgctgacctggtggccatcgcctttggaggagtgtgtgtgggcttcagcaatgccaagtttggccaccccaacaacatcatcggcgtgggcggggccaagtccatggctgatggctgggagacagcccggcggctggacaggcctcccatcctggagaatgatgaaaatggcatcctgctggtgcccggctgtgagtgggccgtgttccggctggcccaccctggggtcatcaccagaattgaaattgacaccaagtactttgagggcaatgccccagacagctgcaaggtggatggctgcatcctgaccacccaggaggaggaggccgtcatccggcagaagtggatcctgcctgcccacaagtggaagcccctgctgcctgtgaccaagctgagccccaaccagagccacctgtttgacagcctgaccctggagctgcaggatgtgatcacccacgcccggctgaccatcgtgcctgatggaggagtgtcccggctgcggctgcggggcttccccagcagcatctgcctgctgcggccccgggagaagcccatgctgaagttctctgtgtccttcaaggccaacccctag

SEQ ID NO: 198576 - DNA, 1446 bp, Artificial Sequence
  derived and/or modified sequence
tatacattctctctgagctggcactcaagcaccgtgggaccttggctggcttctggggagcaagagatccatttatgaatacttgatttctgactgctgggaagcacggctgatgctccgaaggagggaagactgacccggtttctggacttcacccagctgatggacatggcatctgaatccgtaggaggaaaaattttatttgcaacagatgacttttttgctcctgcagaaaacctcataaagagtgacagcccgtgcttcaaagagcatgaatatacggagtttgggaaatggatggatggctgggagaccaggaggaaaaggattccaggtcacgactggtgtgtcctcaggctggggatccaaggagtcatccggggcttcgacgtggacgtttcttacttcacgggagattacgctcctcgagtgtccattcaagcagcaaacttggaagaagataaactaccagaaatcccagaaagaggaaccaggacaggagctgcagccactcctgaggagtttgaagccattgctgagctaaaatccgacgactggagttacttggttcccatgactgagcttaagccaggaaaccctgcttccggccacaactattttcttgtcaattcccagcagagatggactcatatcagactcaacattttcccagatggtggaattgcacgacttagagtattcggtactggacaaaaagactggactgcaactgaccccaaagaacctgcagacctagtggccatcgcttttgggggtgtctgtgtaggatttagtaatgctaagtttgggcacccaaacaatataataggagttggcggggcaaagtctatggcggatggttgggaaactgcaagaaggctggaccggccaccaatattagaaaatgatgagaatggcattctcttggttccgggttgtgaatgggcagttttccgattggcacatcctggagtaataactcgaattgaaattgacacaaaatattttgaaggcaatgctcctgacagctgtaaagtggatgggtgcatcctgacaactcaggaagaagaagccgtgatcaggcaaaagtggattctcccggcccacaagtggaaaccactgcttccagtgaccaagttgtctcccaaccaaagtcatctgttcgatagcctgaccctagagctccaagatgtcatcactcacgccaggctcaccatcgtccccgacgggggagtgagccgccttcggctccggggcttccccagctccatctgcctcctgaggccccgggagaagcccatgttgaagttctcggtgagcttcaaagcaaacccttaacacacacaaagccccggtgtcggacacacagcagtaatttcccagtcatagtcttcttttcaaatgttttgaacacctggtgatttaataaagtggtcgtctcacaaa

SEQ ID NO: 198577 - DNA, 1176 bp, Artificial Sequence
  derived and/or modified sequence
atggacatggccagcgagagcgtgggcggcaagatcctgttcgccaccgatgactttttcgctccagcagaaaatcttatcaagtccgacagtccatgcttcaaagagcacgaatacaccgaatttggaaagtggatggatggatgggagacaagacggaagcgaatccctggacacgactggtgtgtgctgcgtctaggaatccaaggcgttataaggggcttcgacgtcgatgttagttactttacgggagactacgcgcccagggtttctatccaagccgcaaacttagaagaggacaagttgccggagatcccagagcgaggaactcgcacaggtgctgccgcaacaccagaagagtttgaggccattgccgagctgaaatccgatgattggtcatacctggtgcctatgaccgagctaaaacccggaaatccagcaagcgggcacaactacttcctggttaatagccagcagcgctggacccacatcagactgaacatcttcccggatggtggcatcgcccggctccgcgtttttggaaccggacaaaaagattggacagcaactgacccaaaagaacctgcagatctggtggctatcgccttcgggggagtgtgcgttgggttctcaaatgctaaatttggccatcccaacaacataatcggcgtggggggtgctaagtctatggcggatggctgggaaacggctaggcgccttgatcggccacctattctggaaaatgatgagaacggcattcttttggtccctgggtgtgaatgggccgtattccgcttagctcacccgggcgtcataactagaatcgaaatcgacacaaagtatttcgaaggaaatgcacccgattcctgcaaggttgacggctgcattctgactactcaagaggaagaggccgtgatcaggcaaaaatggatactgcctgcccacaagtggaaacccctgttgccagtgaccaagctaagtcccaaccagtcacatctattcgactctctcacacttgagttgcaagacgtgattacacacgcccggctgaccatagtacccgatggtggcgtgtcccgcttgcgactacgcggatttccttctagcatctgcttgctacggcccagggagaaaccaatgctgaagttttctgtgagctttaaggccaacccatag

SEQ ID NO: 198578 - DNA, 1176 bp, Artificial Sequence
  derived and/or modified sequence
atggatatggcctcagagtctgtaggcggaaagattctgttcgccactgacgatttctttgctcctgccgaaaacctcatcaagtcagatagcccttgtttcaaggaacatgagtatacagagttcggcaagtggatggacgggtgggagactcggagaaagcgaatcccaggacatgactggtgcgtgttgcggttgggtattcagggggtcattagggggtttgacgtcgatgtgtcttatttcaccggggattacgcaccgagagtgtcaatccaggctgcaaacctcgaagaggacaagctgccagagatcccggagcggggtacacgcactggagcagctgcaaccccagaggagttcgaggcgatcgcagagctgaagtcagatgactggtcctacttagtgcccatgacagaactaaagcctgggaatcccgctagcggacataattacttcctcgtgaattcccaacagagatggactcacatccggctgaacatctttccggacggcggaatcgctcgacttagggtctttggtacaggacagaaggattggacagctacagatccgaaggagcctgctgatttggtggcaatagcctttggaggggtgtgcgtcggcttctccaacgccaagttcgggcaccctaacaatataatcggggtgggcggtgccaagtctatggccgatggctgggagaccgcccgaagacttgatagaccaccaatcttagaaaatgatgaaaatggaatcttgttggtgcccggttgcgagtgggccgtttttcgcctcgctcaccccggtgtgatcactagaatcgagatcgacactaagtattttgagggaaacgcgccagacagctgcaaagtggatggctgcatcctcacaacacaggaagaggaggccgtgattaggcagaagtggatcctgccagcccacaaatggaaacccctcctcccagtgacaaaactttccccgaaccaatcccacctgttcgattctctgaccctagaacttcaggatgttataacccacgctcgtctgaccattgttccagatggtggggtgagtaggttacggttgagaggtttcccaagctcaatttgtctcctccgaccaagagaaaagccaatgttgaagttttcggtgagcttcaaggcaaatccatag

SEQ ID NO: 198579 - DNA, 1176 bp, Artificial Sequence
  derived and/or modified sequence
atggacatggccagcgagagcgtgggcggcaagatcctgttcgccaccgacgacttcttcgcccccgccgagaacctgatcaagagcgacagcccctgcttcaaggagcacgagtacaccgagttcggcaagtggatggacggctgggagaccagaagaaagagaatccccggccacgactggtgcgtgctgagactgggcatccagggcgtgatcagaggcttcgacgtggacgtgagctacttcaccggcgactacgcccccagagtgagcatccaggccgccaacctggaggaggacaagctgcccgagatccccgagagaggcaccagaaccggcgccgccgccacccccgaggagttcgaggccatcgccgagctgaagagcgacgactggagctacctggtgcccatgaccgagctgaagcccggcaaccccgccagcggccacaactacttcctggtgaacagccagcagagatggacccacatcagactgaacatcttccccgacggcggcatcgccagactgagagtgttcggcaccggccagaaggactggaccgccaccgaccccaaggagcccgccgacctggtggccatcgccttcggcggcgtgtgcgtgggcttcagcaacgccaagttcggccaccccaacaacatcatcggcgtgggcggcgccaagagcatggccgacggctgggagaccgccagaagactggacagaccccccatcctggagaacgacgagaacggcatcctgctggtgcccggctgcgagtgggccgtgttcagactggcccaccccggcgtgatcaccagaatcgagatcgacaccaagtacttcgagggcaacgcccccgacagctgcaaggtggacggctgcatcctgaccacccaggaggaggaggccgtgatcagacagaagtggatcctgcccgcccacaagtggaagcccctgctgcccgtgaccaagctgagccccaaccagagccacctgttcgacagcctgaccctggagctgcaggacgtgatcacccacgccagactgaccatcgtgcccgacggcggcgtgagcagactgagactgagaggcttccccagcagcatctgcctgctgagacccagagagaagcccatgctgaagttcagcgtgagcttcaaggccaacccctag

SEQ ID NO: 198580 - protein, 320 aa, Artificial Sequence
  derived and/or modified sequence
MAEGDAGSDQRQNEEIEAMAAIYGEEWCVIDDCAKIFCIRISDDIDDPKWTLCLQVMLPNEYPGTAPPIYQLNAPWLKGQERADLSNSLEEIYIQNIGESILYLWVEKIRDVLIQKSQMTEPGPDVKKKTEEEDVECEDDLILACQPESSLKALDFDISETRTEVEVEELPPIDHGIPITDRRSTFQAHLAPVVCPKQVKMVLSKLYENKKIASATHNIYAYRIYCEDKQTFLQDCEDDGETAAGGRLLHLMEILNVKNVMVVVSRWYGGILLGPDRFKHINNCARNILVEKNYTNSPEESSKALGKNKKVRKDKKRNEH

SEQ ID NO: 198581 - DNA, 963 bp, Artificial Sequence
  derived and/or modified sequence
atggccgagggcgacgccggcagcgaccagagacagaacgaggagatcgaggccatggccgccatctacggcgaggagtggtgcgtgatcgacgactgcgccaagatcttctgcatcagaatcagcgacgacatcgacgaccccaagtggaccctgtgcctgcaggtgatgctgcccaacgagtaccccggcaccgccccccccatctaccagctgaacgccccctggctgaagggccaggagagagccgacctgagcaacagcctggaggagatctacatccagaacatcggcgagagcatcctgtacctgtgggtggagaagatcagagacgtgctgatccagaagagccagatgaccgagcccggccccgacgtgaagaagaagaccgaggaggaggacgtggagtgcgaggacgacctgatcctggcctgccagcccgagagcagcctgaaggccctggacttcgacatcagcgagaccagaaccgaggtggaggtggaggagctgccccccatcgaccacggcatccccatcaccgacagaagaagcaccttccaggcccacctggcccccgtggtgtgccccaagcaggtgaagatggtgctgagcaagctgtacgagaacaagaagatcgccagcgccacccacaacatctacgcctacagaatctactgcgaggacaagcagaccttcctgcaggactgcgaggacgacggcgagaccgccgccggcggcagactgctgcacctgatggagatcctgaacgtgaagaacgtgatggtggtggtgagcagatggtacggcggcatcctgctgggccccgacagattcaagcacatcaacaactgcgccagaaacatcctggtggagaagaactacaccaacagccccgaggagagcagcaaggccctgggcaagaacaagaaggtgagaaaggacaagaagagaaacgagcactag

SEQ ID NO: 198582 - DNA, 963 bp, Artificial Sequence
  derived and/or modified sequence
atggctgagggagacgcagggagcgatcaacgtcaaaacgaagaaattgaggcaatggcagccatttatggagaggagtggtgcgttatcgacgattgcgcgaaaatattctgcattcgtatcagtgatgacatcgatgaccctaagtggaccttatgcctgcaggtgatgctgcctaatgagtaccccggaacagcgcctcccatttatcagctcaacgcaccttggcttaaggggcaagaacgcgctgacctcagcaatagtttggaggagatttacatccagaatatcggtgagtcaatcctctatctctgggtcgagaaaattcgggatgtattaatccagaagagccagatgacagaacccggaccagacgttaagaaaaagacagaggaggaagacgtagagtgcgaggatgatttgattcttgcctgccagcctgagagttccctgaaggccttagactttgacattagcgagacacgtaccgaagtggaggtcgaagagcttcctcctatcgaccatggtatcccgattacggatcggaggtccacattccaggcccatctcgcccctgtggtttgtccaaaacaagtgaagatggtgctgagcaaactgtatgagaataaaaagatagctagcgctacacacaacatctacgcctatcgaatctattgtgaagacaaacagactttcctgcaggactgcgaagacgacggggagactgctgccggcgggcggcttttgcatttaatggagatacttaacgtcaaaaacgtgatggtggtggtgagcaggtggtacggtggaatcctgctgggacccgatcgttttaagcatattaataactgcgctagaaacatcctggtggagaagaactatacaaactcgccggaagagagcagtaaggcgctgggtaaaaataagaaagtgaggaaggataagaaacgcaatgagcactag

SEQ ID NO: 198583 - DNA, 963 bp, Artificial Sequence
  derived and/or modified sequence
atggccgagggagatgctggcagtgaccagaggcagaatgaggagattgaggccatggccgccatctatggagaggagtggtgtgtgattgatgactgtgccaagatcttctgcatccgcatcagtgatgacattgatgaccccaagtggaccctgtgcctgcaggtgatgctgcccaatgagtacccaggcacagccccacccatctaccagctgaatgccccctggctgaagggccaggagagagctgacctgagcaacagcctggaggagatctacatccagaacattggagagagcatcctgtacctgtgggtggagaagatcagagatgtgctgatccagaagagccagatgacagagcccggcccagatgtgaagaagaagacagaggaggaggatgtggagtgtgaagatgacctgatcctggcctgccagcctgagagcagcctgaaggccctggactttgacatcagcgagaccaggacagaggtggaggtggaggagctgccccccatcgaccacggcatccccatcacagaccggcgcagcaccttccaggcccacctggcccctgtggtgtgccccaagcaggtgaagatggtgctgagcaagctgtatgagaacaagaagatcgccagcgccacccacaacatctatgcctaccgcatctactgtgaggacaagcagaccttcctgcaggactgtgaagatgatggagaaacagctgctgggggccgcctgctgcacctgatggagatcctgaatgtgaagaatgtgatggtggtggtgagccgctggtacggcggcatcctgctgggccctgaccgcttcaagcacatcaacaactgtgccaggaacatcctggtggagaagaactacaccaacagccctgaggagagcagcaaggccctgggcaagaacaagaaggtgaggaaggacaagaagagaaatgagcactag

SEQ ID NO: 198584 - DNA, 3792 bp, Artificial Sequence
  derived and/or modified sequence
agatgccggcggcgcggcgtggcagggttgtggttccgggtcgggccgcgccgcagccagctctcggctcgcagccgcagcgccccgcccccgcgctccggacctggcaggcggcggctgcagggcaggtccaggggccacatggctgagggggacgcagggagcgaccagaggcagaatgaggaaattgaagcaatggcagccatttatggcgaggagtggtgtgtcattgatgactgtgccaaaatattttgtattagaattagcgacgatatagatgaccccaaatggacactttgcttgcaggtgatgctgccgaatgaatacccaggtacagctccacctatctaccagttgaatgctccttggcttaaagggcaagaacgtgcggatttatcaaatagccttgaggaaatatatattcagaatatcggtgaaagtattctttacctgtgggtggagaaaataagagatgttcttatacaaaaatctcagatgacagaaccaggcccagatgtaaagaagaaaactgaagaggaagatgttgaatgtgaagatgatctcattttagcatgtcagccggaaagttcgcttaaagcattggattttgatatcagtgaaactcggacagaagtagaagtagaagaattacctccgattgatcatggcattcctattacagaccgaagaagtacttttcaggcacacttggctccagtggtttgtcccaaacaggtgaaaatggttctttccaaattgtatgagaataagaaaatagctagtgccacccacaacatctatgcctacagaatatattgtgaggataaacagaccttcttacaggattgtgaggatgatggggaaacagcagctggtgggcgtcttcttcatctcatggagattttgaatgtgaagaatgtcatggtggtagtatcacgctggtatggagggattctgctaggaccagatcgctttaaacatatcaacaactgtgccagaaacatactagtggaaaagaactacacaaattcacctgaggagtcatctaaggctttgggaaagaacaaaaaagtaagaaaagacaagaagaggaatgaacattaatacctgaaactataggaaaggttaatttgcctataattatatatacattccatagtcatcaaggaatatattgtgcagagagagtatccttgactgcttaagtcagccagttcagcatggataccaacattagcttttcttcttggttatatcatctgccaaaaatagagaacttatgatctattcatgtgtgtttcaggcttatttgggagaactaatttgaacttaatcaccacttcatctaattttagcaaggtaacagttgcccagggcagtacctgaattaactgtccatttcagtacatgtcaagtgcctttgttaggtggagaagaaatgtctctagaggaatataaatacctgatttcttgtcatcgagattcttgtactgttaaatgaatattgccttttactgctctttatggcttattggaataggagctcatttaagattgatcttggagagtttcttcttgtgattttagttcataagtatgtcacctttcattttatagtgttcatcattgagtaatggattaagtgaaaatccaggagtatccatctgcagttatgtgctgaggtgataattcatccaacatatttgttagcataaatattatgcttcagtttctgttgcaaattggtgattgtgaaattacagaaagtgattttctagtctgctttttttgtttaattcttgtaatgtaagcaataaatatggagtgtcagtagtctccttccaccccagaaatgtgttggtgtaacattctcgtttcttttaacaacctggaagtacctttcttgtgatcttcactgaggaattagaactatgatagaagttaggctgtggcaaatgggacattcgtagagtgggatagaggtggcagaatgaacctggtgtagggcaggagtatgttgtgtagttacatcaatttgatgcatgctttccatctgcactccagacggctttctcagttccaagattttgcagagagaaggagcaaaccttttcattggaaaaacagaaacaaccctcccccccattttttcccctctattcatcaaacctttatgtatctttcatcttccagttacctctaggcatttagatagtgaaatttacctttgagatataacaataagtgattaactgttcactttcagatgtaatggcaaacaattgttaaaagttattaactgatcacagatttgcctggacttcccttcccagggagggaacagaagttaggaggcaactttgggatggtgctagagcatggaaagcacagagaattggacaaacaggtctttttctcttttctctgatgttttacctttaaaagatccaacatccttaccgttggtatttttagtaaggttatagtaaatagctttacaccaggatggattctgaaatataaattctaaattatatttgttataactatattttatgttgtatgttatcaggagccatcagagaatgacctttttgtgtttggaacacttggttccatgaaaagtatgctttgtgttttaactgttaaaataatttaaaaattaattattttacataattaaagaagttaaaaactattaacattaaataatttcacaatttcaacatgtcaaacctatgaagggagataggaaacaatgagaaacttacttttgctcctttatacagaattattaactatattttactaactaaaaaactctagtattctttacctaaagtcaattggctggtaagagggagagatgcaaaattctccagctctgaacttggagctacttcacactctactcttaatggaaacttgaactaatgatagatagtatttttttcctctatttaaaatttttgtcttgattaggagatttttcagttctccatataataattttctacaatcagatctatgctgtggcatattttgctttatttaaaaatttttttttagagatgagttcttgctctgtcacctaggctggagtgcagtggcatgatcatggctcactgcagccttgaccttccagcctgccaagtagctgggattacagacaggcatgtgctattacacctggctaatttttaaagttttttttgtaaagatagggtctttctatgttgcccaggctcgtcttgagctcctggcctcaatcgatcttcctgccaaggttttggaattacaggtgtgagccaccatgcctggcctgctttgacatattttatagtgtgttaattacaaatagtcttcatatgccagaatataagagcaagtgttatctactttttagatgggaattgcagaagctgcatcaaaagtatgctttgaggtatatatagtgaaacagagcctttctgaagagaattatatcaaactaattacaaccaagaaataatagtatgaagcggatgctgtttggaggacaggaaaatttatcgggaaaattacataatccctctgattccactatccagagatagccattattattaatatttggtatgtacatccttatattatttttttcttatgcatgattttgtatatatggttatttttctttccataaaaatggtattaaactgtatatactgttttgtagcctacatatttcatatagaagtatattgttaacattttccatgtcaataaatattcttctatggcttaaatgtc

SEQ ID NO: 198585 - DNA, 963 bp, Artificial Sequence
  derived and/or modified sequence
atggccgagggcgacgccggcagcgaccagcggcagaacgaggagatcgaagctatggcagctatatacggtgaggagtggtgtgtgattgatgattgtgcgaaaattttctgtatacgcattagcgacgacattgacgatcctaaatggacattgtgccttcaagtaatgttacctaacgaatatccaggtaccgctccacccatttatcaactgaacgctccatggctgaagggacaggagcgtgctgacttatctaactccctggaggaaatctatatccagaacatcggtgagtccatcctttacttgtgggtggaaaagatccgggatgtactaatacagaagtcccagatgacagagccggggcccgatgttaaaaagaagaccgaggaggaggacgtggaatgcgaggatgacctaattctagcctgtcagccggagagttctctgaaagccctggactttgatatatctgagacacgtaccgaagtggaggttgaagaactgccccctattgatcacggcatccctattaccgacagacggagtacattccaggcacaccttgctcctgtggtgtgccctaagcaggtgaagatggtgctgagcaagttgtacgagaacaagaagattgcaagtgcgactcataatatttacgcctataggatttattgcgaggataaacagaccttcctgcaggattgtgaagacgacggcgagactgcagccggtggcagactgttgcatctcatggaaattctcaatgtgaagaatgtaatggtggtggttagccggtggtacgggggcatcctgctcggcccagacagatttaagcatattaacaattgtgcaagaaacattctggtggagaagaattacacaaattccccggaggagtcttctaaggcccttggaaaaaataagaaggtccgcaaggacaaaaagcgcaatgaacactag

SEQ ID NO: 198586 - DNA, 963 bp, Artificial Sequence
  derived and/or modified sequence
atggccgagggtgatgcaggaagcgatcaacgacagaacgaggagatcgaggctatggctgcgatttatggggaagaatggtgtgtcatcgacgattgcgccaagatcttttgtatccgaatatctgacgatattgatgatccgaagtggaccctttgcctgcaggtgatgctgcccaacgagtacccaggaaccgccccacccatttatcagctgaacgccccatggcttaaggggcaggagagggctgacctgtccaattcgcttgaagagatctacatacagaatattggggaatctatattgtatctgtgggtcgagaagattcgcgacgttttaatccaaaagagccaaatgacagaacccggtccagacgtgaaaaagaaaactgaagaggaggatgtggagtgcgaggatgacctgattttggcctgccaacccgaatcgtcactgaaggcactcgacttcgatatttctgaaacacgaacggaggttgaggtcgaggagctaccgccaatcgatcacggcattcccattactgatcgcaggtcaacctttcaagcccacctcgcccctgttgtctgtcccaaacaagtgaaaatggttttgagcaagctgtacgagaataagaagattgcttccgcaactcacaacatttacgcataccgcatctattgcgaggacaaacagacatttctgcaggattgtgaggatgatggtgagacggccgcaggtggccgtctgctccatctgatggaaatcttaaacgtgaaaaacgtgatggtggtggtttccagatggtatggtgggatactcctgggcccagatcggtttaagcacatcaataactgtgccagaaatatacttgttgagaaaaactatactaactctcctgaagaaagttcaaaggcactgggcaagaacaaaaaagtgagaaaggataaaaaacgtaacgagcattag

SEQ ID NO: 198587 - protein, 303 aa, Artificial Sequence
  derived and/or modified sequence
MASWAKGRSYLAPGLLQGQVAIVTGGATGIGKAIVKELLELGSNVVIASRKLERLKSAADELQANLPPTKQARVIPIQCNIRNEEEVNNLVKSTLDTFGKINFLVNNGGGQFLSPAEHISSKGWHAVLETNLTGTFYMCKAVYSSWMKEHGGSIVNIIVPTKAGFPLAVHSGAARAGVYNLTKSLALEWACSGIRINCVAPGVIYSQTAVENYGSWGQSFFEGSFQKIPAKRIGVPEEVSSVVCFLLSPAASFITGQSVDVDGGRSLYTHSYEVPDHDNWPKGAGDLSVVKKMKETFKEKAKL

SEQ ID NO: 198588 - DNA, 912 bp, Artificial Sequence
  derived and/or modified sequence
atggccagctgggcaaagggcagaagctacctcgcccccgggctgctccaaggtcaggtggccatagttacaggaggggcaacaggaattggcaaagccatcgtcaaggagttgctagagcttggtagtaacgtggtgatagccagtcgaaaactggagagactgaaaagcgcagccgacgagcttcaagctaatctccctccgacgaaacaggcaagggttattcctattcagtgcaacattcggaacgaagaggaggtgaacaatctggtgaagtctaccctagatacgttcggcaagatcaatttcctcgtgaataacggaggcggccagttcttgtcgccagctgaacacatctcttctaaaggctggcatgcggtgttagaaaccaatctcactggcacattctacatgtgcaaggctgtgtactcctcctggatgaaggagcatggaggcagcatcgtgaatattatcgtcccaaccaaagccgggttccccctggccgtgcacagcggcgctgctcgcgccggcgtgtataacctgacaaaaagcctcgccctcgaatgggcgtgctcaggcatacggatcaattgtgtcgctccaggcgtgatttacagccagacagccgtggagaattacggtagttggggtcagagtttcttcgagggatctttccaaaagatcccggccaagcgaatcggggtacctgaagaagtgtccagtgttgtttgctttttgttaagtcccgctgcctccttcatcaccggtcagtctgtggatgtggatggtggtcggtccctttacactcatagttacgaggtgcctgatcacgataactggcccaaaggtgccggagatctctcagtagtcaagaaaatgaaagaaaccttcaaggaaaaagctaagctgtag

SEQ ID NO: 198589 - DNA, 912 bp, Artificial Sequence
  derived and/or modified sequence
atggcctcctgggccaagggccgcagctacctggcccctggcctgctgcagggccaggtggccatcgtgactggaggagccaccggcatcggcaaggccatcgtgaaggagctgctggagctgggcagcaatgtggtgattgccagcaggaagctggagcggctgaagtctgctgctgatgagctgcaggccaacctgccccccaccaagcaggcccgggtcatccccatccagtgcaacatcagaaatgaggaggaggtgaacaacctggtgaagagcaccctggacaccttcggcaagatcaacttcctggtgaacaatggaggcggccagttcctgagccctgctgagcacatcagcagcaagggctggcatgctgtgctggagaccaacctgaccggcaccttctacatgtgcaaggctgtgtacagctcctggatgaaggagcacggcggcagcatcgtgaacatcatcgtgcccaccaaggccggcttccccctggccgtgcacagcggggccgcccgggccggcgtgtacaacctgaccaagagcctggccctggagtgggcctgcagcggcatccgcatcaactgtgtggcccctggggtcatctacagccagacagctgtggagaactacggctcctggggccagagcttctttgagggcagcttccagaagatcccagccaagagaattggagtgcctgaggaggtgtcctctgtggtgtgcttcctgctgagccctgctgccagcttcatcaccggccagagcgtggatgtggatggcggccgcagcctgtacacccacagctatgaggtgcctgaccatgacaactggcccaagggggccggggacctgtctgtggtgaagaagatgaaggagaccttcaaggagaaggccaagctgtag

SEQ ID NO: 198590 - DNA, 912 bp, Artificial Sequence
  derived and/or modified sequence
atggccagctgggccaagggccggagctacctggcccccggcctgctgcagggtcaagtcgccatcgtgaccggaggcgccaccggtatcggtaaggccatcgtgaaagaacttcttgaattgggtagcaacgtggtaatagcctcccggaagctcgaaaggctgaagtctgcagccgatgagctgcaggctaaccttcctcccactaagcaagcccgcgtgatccccatccagtgtaacatacgcaacgaagaagaggtcaacaacctggtgaaaagcaccctggatacttttgggaaaattaactttctggtcaataatggcggggggcagttcctgagtcctgctgagcatatttcttctaagggttggcacgcagtgttggaaaccaatctgaccggtaccttctacatgtgcaaagctgtctactcttcgtggatgaaagaacatggcgggtccattgtgaacattatagtgcccactaaagccggttttcctctggctgttcactccggggctgccagggccggtgtgtacaacctgaccaaatcactggccctggaatgggcctgctccggaattcgtatcaactgtgttgcaccaggcgtgatttactctcagaccgctgtcgagaattacggctcctggggacaatcgttcttcgagggtagctttcagaaaattccagccaaacggatcggagtgccagaggaagtgagcagtgtcgtatgtttcctcctgtcgccagcagccagtttcatcactggacagtcagtggatgttgatgggggccgttctctgtacacacattcctatgaggtacccgaccatgataattggcccaagggtgcaggggatctctcagtggtaaagaagatgaaagaaactttcaaggagaaggctaagctgtag

SEQ ID NO: 198591 - DNA, 1853 bp, Artificial Sequence
  derived and/or modified sequence
tccgcccgcccgcctcgaatgtccctgagacccagaagggcctgcgctcagctgctctggcaccccgctgcagggatggcctcctgggctaagggcaggagctacctggcgcctggtttgctgcagggccaagtggccatcgtcaccggcggggccacgggcatcggaaaagccatcgtgaaggagctcctggagctggggagtaatgtggtcattgcatcccgtaagttggagagattgaagtctgcggcagatgaactgcaggccaacctacctcccacaaagcaggcacgagtcattcccatacaatgcaacatccggaatgaggaggaggtgaataatttggtcaaatctaccttagatacttttggtaagatcaatttcttggtgaacaatggaggaggccagtttctttcccctgctgaacacatcagttctaagggatggcacgctgtgcttgagaccaacctgacgggtaccttctacatgtgcaaagcagtttacagctcctggatgaaagagcatggaggatctatcgtcaatatcattgtccctactaaagctggatttccattagctgtgcattctggagctgcaagagcaggtgtttacaacctcaccaaatctttagctttggaatgggcctgcagtggaatacggatcaattgtgttgcccctggagttatttattcccagactgctgtggagaactatggttcctggggacaaagcttctttgaagggtcttttcagaaaatccccgctaaacgaattggtgttcctgaggaggtctcctctgtggtctgcttcctactgtctcctgcagcttccttcatcactggacagtcggtggatgtggatgggggccggagtctctatactcactcgtatgaggtaccagatcatgacaactggcccaagggagcaggggacctttctgttgtcaaaaagatgaaggagacctttaaggagaaagctaagctctgagctgaggaaacaaggtgtcctccatcccccagtgccttcacatcttgaggatatgcttctgtactttttaaaagcttatagttggtatggaaaacatttttcttatttttaagtgttattaattatatctatggaaaaactattcctgaaatatatacagtcttatgtcccaatcagagtcttttaacctatgatttaaaaatgtataagtaacagaaattaacatattttaatgactttactttttatttctaagaaaagtatttgaaaaatggaataattttaaatcaatgataattctagggatcatgaactcccagaagattttattatttaattgtaaaggtagaggccagacgcagtggctcacgcctgtaattccagcactttgggaggccgaggtaggcgggtcagttgaggtcaggagttcaagaccaggctggccaacatggtaaaaccctgtctctactgaaaaacaacaaaaacaaaaacacaaattagtcgggtgtggtggcacacacctgtagtcccaggtacttgggaggctgaggcaggaggatcgcttgaacccaggaagcagaggttgcagtgagctgagatcatgctactgcagtccagcctgggctacagagtgagactgcatctcaaaaaaaacccaaaaaacaaaaacaaacaacaacaacaaaattataaaggtagaaaataaacctaaattgtgtcgtaattaagattattaaaattagaattatacaatgacttatttttggtggcaaatactttaggagcaataatgccttatggtaattattgatgtatagtttcttttgtttatgaagtcaaatttgtataaattctcttaattcaaa

SEQ ID NO: 198592 - DNA, 912 bp, Artificial Sequence
  derived and/or modified sequence
atggcatcttgggccaagggaagatcataccttgctcccggactcttacaggggcaggtggcaattgtgaccggcggagccactgggattggcaaagcaatcgtaaaagagttgctggagcttgggagtaatgtggtgatcgcctccaggaagctggagaggctgaaatctgctgctgatgagcttcaagctaatctgcccccaacaaagcaggccagagttattcccatccagtgcaatatcaggaacgaagaggaggtcaataatctcgtcaagtctactctggataccttcggcaagatcaacttcctcgtcaacaacggaggcggacagtttctttccccagcagagcatatctcgtcaaagggctggcatgccgtccttgaaaccaatctgactggcaccttctacatgtgtaaagcagtatattctagctggatgaaagaacacgggggatccattgtgaacataatcgtcccaactaaggcgggattccctttagcagtgcattctggggcagctagagccggagtgtacaacttaaccaaatcgctcgcgctcgagtgggcctgctctggcatcaggataaattgtgttgcccctggagtcatttactctcaaacagcagtggagaactacgggtcttggggccaaagcttctttgaggggtctttccagaagatccctgcaaagcgtattggcgttccagaagaggtgagctccgttgtttgcttcctgctcagcccagcagcctcctttatcaccggccagtcagtcgacgtggacggaggcaggtccttgtacacccattcctacgaggttccagatcatgataactggcccaaaggtgccggtgacctcagcgtggtcaaaaagatgaaagaaaccttcaaggagaaagctaagctgtag

SEQ ID NO: 198593 - DNA, 912 bp, Artificial Sequence
  derived and/or modified sequence
atggccagctgggccaagggcagaagctacctggcccccggcctgctgcagggccaggtggccatcgtgaccggcggcgccaccggcatcggcaaggccatcgtgaaggagctgctggagctgggcagcaacgtggtgatcgccagcagaaagctggagagactgaagagcgccgccgacgagctgcaggccaacctgccccccaccaagcaggccagagtgatccccatccagtgcaacatcagaaacgaggaggaggtgaacaacctggtgaagagcaccctggacaccttcggcaagatcaacttcctggtgaacaacggcggcggccagttcctgagccccgccgagcacatcagcagcaagggctggcacgccgtgctggagaccaacctgaccggcaccttctacatgtgcaaggccgtgtacagcagctggatgaaggagcacggcggcagcatcgtgaacatcatcgtgcccaccaaggccggcttccccctggccgtgcacagcggcgccgccagagccggcgtgtacaacctgaccaagagcctggccctggagtgggcctgcagcggcatcagaatcaactgcgtggcccccggcgtgatctacagccagaccgccgtggagaactacggcagctggggccagagcttcttcgagggcagcttccagaagatccccgccaagagaatcggcgtgcccgaggaggtgagcagcgtggtgtgcttcctgctgagccccgccgccagcttcatcaccggccagagcgtggacgtggacggcggcagaagcctgtacacccacagctacgaggtgcccgaccacgacaactggcccaagggcgccggcgacctgagcgtggtgaagaagatgaaggagaccttcaaggagaaggccaagctgtag

SEQ ID NO: 198594 - protein, 880 aa, Artificial Sequence
  derived and/or modified sequence
MSRGGSYPHLLWDVRKRSLGLEDPSRLRSRYLGRREFIQRLKLEATLNVHDGCVNTICWNDTGEYILSGSDDTKLVISNPYSRKVLTTIRSGHRANIFSAKFLPCTNDKQIVSCSGDGVIFYTNVEQDAETNRQCQFTCHYGTTYEIMTVPNDPYTFLSCGEDGTVRWFDTRIKTSCTKEDCKDDILINCRRAATSVAICPPIPYYLAVGCSDSSVRIYDRRMLGTRATGNYAGRGTTGMVARFIPSHLNNKSCRVTSLCYSEDGQEILVSYSSDYIYLFDPKDDTARELKTPSAEERREELRQPPVKRLRLRGDWSDTGPRARPESERERDGEQSPNVSLMQRMSDMLSRWFEEASEVAQSNRGRGRSRPRGGTSQSDISTLPTVPSSPDLEVSETAMEVDTPAEQFLQPSTSSTMSAQAHSTSSPTESPHSTPLLSSPDSEQRQSVEASGHHTHHQSDSPSSVVNKQLGSMSLDEQQDNNNEKLSPKPGTGEPVLSLHYSTEGTTTSTIKLNFTDEWSSIASSSRGIGSHCKSEGQEESFVPQSSVQPPEGDSETKAPEESSEDVTKYQEGVSAENPVENHINITQSDKFTAKPLDSNSGERNDLNLDRSCGVPEESASSEKAKEPETSDQTSTESATNENNTNPEPQFQTEATGPSAHEETSTRDSALQDTDDSDDDPVLIPGARYRAGPGDRRSAVARIQEFFRRRKERKEMEELDTLNIRRPLVKMVYKGHRNSRTMIKEANFWGANFVMSGSDCGHIFIWDRHTAEHLMLLEADNHVVNCLQPHPFDPILASSGIDYDIKIWSPLEESRIFNRKLADEVITRNELMLEETRNTITVPASFMLRMLASLNHIRADRLEGDRSEGSGQENENEDEE

SEQ ID NO: 198595 - DNA, 2643 bp, Artificial Sequence
  derived and/or modified sequence
atgagccgcggaggcagttatccacatttattatgggacgtgagaaagcgctcactgggcttggaggatccctctcgtctgagaagccgctaccttggtcgacgggaatttattcagaggctcaagctggaagcaaccctcaatgtgcacgacggctgtgttaatactatctgctggaatgacacaggggagtacatactctctggtagcgatgatactaagctagttattagcaatccatattctcgcaaggtgttgacaaccattaggagtggacaccgcgcgaacatattcagtgctaaatttctgccatgtaccaacgataagcagattgtgtcatgctctggcgatggcgtgatcttctacaccaacgtggaacaggatgccgagaccaatcgccagtgtcagtttacatgccattatggcacaacctatgaaattatgaccgtgccaaacgacccttacacttttctttcctgcggggaggacggcacagtccggtggttcgatacacgcatcaagacctcttgtaccaaggaggattgcaaggacgacatcctgatcaactgcagaagagccgccacctctgttgctatctgcccaccaataccctactatctggcagtggggtgctccgatagcagtgtccgtatttacgaccgacgaatgttgggtacacgggctacaggtaattatgctgggcggggcacgacaggaatggtagcccgctttattcctagccacttaaacaataaatcttgtcgcgtaacaagtctttgttactccgaggatgggcaagaaatactagtttcctattccagcgactacatttacctcttcgatcccaaggatgataccgcccgcgagctgaaaacaccaagtgccgaggagaggcgcgaagagttgcgccagccccctgtgaaacgactcaggttgcgaggagactggtctgataccggcccccgagctaggccggaaagcgaacgcgaacgcgacggagagcagagccctaacgttagcttaatgcaacggatgagcgacatgctgtccagatggttcgaagaggccagcgaggtcgcccagtccaaccgcgggcggggtagatcccgtcctcgcggcggtactagccagtccgatatttctaccctccccaccgtgccatcctctcctgacttggaggtgtccgagacagccatggaggtagatacacctgcagagcagttcttgcagccaagtacatcttcaactatgagcgcacaggcccatagtacaagttcccccactgaaagtcctcactcgactccgctactgagttcgccggactcagaacagaggcaaagtgttgaggcttccggccatcatacgcaccatcagtcagacagcccgagctctgtggtaaataagcaattgggcagtatgagtctcgacgagcagcaggataacaataacgagaagctctcacccaagccaggtaccggtgagcccgtgctctcactacattactcaactgaagggaccactacatcaacaataaaattaaattttacggacgaatggagctctatcgcttcgtcctcccgcggcattggcagccattgcaaaagcgaaggacaagaagagagcttcgttccacagagcagcgtccagccccccgaaggggattccgagacaaaagcaccagaggagtcaagtgaagacgtcaccaagtatcaagagggggtgtctgccgagaatcctgttgagaaccatataaacattacacaaagcgataagttcaccgcaaaacctctggactcaaactctggtgaaaggaatgatttaaaccttgatagaagctgcggtgtccccgaagaatcggcttcgagcgagaaagctaaggagccagagacttctgaccaaacatctactgagtccgccaccaacgagaataacaccaatccggagccccagttccagacagaggccactggtccatccgcacatgaagaaacaagcacaagggatagcgcacttcaggatacagacgacagtgacgatgacccagtgctcataccaggagccaggtatagggcaggaccgggagataggcggtctgcagtcgctaggattcaggaattttttagacgcaggaaagagaggaaagaaatggaggagctggacactctcaacattcggagaccactggtgaaaatggtgtacaaagggcatcgcaattcaaggactatgattaaggaggccaacttctggggtgctaatttcgtgatgtcagggtctgactgtggccacattttcatttgggatagacacacggccgagcacctgatgctgttggaggcagataaccacgtggtgaattgcttgcagccccaccccttcgaccctattctggcatcgagcggtatcgactatgatatcaaaatctggagccccctagaggaatccagaatattcaaccgcaaattggccgatgaggtcatcaccagaaacgagttaatgcttgaggaaacccggaacaccatcacagtgcctgcctcctttatgcttagaatgctggcaagtctcaatcacatcagggctgacaggctggagggagatagatcagagggatctgggcaggagaatgagaatgaagatgaggaatag

SEQ ID NO: 198596 - DNA, 2643 bp, Artificial Sequence
  derived and/or modified sequence
atgagccggggcggcagctacccccacctgctgtgggatgtgaggaagaggagcctgggcctggaggaccccagccggctgcggagccgctacctgggccggcgggagttcatccagaggctgaagctggaggccaccctgaatgtgcatgatggctgtgtgaacaccatctgctggaatgacaccggggagtacatcctgagcggcagtgatgacaccaagctggtgatcagcaacccctacagcaggaaggtgctgaccaccatccgcagcggccaccgggccaacatcttcagcgccaagttcctgccctgcaccaatgacaagcagatcgtgtcctgcagcggagatggagtcatcttctacaccaacgtggagcaggatgctgagaccaaccggcagtgccagttcacctgccactacggcaccacctatgagatcatgacagtgcccaatgacccctacaccttcctgagctgtggggaggatggcaccgtgcgctggtttgacacccgcatcaagaccagctgcaccaaggaggactgcaaggatgacatcctgatcaactgcagaagagctgccacctctgtggccatctgcccccccatcccctactacctggccgtgggctgcagcgacagctctgtgcgcatctatgacaggaggatgctgggcacccgggccactggaaattatgccggccggggcaccaccggcatggtggcccgcttcatccccagccacctgaacaacaagagctgccgggtgaccagcctgtgctacagtgaagatggccaggagatcctggtgtcctacagcagtgactacatctacctgtttgaccccaaggatgacacagcccgggagctgaagacccccagcgctgaggagcggcgggaggagctgcggcagccccctgtgaagaggctgcggctgcggggggactggagcgacaccggcccccgggcccggcctgagagcgagcgggagagagatggagagcagagccccaacgtgtccctgatgcagaggatgtctgacatgctgagccgctggtttgaggaggccagcgaggtggcccagagcaacagaggccggggccgcagccggccccggggcggcaccagccagagcgacatcagcaccctgcccaccgtgcccagcagcccagacctggaggtgtctgaaacagccatggaggtggacaccccagctgagcagttcctgcagcccagcaccagcagcaccatgtctgcccaggcccacagcaccagcagccccacagagagcccccacagcacccccctgctgagcagcccagacagcgagcagaggcagagcgtggaggccagcggccaccacacccaccaccagagcgacagccccagctctgtggtgaacaagcagctgggctccatgagcctggatgagcagcaggacaacaacaatgagaagctgagccccaagccaggcaccggggagcctgtgctgagcctgcactacagcacagagggcaccaccaccagcaccatcaagctgaacttcacagatgagtggagcagcatcgccagcagcagccggggcatcggcagccactgcaagtctgagggccaggaggagagctttgtgccccagagctctgtgcagcccccagagggggacagcgagaccaaggcccctgaggagagcagtgaagatgtgaccaagtaccaggagggcgtgtctgcagaaaatcctgtggagaaccacatcaacatcacccagagcgacaagttcaccgccaagcccctggacagcaacagcggggagagaaatgacctgaacctggacaggagctgtggggtgcctgaggagagcgccagcagcgagaaggccaaggagcctgagaccagtgaccagaccagcacagagagcgccaccaatgaaaacaacaccaaccctgagccccagttccagacagaggccaccggccccagcgcccacgaggagaccagcacccgggacagcgccctgcaggacacagatgacagtgatgatgatcctgtgctgatccctggggcccgctacagagctggccctggggaccggcgctctgctgtggcccgcatccaggagttcttcagaagaaggaaggagaggaaggagatggaggagctggacaccctgaacatcagaagacccctggtgaagatggtgtacaagggccacaggaacagcaggaccatgatcaaggaggccaacttctggggcgccaactttgtgatgagcggcagtgactgtggccacatcttcatctgggacagacacacagctgagcacctgatgctgctggaggccgacaaccacgtggtgaactgcctgcagccccacccctttgaccccatcctggccagcagcggcattgattatgacatcaagatctggagccccctggaggagagccgcatcttcaacaggaagctggctgatgaagtcatcaccagaaatgagctgatgctggaggagaccaggaacaccatcaccgtgcctgccagcttcatgctgaggatgctggccagcctgaaccacatccgggctgaccggctggagggggacagaagtgagggcagcggccaggagaatgaaaatgaagatgaggagtag

SEQ ID NO: 198597 - DNA, 2643 bp, Artificial Sequence
  derived and/or modified sequence
atgagccggggcggcagctacccccacctgctgtgggacgtgcggaagcggtcgctgggactagaggacccttctcggctaagatcccgctacctcggcaggagggaatttattcagcgcctgaagctcgaggccaccctgaacgtgcatgacggatgtgttaatactatctgttggaacgatactggcgagtatattctttcagggagcgacgatacaaaactcgtcatatccaatccctactctagaaaagtcctgacaactattcggtctggtcaccgggcgaacatcttctccgcgaagttcctaccctgtaccaacgataaacagattgtctcatgtagtggagatggagtgattttctatactaacgtagagcaggacgcggaaaccaaccgtcagtgccagtttacttgccattatgggaccacatacgagataatgaccgtgccgaatgatccctacacattcctttcatgtggtgaggacgggacagtcaggtggttcgataccagaataaagaccagttgtacaaaggaagactgcaaagacgatattctcatcaactgcagacgcgccgccacatctgtcgccatctgccccccaatcccttattacctggccgtcggctgctctgattctagtgttcgtatctatgaccgccgcatgctggggacaagagccaccggcaactacgcggggagggggaccacaggcatggttgcccggtttattccctcgcacctgaacaataaatcttgtcgggtaacctctctctgttactccgaagacgggcaggaaattctagtcagttactcatcggactacatctacctctttgatccaaaggatgacactgcccgcgagctgaagactccttcagctgaggagcgtcgagaagaacttaggcagcccccagtgaaaagactccgtctgcgaggcgactggagcgacacaggaccccgagcaagaccagaatctgagagggagagagatggcgaacagagcccaaacgtgtccctcatgcagcgcatgagtgatatgctttctaggtggtttgaggaggccagcgaagttgcgcagagtaaccgggggcgcggacgaagcagaccgaggggtggcacctctcagagcgacatctctactttgcctacagtgccatcatctccagacctggaggtgtccgaaacggcgatggaagtggacacaccggccgaacagttcctgcaacccagcacatcttcgacaatgtcggcccaggcgcactcaactagcagccccaccgagtcacctcactcgactcctctactgtcctcaccagattcagaacagcgccagtctgtggaggccagcggccaccacactcatcaccagagtgactctccatcttccgtggtaaacaaacagttgggttctatgtccctagacgaacagcaggacaacaataacgaaaagctgtctcccaaacccggaacaggagagcccgttcttagtctgcactactccacagagggaactacaactagcacgattaagttgaactttacagatgagtggtcctctatcgctagctccagcagaggcatcgggagccattgcaagagtgagggccaggaagagtcattcgtccctcaatcaagcgttcagccaccagagggagattctgaaaccaaggcaccggaggaatccagcgaagacgtgactaaataccaggagggtgtgagcgctgagaaccccgttgaaaatcacatcaacattacacaatctgacaagtttacggcaaagccattagacagcaactctggggagcgaaacgacctgaatcttgaccgaagctgtggcgtccctgaggagtctgcctcctccgaaaaggcaaaagagccagagacttctgaccagacgtctactgagagcgccacgaatgaaaataatactaacccagagccccagtttcaaaccgaggcaacgggcccaagcgctcatgaggaaacttccacaagggactctgcactacaggataccgacgacagcgatgatgacccagtattgattcccggagcacgctatagggcaggccctggcgatcgacgcagcgccgtcgctcgcatccaggagtttttccgacgaagaaaagagcgaaaagaaatggaagagttggatacactcaatatccgccggcctctggttaaaatggtatacaagggccacaggaatagccgcactatgattaaggaagctaatttctggggggccaattttgtgatgtccggatcagactgtggacacatcttcatttgggatcgacacacggcagagcatctcatgctcttggaagcagacaatcacgtcgttaactgtctgcagccacacccatttgaccccattcttgcgagctccggtattgactacgacattaaaatttggagcccactggaagagagcaggattttcaacaggaaattagccgatgaggtcatcacacggaatgagttaatgctggaggagactaggaacacaatcactgttcccgccagctttatgctgaggatgcttgccagcttaaaccatatccgagctgaccgactcgagggggacagatcagaagggtccggccaagaaaatgaaaatgaggatgaggagtag

SEQ ID NO: 198598 - DNA, 2643 bp, Artificial Sequence
  derived and/or modified sequence
atgtcccgcggagggtcttacccacatttactgtgggacgtgaggaagcggagtctggggctcgaggatccttcccggctgagaagccgttacctgggccgacgcgaattcattcagcggctgaaactggaggcgacgctgaacgtccacgacggctgtgtcaacaccatctgctggaatgatacaggagaatacattctcagtggctccgacgacacaaaactcgttatcagcaatccttattcgcgcaaggtcctgacaaccataagatctggacacagggctaacattttctccgccaagtttctgccttgcaccaacgacaagcagatcgtgagctgctctggggacggagtgatcttctacacgaatgtggagcaagacgccgaaacaaacagacagtgccagttcacgtgtcactacggcactacttacgagattatgacagtgcccaacgatccttatacctttctgtcatgtggggaggatggaacggtacgctggttcgacacccggataaagacatcatgcaccaaagaagactgcaaggacgacattctgataaattgcaggcgggctgcaacctctgtggctatttgcccccctatcccctactatcttgcagtggggtgtagcgacagtagtgtccgcatatatgacagacgcatgctcggcactagggccaccggcaactacgctggacgaggcactacaggcatggttgctagattcattccttcccacctgaacaataaatcctgccgtgttacttccctctgctactccgaggacggacaggaaattctcgtatcttattcctcagactacatctacctcttcgatcccaaggacgacacagccagggagcttaaaaccccctctgccgaggaacgcagggaggaactgaggcagcctcccgtcaagcgcctgcgtttgcgcggtgactggtccgatacaggcccaagggcaagacccgagtccgagagggaaagagacggtgagcagagccctaacgtcagcttaatgcagcggatgtccgacatgttgagccgttggtttgaggaggcttcggaggtcgcacagtcaaatcgtggcagaggaagatcgaggccccgtggcggaacgtcacagtctgacataagcacactgcccactgtcccgagcagtcctgatttagaggtttctgagactgctatggaggtggacaccccggcagagcagtttctgcaaccctctactagttctaccatgtctgcgcaggctcactctacctcctctcccaccgaatctcctcattcaacgccattattgagcagcccagactccgagcaaagacagagcgttgaagcttcgggacaccacacacatcaccagagcgacagcccatcttctgtagttaacaaacagctggggtctatgtcactcgatgagcaacaagacaacaacaatgagaagcttagcccaaagcccggaacaggggagccagtgctcagtctacattatagcacagaaggcacaactacatcaacaataaagctcaacttcacagatgaatggagcagtatcgcctcttcgtcacggggaattggctctcattgcaagtcagaaggccaggaggaatccttcgtgccccagtccagcgttcagccacctgagggcgattctgaaaccaaagccccagaagaaagtagcgaagatgtgacaaagtatcaagagggagtcagcgcagaaaatcctgtggagaatcacataaatattacacagagcgataagtttacggctaaacctctcgattctaattcaggcgaaagaaatgacctaaacctcgacaggtcctgcggagtgcctgaagagtctgcaagttccgaaaaggccaaggagcccgaaacgtctgaccaaacctcgaccgaatctgcgaccaatgaaaacaataccaatcccgagcctcaattccagacagaagctaccggaccctccgctcacgaagagacttccacacgcgacagcgctctgcaggatacagacgactccgacgatgacccagtgttgatacctggcgcacggtaccgcgctggtccaggggaccgcaggagcgcagtggccaggatccaagagttttttagacggagaaaggagcggaaagaaatggaagagttagataccttgaacattagacgccctttggtcaagatggtttacaagggacatcgaaactcccgaactatgatcaaggaagctaatttctggggggctaacttcgtgatgagcggttcagattgcggccacatctttatttgggatcggcatactgcagaacacctgatgctgctggaagccgacaaccacgtggtgaattgcctgcaaccccacccattcgatcccattttggccagcagtggcatcgactacgatatcaagatatggtcccctctcgaggagagtcggatctttaatcgcaagttggcagatgaggtgattacacggaacgagctgatgctggaggagacccggaacaccataaccgtgcccgctagctttatgctaagaatgttagcatctttgaaccacatccgtgcagatcggctggaaggagatagatccgaaggctcaggtcaggagaatgagaatgaggacgaggagtag

SEQ ID NO: 198599 - DNA, 3302 bp, Artificial Sequence
  derived and/or modified sequence
gaggagactgttgctgatctttggatgttctggttagtctaagaaggagagtatgaggcgagctccggcccgggtgcggccgggcttcaggggcccaggcgccgctgctgccaccgccatctaacgctgcgccctggaggcccggcgcgcggatggtgccggtgcggctcgggtgttgaaacgggtgtcccctccccctcctcccctcccccacgcggtggtctcccctcccacccggctcaggcagagccatgtctcggggtggctcctacccacacctgttgtgggacgtgaggaaaaggtccctcgggctggaggacccgtcccggctgcggagtcgatacctgggaagaagagaatttatccaaagattaaaacttgaagcaacccttaatgtgcatgatggttgtgttaatacaatctgttggaatgacactggagaatatattttatctggctcagatgacaccaaattagtaattagtaatccttacagcagaaaggttttgacaacaattcgttcagggcaccgagcaaacatatttagtgcaaagttcttaccttgtacaaatgataaacagattgtatcctgctctggagatggagtaatattttataccaacgttgagcaagatgcagaaaccaacagacaatgccaatttacgtgtcattatggaactacttatgagattatgactgtacccaatgacccttacacttttctctcttgtggtgaagatggaactgttaggtggtttgatacacgcatcaaaactagctgcacaaaagaagattgtaaagatgatattttaattaactgtcgacgtgctgccacgtctgttgctatttgcccaccaataccatattaccttgctgttggttgttctgacagctcagtacgaatatatgatcggcgaatgctgggcacaagagctacagggaattatgcaggtcgagggactactggaatggttgcccgttttattccttcccatcttaataataagtcctgcagagtgacatctctgtgttacagtgaagatggtcaagagattctcgttagttactcttcagattacatatatctttttgacccgaaagatgatacagcacgagaacttaaaactccttctgcggaagagagaagagaagagttgcgacaaccaccagttaagcgtttgagacttcgtggtgattggtcagatactggacccagagcaaggccggagagtgaacgagaacgagatggagagcagagtcccaatgtgtcattgatgcagagaatgtctgatatgttatcaagatggtttgaagaagcaagtgaggttgcacaaagcaatagaggacgaggaagatctcgacccagaggtggaacaagtcaatcagatatttcaactcttcctacggtcccatcaagtcctgatttggaagtgagtgaaactgcaatggaagtagatactccagctgaacaatttcttcagccttctacatcctctacaatgtcagctcaggctcattcgacatcatctcccacagaaagccctcattctactcctttgctatcttctccagacagtgaacaaaggcagtctgttgaggcatctggacaccacacacatcatcagtctgattctccttcttctgtggttaacaaacagctcggatccatgtcacttgacgagcaacaggataacaataatgaaaagctgagccccaaaccagggacaggtgaaccagttttaagtttgcactacagcacagaaggaacaactacaagcacaataaaactgaactttacagatgaatggagcagtatagcatcaagttctagaggaattgggagccattgcaaatctgagggtcaggaggaatctttcgtcccacagagctcagtgcaaccaccagaaggagacagtgaaacaaaagctcctgaagaatcatcagaggatgtgacaaaatatcaggaaggagtatctgcagaaaacccagttgagaaccatatcaatataacacaatcagataagttcacagccaagccattggattccaactcaggagaaagaaatgacctcaatcttgatcgctcttgtggggttccagaagaatctgcttcatctgaaaaagccaaggaaccagaaacttcagatcagactagcactgagagtgctaccaatgaaaataacaccaatcctgagcctcagttccaaacagaagccactgggccttcagctcatgaagaaacatccaccagggactctgctcttcaggacacagatgacagtgatgatgacccagtcctgatcccaggtgcaaggtatcgagcaggacctggtgatagacgctctgctgttgcccgtattcaggagttcttcagacggagaaaagaaaggaaagaaatggaagaattggatactttgaacattagaaggccgctagtaaaaatggtttataaaggccatcgcaactccaggacaatgataaaagaagccaatttctggggtgctaactttgtaatgagtggttctgactgtggccacattttcatctgggatcggcacactgctgagcatttgatgcttctggaagctgataatcatgtggtaaactgcctgcagccacatccgtttgacccaattttagcctcatctggcatagattatgacataaagatctggtcaccattagaagagtcaaggatttttaaccgaaaacttgctgatgaagttataactcgaaacgaactcatgctggaagaaactagaaacaccattacagttccagcctctttcatgttgaggatgttggcttcacttaatcatatccgagctgaccggttggagggtgacagatcagaaggctctggtcaagagaatgaaaatgaggatgaggaataataaactctttttggcaagcacttaaatgttctgaaatttgtataagacatttattatatttttttctttacagagctttagtgcaattttaaggttatggtttttggagtttttccctttttttgggataacctaacattggtttggaatgattgtgtgcatgaatttgggagattgtataaaacaaaactagcagaatgtttttaaaactttttgccgtgtatgaggagtgctagaaaatgcaaagtgcaatattttccctaaccttcaaatgtgggagcttggatcaatgttgaagaataattttcatcatagtgaaaatgttggttcaaataaatttctacacttgccatttgcatgtttgttgctttctaattaaagaaactggttgttttaagataccctgaa

SEQ ID NO: 198600 - DNA, 2643 bp, Artificial Sequence
  derived and/or modified sequence
atgagcagaggcggcagctacccccacctgctgtgggacgtgagaaagagaagcctgggcctggaggaccccagcagactgagaagcagatacctgggcagaagagagttcatccagagactgaagctggaggccaccctgaacgtgcacgacggctgcgtgaacaccatctgctggaacgacaccggcgagtacatcctgagcggcagcgacgacaccaagctggtgatcagcaacccctacagcagaaaggtgctgaccaccatcagaagcggccacagagccaacatcttcagcgccaagttcctgccctgcaccaacgacaagcagatcgtgagctgcagcggcgacggcgtgatcttctacaccaacgtggagcaggacgccgagaccaacagacagtgccagttcacctgccactacggcaccacctacgagatcatgaccgtgcccaacgacccctacaccttcctgagctgcggcgaggacggcaccgtgagatggttcgacaccagaatcaagaccagctgcaccaaggaggactgcaaggacgacatcctgatcaactgcagaagagccgccaccagcgtggccatctgcccccccatcccctactacctggccgtgggctgcagcgacagcagcgtgagaatctacgacagaagaatgctgggcaccagagccaccggcaactacgccggcagaggcaccaccggcatggtggccagattcatccccagccacctgaacaacaagagctgcagagtgaccagcctgtgctacagcgaggacggccaggagatcctggtgagctacagcagcgactacatctacctgttcgaccccaaggacgacaccgccagagagctgaagacccccagcgccgaggagagaagagaggagctgagacagccccccgtgaagagactgagactgagaggcgactggagcgacaccggccccagagccagacccgagagcgagagagagagagacggcgagcagagccccaacgtgagcctgatgcagagaatgagcgacatgctgagcagatggttcgaggaggccagcgaggtggcccagagcaacagaggcagaggcagaagcagacccagaggcggcaccagccagagcgacatcagcaccctgcccaccgtgcccagcagccccgacctggaggtgagcgagaccgccatggaggtggacacccccgccgagcagttcctgcagcccagcaccagcagcaccatgagcgcccaggcccacagcaccagcagccccaccgagagcccccacagcacccccctgctgagcagccccgacagcgagcagagacagagcgtggaggccagcggccaccacacccaccaccagagcgacagccccagcagcgtggtgaacaagcagctgggcagcatgagcctggacgagcagcaggacaacaacaacgagaagctgagccccaagcccggcaccggcgagcccgtgctgagcctgcactacagcaccgagggcaccaccaccagcaccatcaagctgaacttcaccgacgagtggagcagcatcgccagcagcagcagaggcatcggcagccactgcaagagcgagggccaggaggagagcttcgtgccccagagcagcgtgcagccccccgagggcgacagcgagaccaaggcccccgaggagagcagcgaggacgtgaccaagtaccaggagggcgtgagcgccgagaaccccgtggagaaccacatcaacatcacccagagcgacaagttcaccgccaagcccctggacagcaacagcggcgagagaaacgacctgaacctggacagaagctgcggcgtgcccgaggagagcgccagcagcgagaaggccaaggagcccgagaccagcgaccagaccagcaccgagagcgccaccaacgagaacaacaccaaccccgagccccagttccagaccgaggccaccggccccagcgcccacgaggagaccagcaccagagacagcgccctgcaggacaccgacgacagcgacgacgaccccgtgctgatccccggcgccagatacagagccggccccggcgacagaagaagcgccgtggccagaatccaggagttcttcagaagaagaaaggagagaaaggagatggaggagctggacaccctgaacatcagaagacccctggtgaagatggtgtacaagggccacagaaacagcagaaccatgatcaaggaggccaacttctggggcgccaacttcgtgatgagcggcagcgactgcggccacatcttcatctgggacagacacaccgccgagcacctgatgctgctggaggccgacaaccacgtggtgaactgcctgcagccccaccccttcgaccccatcctggccagcagcggcatcgactacgacatcaagatctggagccccctggaggagagcagaatcttcaacagaaagctggccgacgaggtgatcaccagaaacgagctgatgctggaggagaccagaaacaccatcaccgtgcccgccagcttcatgctgagaatgctggccagcctgaaccacatcagagccgacagactggagggcgacagaagcgagggcagcggccaggagaacgagaacgaggacgaggagtag

SEQ ID NO: 198601 - protein, 189 aa, Artificial Sequence
  derived and/or modified sequence
MERQEESLSARPALETEGLRFLHTTVGSLLATYGWYIVFSCILLYVVFQKLSARLRALRQRQLDRAAAAVEPDVVVKRQEALAAARLKMQEELNAQVEKHKEKLKQLEEEKRRQKIEMWDSMQEGKSYKGNAKKPQEEDSPGPSTSSVLKRKSDRKPLRGGGYNPLSGEGGGACSWRPGRRGPSSGGCG

SEQ ID NO: 198602 - protein, 261 aa, Artificial Sequence
  derived and/or modified sequence
MAGPELLLDSNIRLWVVLPIVIITFFVGMIRHYVSILLQSDKKLTQEQVSDSQVLIRSRVLRENGKYIPKQSFLTRKYYFNNPEDGFFKKTKRKVVPPSPMTDPTMLTDMMKGNVTNVLPMILIGGWINMTFSGFVTTKVPFPLTLRFKPMLQQGIELLTLDASWVSSASWYFLNVFGLRSIYSLILGQDNAADQSRMMQEQMTGAAMAMPADTNKAFKTEWEALELTDHQWALDDVEEELMAKDLHFEGMFKKELQTSIF

SEQ ID NO: 198603 - protein, 203 aa, Artificial Sequence
  derived and/or modified sequence
MAGPELLLDSNIRLWVVLPIVIITFFVGMIRHYVSILLQSDKKLTQEQVSDRKYLSGLVQWLTPIIPALWGAEMGGSLEPRNLRPTLAACQVLIRSRVLRENGKYIPKQSFLTRKYYFNNPEDGFFKKTKRKVVPPSPMTDPTMLTDMMKGNVTNVLPMILIGGWINMTFSGFVTTKVPFPLTLRFKPMLQQGIELLTLDASW

SEQ ID NO: 198604 - DNA, 786 bp, Artificial Sequence
  derived and/or modified sequence
atggccggccccgagctgctgctggacagcaacatcagactgtgggtggtgctgcccatcgtgatcatcaccttcttcgtgggcatgatcagacactacgtgagcatcctgctgcagagcgacaagaagctgacccaggagcaggtgagcgacagccaggtgctgatcagaagcagagtgctgagagagaacggcaagtacatccccaagcagagcttcctgaccagaaagtactacttcaacaaccccgaggacggcttcttcaagaagaccaagagaaaggtggtgccccccagccccatgaccgaccccaccatgctgaccgacatgatgaagggcaacgtgaccaacgtgctgcccatgatcctgatcggcggctggatcaacatgaccttcagcggcttcgtgaccaccaaggtgcccttccccctgaccctgagattcaagcccatgctgcagcagggcatcgagctgctgaccctggacgccagctgggtgagcagcgccagctggtacttcctgaacgtgttcggcctgagaagcatctacagcctgatcctgggccaggacaacgccgccgaccagagcagaatgatgcaggagcagatgaccggcgccgccatggccatgcccgccgacaccaacaaggccttcaagaccgagtgggaggccctggagctgaccgaccaccagtgggccctggacgacgtggaggaggagctgatggccaaggacctgcacttcgagggcatgttcaagaaggagctgcagaccagcatcttctag

SEQ ID NO: 198605 - DNA, 612 bp, Artificial Sequence
  derived and/or modified sequence
atggccggccccgagctgctgctggacagcaacatcagactgtgggtggtgctgcccatcgtgatcatcaccttcttcgtgggcatgatcagacactacgtgagcatcctgctgcagagcgacaagaagctgacccaggagcaggtgagcgacagaaagtacctgagcggcctggtgcagtggctgacccccatcatccccgccctgtggggcgccgagatgggcggcagcctggagcccagaaacctgagacccaccctggccgcctgccaggtgctgatcagaagcagagtgctgagagagaacggcaagtacatccccaagcagagcttcctgaccagaaagtactacttcaacaaccccgaggacggcttcttcaagaagaccaagagaaaggtggtgccccccagccccatgaccgaccccaccatgctgaccgacatgatgaagggcaacgtgaccaacgtgctgcccatgatcctgatcggcggctggatcaacatgaccttcagcggcttcgtgaccaccaaggtgcccttccccctgaccctgagattcaagcccatgctgcagcagggcatcgagctgctgaccctggacgccagctggtag

SEQ ID NO: 198606 - DNA, 786 bp, Artificial Sequence
  derived and/or modified sequence
atggctggtccagagctcctgttggactctaacattcgactgtgggtagttcttcccatagtgatcatcaccttctttgtgggcatgatccgccattatgtttcaattctcttgcagtccgataaaaaacttacacaggaacaggtcagcgacagtcaggtgctgatacggagcagagttttgcgggaaaatggtaaatatatcccgaagcaatcatttctgacacgtaaatactacttcaataatcctgaggacggcttttttaaaaagacaaagcgcaaggtcgtgccaccctcacccatgaccgatcctactatgctgacagacatgatgaaaggcaacgtgaccaacgtgctgcccatgatacttatcggcggctggatcaatatgacttttagcggctttgtcactacaaaagtcccctttcccctcactttaaggttcaaacccatgctgcagcagggcatagaattgctgaccttggacgcgtcttgggtgagctcggcttcatggtacttcctgaacgtattcggactcaggtcaatctatagcctgatcttggggcaggataatgctgccgatcaaagccggatgatgcaggaacaaatgacaggagcagccatggccatgccagcggataccaataaggctttcaagactgagtgggaagccttggaacttacggatcaccagtgggccctggacgacgtggaagaagaattaatggccaaagatctgcatttcgaggggatgtttaaaaaggaactgcagacctctattttctag

SEQ ID NO: 198607 - DNA, 612 bp, Artificial Sequence
  derived and/or modified sequence
atggcagggccagagctgctactggattccaatatccgactgtgggtggtcctgccaattgtcatcatcacatttttcgtcggaatgattcgccattacgtaagcatattgttacagtcagacaaaaagctcacgcaagagcaggtatcagaccgcaagtatctctccggcctcgtccagtggctgacacccataattcccgccctctggggggctgagatgggcgggtctctggagccccgaaaccttcggccaactttagctgcgtgccaagtcttaattcgctcacgggtgctgcgagaaaatgggaaatacattcctaagcagagctttttgactcgaaagtattatttcaataaccccgaggacggattcttcaaaaaaaccaaaagaaaggtagtgcctcccagtcccatgactgatcctaccatgcttaccgacatgatgaagggcaatgtcacaaatgtgctgcctatgattttgattggaggctggattaatatgaccttctcaggttttgttactacaaaagtaccttttccactaacattacggttcaagcctatgctccagcagggaatagagctgctgacgctggacgcttcgtggtag

SEQ ID NO: 198608 - DNA, 786 bp, Artificial Sequence
  derived and/or modified sequence
atggccggccctgagctgctgctggacagcaacatccggctgtgggtggtgctgcccatcgtcatcatcaccttctttgtgggcatgatccgccactacgtgtccatcctgctgcagagcgacaagaagctgacccaggagcaggtgtctgacagccaggtgctgatccgcagccgggtgctgagagaaaatggcaagtacatccccaagcagagcttcctgaccaggaagtactacttcaacaacccagaagatggcttcttcaagaagaccaagaggaaggtggtgccccccagccccatgacagaccccaccatgctgacagacatgatgaagggaaatgtgaccaacgtgctgcccatgatcctgattggaggctggatcaacatgaccttcagcggctttgtgaccaccaaggtgcccttccccctgaccctgcgcttcaagcccatgctgcagcagggcatcgagctgctgaccctggatgcctcctgggtgagcagcgcctcctggtacttcctgaatgtgtttggcctgcggagcatctacagcctcatcctgggccaggacaatgctgctgaccagagcaggatgatgcaggagcagatgaccggggccgccatggccatgcctgctgacaccaacaaggccttcaagacagagtgggaggccctggagctgacagaccaccagtgggccctggatgatgtggaggaggagctgatggccaaggacctgcactttgagggcatgttcaagaaggagctgcagaccagcatcttctag

SEQ ID NO: 198609 - DNA, 612 bp, Artificial Sequence
  derived and/or modified sequence
atggccggccctgagctgctgctggacagcaacatccggctgtgggtggtgctgcccatcgtcatcatcaccttctttgtgggcatgatccgccactacgtgtccatcctgctgcagagcgacaagaagctgacccaggagcaggtgtctgacaggaagtacctgagcggcctggtgcagtggctgacccccatcatcccagccctgtggggcgctgagatgggcggcagcctggagcccaggaacctgcggcccaccctggccgcctgccaggtgctgatccgcagccgggtgctgagagaaaatggcaagtacatccccaagcagagcttcctgaccaggaagtactacttcaacaacccagaagatggcttcttcaagaagaccaagaggaaggtggtgccccccagccccatgacagaccccaccatgctgacagacatgatgaagggaaatgtgaccaacgtgctgcccatgatcctgattggaggctggatcaacatgaccttcagcggctttgtgaccaccaaggtgcccttccccctgaccctgcgcttcaagcccatgctgcagcagggcatcgagctgctgaccctggatgcctcctggtag

SEQ ID NO: 198610 - DNA, 786 bp, Artificial Sequence
  derived and/or modified sequence
atggccggccccgagctgctgctggacagcaacatccggctgtgggtcgtgctacctatcgtgatcatcacttttttcgtggggatgatcagacactacgtgagcatcttactgcaatccgacaaaaagctgacacaagagcaagtctcagattcccaagtcctgatccgaagccgggtcttaagggagaatggcaaatacatccccaagcagagctttctgacccgcaagtactacttcaataatccggaagacggattctttaagaaaactaagagaaaggtggttcctccaagccccatgacagatccaacaatgctgacggacatgatgaagggcaatgtgacgaacgttctacccatgatcctcatcggcggttggataaatatgacattcagcgggttcgtgactaccaaagtgccctttcccctgactctgagattcaagccgatgctgcagcagggcatcgagctacttactctagacgcatcatgggtttcctcagcctcatggtacttcctcaacgtattcggcctgcgatccatctattccttaatcctgggccaggataatgcagctgatcagtcacgaatgatgcaggaacaaatgaccggggccgccatggctatgccagccgacactaataaggccttcaaaacagagtgggaggcccttgaactcaccgaccaccaatgggccttagacgatgtagaggaagagttgatggctaaggatttacacttcgagggcatgttcaagaaggaactgcagactagtatcttctag

SEQ ID NO: 198611 - DNA, 612 bp, Artificial Sequence
  derived and/or modified sequence
atggccggccccgagctgctgctggacagcaacatccggctgtgggttgtgctgcctattgtgattattacattttttgtgggaatgatacgccactacgtcagtatcttgctgcaaagcgataagaaactgacccaggagcaagtgtcagatcgcaaatatctatccggcctggtccagtggctcacgcctatcatcccagccctgtggggagcagaaatgggcggttccctggagccacgcaatctaaggccaaccttggcagcgtgccaggttctgatcaggagccgcgtgttgcgcgaaaacggcaaatatattcctaaacagagttttctgaccagaaagtactattttaacaacccagaggacggcttcttcaaaaagacaaagagaaaggtagtccccccatcgcctatgacagaccccaccatgcttacagatatgatgaaaggtaatgtcacgaacgtgctgccgatgattttaattggaggttggattaacatgactttcagcgggtttgttacgaccaaggtaccctttccacttacacttagattcaagcccatgttacagcaaggcatcgaactgctgactctggatgcatcctggtag

SEQ ID NO: 198612 - DNA, 786 bp, Artificial Sequence
  derived and/or modified sequence
atggcagggcctgaacttctgttggacagcaatatccgactctgggtggtcctgccgattgttataattacgttttttgtgggcatgattagacactacgtctccattctgcttcagtccgataagaaattaacgcaagaacaggttagcgactcccaggtgctcatacggagtagggtcctccgggaaaatggcaagtacatcccaaaacagtcgtttttgacccggaaatactatttcaataatcctgaagatgggttcttcaagaaaaccaagagaaaagttgtgcctccatccccgatgacagaccctaccatgctgactgatatgatgaaaggaaacgtgacaaatgtacttccaatgattctaatcggtggatggattaacatgacattcagtggattcgtgactaccaaggtgccgtttcctctcactctccgatttaaaccgatgctgcaacagggaatcgaactactgacgctggacgcctcctgggtctcttctgcttcttggtacttcctcaacgttttcggacttcgatcgatctacagcctgattctggggcaggataacgctgctgatcagtcacgtatgatgcaagaacagatgactggcgctgcgatggccatgccagccgatactaacaaagctttcaagacagaatgggaagccttagaactgacggaccaccagtgggctttagatgatgtggaagaggagctgatggccaaagatcttcactttgaggggatgttcaaaaaggagctgcagaccagcatattctag

SEQ ID NO: 198613 - DNA, 612 bp, Artificial Sequence
  derived and/or modified sequence
atggctgggccagagctcctactggattctaatatcagactgtgggttgtgctgccgattgtgattataacgtttttcgtggggatgatcagacactacgtgagcatactgcttcagtccgataagaaacttacacaagagcaagtgagcgatagaaagtatcttagcggtttggttcagtggctgactcccatcattcccgctttatggggagctgaaatggggggatctctagaaccgaggaatctgcgccctactctggctgcgtgtcaagtcctgatacgctctcgcgtcttacgtgagaatggaaagtacatcccaaagcagagctttctgactcgcaagtactacttcaataaccccgaggacgggttcttcaaaaagactaagcgtaaagttgtaccaccaagtcccatgacagaccctaccatgctgaccgacatgatgaaaggaaatgtcacgaacgtccttcctatgatcttgataggtgggtggattaatatgacgtttagcggcttcgtgacgacaaaagtcccctttccgcttacgcttaggttcaaaccaatgctgcaacagggaatcgagctattgactcttgatgcaagctggtag

SEQ ID NO: 198614 - DNA, 2777 bp, Artificial Sequence
  derived and/or modified sequence
tgcctcagcctcccgagtagctgcgactacaggcgcctccaccacgcctggctaatttttttgtatttttagtagagacagggtttcacctgttagccaggatggtctcgatcccctgacctcgtgatccccccaccttggcctcccaaagtgctgggattccaggagtgagccaccgagcctgggccaccgccgatagttttccactttcccgccaggcccgacgccgctctgacgccactgaggtgcgccacgacgtgacgtcaacgttcgcgccggaagtggaagaccaggcagcccagctgaaggcagtaagctcggctcacagtcgcaggagagttctggggtacacgggcaaaggggcttgagaaggcccggaggcgaagccgaagagaagcaactgtgccccggagaagagaagctcgcccattccagactgggaaccagctttcagtgaagatggcagggccagaactgttgctcgactccaacatccgcctctgggtggtcctacccatcgttatcatcactttcttcgtaggcatgatccgccactacgtgtccatcctgctgcagagcgacaagaagctcacccaggaacaagtatctgacagtcaagtcctaattcgaagcagagtcctcagggaaaatggaaaatacattcccaaacagtctttcttgacacgaaaatattatttcaacaacccagaggatggatttttcaaaaaaactaaacggaaggtagtgccaccttctcctatgactgatcctactatgttgacagacatgatgaaagggaatgtaacaaatgtcctccctatgattcttattggtggatggatcaacatgacattctcaggctttgtcacaaccaaggtcccatttccactgaccctccgttttaagcctatgttacagcaaggaatcgagctactcacattagatgcatcctgggtgagttctgcatcctggtacttcctcaatgtatttgggcttcggagcatttactctctgattctgggccaagataatgccgctgaccaatcacgaatgatgcaggagcagatgacgggagcagccatggccatgcccgcagacacaaacaaagctttcaagacagagtgggaagctttggagctgacggatcaccagtgggcactagatgatgtcgaagaagagctcatggccaaagacctccacttcgaaggcatgttcaaaaaggaattacagacctctattttttgaagaccgagcagggattagctgtgtcaggaacttggagttgcacttaaccttgtaactttgtttggagctggcacctcttgaaataaaaaggaggatgcacgagctggcaggcatgcagcaaggcttgttcttgtctgggctgggttcccctttatgtttgaaactagaggaaataggagtatgctgggcaacttgttatttttaaaatgttgtaaatgttccttctggtgactctagtaatgaaagtcagagaaagggggaaacctcaggctactgataatatataaaatcttggccaggcgcagtggctcacgcctgtaatcccaggattttgggaggctgaggcgggtgggtcacgagatcaggagttcaagatcagcctggccaagatggtgaaaccccatctctactaaaaatacaaaaaaaaattagccgggcgtggtggtgggcacctgtaatcccagctacttgggaggctgaggcagagaactgcttaaacctaggaggcggaggatgcagtgagctgacatcgtgccactgcgctccagcctgggcgacagagcaaaactccatctgaaaaaaaaaaaaaaatatatatatatatatatatatatctatcttagcagaagcccagtcttcgaaggaagcattgttaattatagctaatgattatgtgcagtcagcctgacatctagccacagtaaactcctgttttcttgggatccaaacaccctgtgttttaccattagttttgttagtattgttaactttctttacacaagtaaaccatttccactaccaaaggtttagaaactatggatgaacaaaatgaatctccctgttcattttgagcctacatagacatagagaccaaatatgtcaaaaccttattcaaataaactctcttcagagtgaatacccagggtcaggacagactcagcaaaccttctatatcacttaattctgcccagtgaaaatcagtgaccctgaggcactgccagattctaaagtgcctttgggatcatcagagactgtctataaataatgcaaaatcttgatctggatgtcagtgtatcaaatcttatcaaatccattgacaaatcagtggtgctatactggaaatggctactcctttggatgaaggacctcatttcccagttgcttggaacaaaagagaatttacatattgctgtaagaagggagagacggcagttgttggtagacacacagataagggtgcccaagaataattctgtctggattaaaggtcccagggaagtgacggtgccatttctgtaccaagaggtgaatataatttgcatgttgagtgcagtaattaagaacaaacgactcgactccacaaattaaaccgtcctgttttctcttctttgcctgtgaaagtgttgcctctgtaagtcactaacaaccttctgccagcagttgactgtctatcttggatcagtgcggggagtctaagacgaaagagatgtgaaccttgccctcaactcacaagagagagacacctaagagct

SEQ ID NO: 198615 - DNA, 751 bp, Artificial Sequence
  derived and/or modified sequence
gggaaccagctttcagtgaagatggcagggccagaactgttgctcgactccaacatccgcctctgggtggtcctacccatcgttatcatcactttcttcgtaggcatgatccgccactacgtgtccatcctgctgcagagcgacaagaagctcacccaggaacaagtatctgacagaaaatatctttcaggcctggtgcaatggctcacacctataatcccagcactttggggggctgagatgggaggatcccttgagcccaggaatttgagaccaaccttggcagcatgtcaagtcctaattcgaagcagagtcctcagggaaaatggaaaatacattcccaaacagtctttcttgacacgaaaatattatttcaacaacccagaggatggatttttcaaaaaaactaaacggaaggtagtgccaccttctcctatgactgatcctactatgttgacagacatgatgaaagggaatgtaacaaatgtcctccctatgattcttattggtggatggatcaacatgacattctcaggctttgtcacaaccaaggtcccatttccactgaccctccgttttaagcctatgttacagcaaggaatcgagctactcacattagatgcatcctggtaagaactttcttttgtttaataaaaacacaaaccacactttgggaagccaaggcgggaggatcacttgagcccatgagtttgagaccagcctgggcaacagagtaagaccctgtctcaag

SEQ ID NO: 198616 - protein, 1230 aa, Artificial Sequence
  derived and/or modified sequence
MASASYHISNLLEKMTSSDKDFRFMATNDLMTELQKDSIKLDDDSERKVVKMILKLLEDKNGEVQNLAVKCLGPLVSKVKEYQVETIVDTLCTNMLSDKEQLRDISSIGLKTVIGELPPASSGSALAANVCKKITGRLTSAIAKQEDVSVQLEALDIMADMLSRQGGLLVNFHPSILTCLLPQLTSPRLAVRKRTIIALGHLVMSCGNIVFVDLIEHLLSELSKNDSMSTTRTYIQCIAAISRQAGHRIGEYLEKIIPLVVKFCNVDDDELREYCIQAFESFVRRCPKEVYPHVSTIINICLKYLTYDPNYNYDDEDEDENAMDADGGDDDDQGSDDEYSDDDDMSWKVRRAAAKCLDAVVSTRHEMLPEFYKTVSPALISRFKEREENVKADVFHAYLSLLKQTRPVQSWLCDPDAMEQGETPLTMLQSQVPNIVKALHKQMKEKSVKTRQCCFNMLTELVNVLPGALTQHIPVLVPGIIFSLNDKSSSSNLKIDALSCLYVILCNHSPQVFHPHVQALVPPVVACVGDPFYKITSEALLVTQQLVKVIRPLDQPSSFDATPYIKDLFTCTIKRLKAADIDQEVKERAISCMGQIICNLGDNLGSDLPNTLQIFLERLKNEITRLTTVKALTLIAGSPLKIDLRPVLGEGVPILASFLRKNQRALKLGTLSALDILIKNYSDSLTAAMIDAVLDELPPLISESDMHVSQMAISFLTTLAKVYPSSLSKISGSILNELIGLVRSPLLQGGALSAMLDFFQALVVTGTNNLGYMDLLRMLTGPVYSQSTALTHKQSYYSIAKCVAALTRACPKEGPAVVGQFIQDVKNSRSTDSIRLLALLSLGEVGHHIDLSGQLELKSVILEAFSSPSEEVKSAASYALGSISVGNLPEYLPFVLQEITSQPKRQYLLLHSLKEIISSASVVGLKPYVENIWALLLKHCECAEEGTRNVVAECLGKLTLIDPETLLPRLKGYLISGSSYARSSVVTAVKFTISDHPQPIDPLLKNCIGDFLKTLEDPDLNVRRVALVTFNSAAHNKPSLIRDLLDTVLPHLYNETKVRKELIREVEMGPFKHTVDDGLDIRKAAFECMYTLLDSCLDRLDIFEFLNHVEDGLKDHYDIKMLTFLMLVRLSTLCPSAVLQRLDRLVEPLRATCTTKVKANSVKQEFEKQDELKRSAMRAVAALLTIPEAEKSPLMSEFQSQISSNPELAAIFESIQKDSSSTNLESMDTS

SEQ ID NO: 198617 - protein, 402 aa, Artificial Sequence
  derived and/or modified sequence
YELVSRQGGLLVNFHPSILTCLLPQLTSPRLAVRKRTIIALGHLVMSCGNIVFVDLIEHLLSELSKNDSMSTTRTYIQCIAAISRQAGHRIGEYLEKIIPLVVKFCNVDDDELREYCIQAFESFVRRCPKEVYPHVSTIINICLKYLTYDPNYNYDDEDEDENAMDADGGDDDDQGSDDEYSDDDDMSWKVRRAAAKCLDAVVSTRHEMLPEFYKTVSPALISRFKEREENVKADVFHAYLSLLKQTRPVQSWLCDPDAMEQGETPLTMLQSQVPNIVKALHKQMKEKSVKTRQCCFNMLTELVNVLPGALTQHIPVLVPGIIFSLNDKSSSSNLKIDALSCLYVILCNHSPQVFHPHVQALVPPVVACVGDPFYKITSEALLVTQQLVKAHHMPEAQWLRL

SEQ ID NO: 198618 - DNA, 5956 bp, Artificial Sequence
  derived and/or modified sequence
gtgaactctgaccttagctttccgtagcgcccgcgtctgccgcccccgcccccggagcgaaggaggcgggctttggccttttgccctagggagcgagtgcggagcgagtgggagcgagacggccctgagtggaagtgtctggctccccgtagaggcccttctgtacgccccgccgcccatgagctcgttctcacgcgaacagcgccgtcgttaggctggctctgtagcctcggcttaccccgggacaggcccacgcctcgccagggagggggcagcccgtcgaggcgcctccctagtcagcgtcggcgtcgcgctgcgaccctggaagcgggagccgccgcgagcgagaggaggagctccagtggcggcggcggcggcggcagcggcagcgggcagcagctccagcagcgccagcaggcgggatcgaggccgtcaacatggcgagcgcctcgtaccacatttccaatttgctggaaaaaatgacatccagcgacaaggactttaggtttatggctacaaatgatttgatgacggaactgcagaaagattccatcaagttggatgatgatagtgaaaggaaagtagtgaaaatgattttgaagttattggaagataaaaatggagaggtacagaatttagctgtcaaatgtcttggtcctttagtgagtaaagtgaaagaataccaagtagagacaattgtagataccctctgcactaacatgctttctgataaagaacaacttcgagacatttcaagtattggtcttaaaacagtaattggagaacttcctccagcttccagtggctctgcattagctgctaatgtatgtaaaaagattactggacgtcttacaagtgcaatagcaaaacaggaagatgtctctgttcagctagaagccttggatattatggctgatatgttgagcaggcaaggaggacttcttgttaatttccatccttcaattctgacctgtctacttccccagttgaccagccctagacttgcagtgaggaaaagaaccattatcgctcttggccatctggttatgagctgtggaaatatagtttttgtagatcttattgaacatctgttgtcagagttgtccaaaaatgattctatgtcaacaacaagaacctacatacaatgtattgctgctattagtaggcaagctggtcatagaataggtgaataccttgagaagataattcctttggtggtaaaattttgcaatgtagatgatgatgaattaagagagtactgtattcaagcctttgaatcatttgtaagaagatgtcctaaggaagtatatcctcatgtttctaccattataaatatttgtcttaaatatcttacctatgatccaaattataattacgatgatgaagatgaagatgaaaatgcaatggatgctgatggtggtgatgatgatgatcaagggagtgatgatgaatacagtgatgatgatgacatgagttggaaagtgagacgtgcagctgcgaagtgcttggatgctgtagttagcacaaggcatgaaatgcttccagaattctacaagaccgtctctcctgcactaatatccagatttaaagagcgtgaagagaatgtaaaggcagatgtttttcacgcatacctttctcttttgaagcaaactcgtcctgtacaaagttggctatgtgaccctgatgcaatggagcagggagaaacacctttaacaatgcttcagagtcaggttcccaacattgttaaagctcttcacaaacagatgaaagaaaaaagtgtgaagacccgacagtgttgttttaacatgttaactgagctggtaaatgtattacctggggccctaactcaacacattcctgtacttgtaccaggaatcattttctcactgaatgataaatcaagctcatcgaatttgaagatcgatgctttgtcatgtctatacgtaatcctctgtaaccattctcctcaagtcttccatcctcacgttcaggctttggttcctccagtggtggcttgtgttggagacccattttacaaaattacatctgaagcacttcttgttactcaacagcttgtcaaagtaattcgtcctttagatcagccttcctcgtttgatgcaactccttatatcaaagatctatttacctgtaccattaagagattaaaagcagctgacattgatcaggaagtcaaggaaagggctatttcctgtatgggacaaattatttgcaaccttggagacaatttgggttctgacttgcctaatacacttcagattttcttggagagactaaagaatgaaattaccaggttaactacagtaaaggcattgacactgattgctgggtcacctttgaagatagatttgaggcctgttctgggagaaggggttcctatccttgcttcatttcttagaaaaaaccagagagctttgaaactgggtactctttctgcccttgatattctaataaaaaactatagtgacagcttgacagctgccatgattgatgcagttctagatgagctcccacctcttatcagcgaaagtgatatgcatgtttcacaaatggccatcagttttcttaccactttggcaaaagtatatccctcctccctttcaaagataagtggatccattctcaatgaacttattggacttgtgagatcacccttattgcaggggggagctcttagtgccatgctagactttttccaagctctggttgtcactggaacaaataatttaggatacatggatttgttgcgcatgctgactggtccagtttactctcagagcacagctcttactcataagcagtcttattattccattgccaaatgtgtagctgcccttactcgagcatgccctaaagagggaccagctgtagtaggtcagtttattcaagatgtcaagaactcaaggtctacagattccattcgtctcttagctctactttctcttggagaagttgggcatcatattgacttaagtggacagttggaactaaaatctgtaatactagaagctttctcatctcctagtgaagaagtcaaatcagctgcatcctatgcattaggcagcattagtgtgggcaaccttcctgaatatctgccgtttgtcctgcaagaaataactagtcaacccaaaaggcagtatcttttacttcattccttgaaggaaattattagctctgcatcagtggtgggccttaaaccatatgttgaaaacatctgggccttattactaaagcactgtgagtgtgcagaggaaggaaccagaaatgttgttgctgaatgtctaggaaaactcactctaattgatccagaaactctccttccacggcttaaggggtacttgatatcaggctcatcatatgcccgaagctcagtggttacggctgtgaaatttacaatttctgaccatccacaacctattgatccactgttaaagaactgcataggtgatttcctaaaaactttggaagacccagatttgaatgtgagaagagtagccttggtcacatttaattcagcagcacataacaagccatcattaataagggatctattggatactgttcttccacatctttacaatgaaacaaaagttagaaaggagcttataagagaggtagaaatgggtccatttaaacatacggttgatgatggtctggatattagaaaggcagcatttgagtgtatgtacacacttctagacagttgtcttgatagacttgatatctttgaatttctaaatcatgttgaagatggtttgaaggaccattatgatattaagatgctgacatttttaatgttggtgagactgtctaccctttgtccaagtgcagtactgcagaggttggaccgacttgttgagccattacgtgcaacatgtacaactaaggtaaaggcaaactcagtaaagcaggagtttgaaaaacaagatgaattaaagcgatctgccatgagagcagtagcagcactgctaaccattccagaagcagagaagagtccactgatgagtgaattccagtcacagatcagttctaaccctgagctggcggctatctttgaaagtatccagaaagattcatcatctactaacttggaatcaatggacactagttagatgtttgttcaccatggggaccattacatatgaccatacaatgcactgaattgacaggttaatcataagacatggaaagagaagtgtctaaaagcttcaaaatgttccacttttttttccttcatggagactgtttgtttggctttcttccattgttgtttttgtagcatttatttcagaaatgtgtatttccataatccagaggttgtaaaaccactagtgttttagtggttacagcaacatttgaaatggaaactaaaagttaggattttatggagtatggagatagggtccagtatctatttaccctgtaatgtttaggattaaaatgttaaaattttgtgaccatgaatttctttcttttataaattttctcatttaaaaatcaaaaatcttgcaaaacaaaaaccatgtttctttttcttgtataactttttgttttcagcaacataaattgatttttagctggcagacaagaatatccatataagatttgttaaccatttcagagagtttggcaatttttaaaagataataaggtatcatttttaagtatgaaaattaacaatatccctgttgcgcacactaattttgcatgagtaagtttacaaatatgtatcgtctgtaaagcagcatgtgcagattattcataatatagaagttaaaataagtattagtgcaattttcagatatttatttttgcacagaaaacacattatctggagagaaagaaaggagaatttttgagacttgggttttcttaatgccagtgtgaatttgcagatgttttcagaaaatcaagtcacagtaacaatttgccacttttttctattataaatcttcttacttaaattttgaatatttagtttttctcagttacccatttgtgtgtgtgtgattccacttagaaattcttaaaaccagatttttctttcattccgtttggatgtctacattccttatcaaaggatataaatactgtgtatgcttttgaattttatttttaggaaaattctgaagccagctatcacaggtttgttagctaataatagtattttcttttagttgagttaggtttttccccatctcctgtagagcgaatttacatattgtattgggtaagtgttcactacttttcctgattaagggatctgtgctggggaacaaagcttttgcagtaccttatattgtagttaaaattttatttaacatatccttcagtgagctcatttcacactgtagcctcttccttaaaatttgtggtgctcctgtaacagtaagaactaattctgaaataaaagacatctcctaatgctgtgcaaacatagtttacatgtattgaaggaggcagttgttaaattgagtgaccaatttaagcaatcagatatttgaaaactgcaccctttagttttgaaactgtgaattagaaacacttttcctgctgtattactacctgctttaacatccaaatatacagtgattttaaatgataacatactgtggttattagattaacagcttgattttgaatgttcagatgataatgcagaagacatcacttctagtaaggattttgactagtgcattgatgttgaagttggtgccatttcaaaatgtggcaggtgataatcttttaccataatttgcataaaactgtaatagaagtttattttgagatgttagtatattatgtactatgcatttctgtggtatagatgttgtggatatatttaagtatttggttacatggttttacaataaattacaatactgcaggcaaaaaaaaaaaaaaaaaaaaaaaaaaagaaaaaaaaaaaaaaaaaaag

SEQ ID NO: 198619 - DNA, 3693 bp, Artificial Sequence
  derived and/or modified sequence
atggcctctgctagctaccatatcagtaatctcctggaaaaaatgacttcaagtgataaagatttcaggtttatggccacgaacgatcttatgacagagctacagaaagactccatcaaactggatgacgatagcgaaagaaaagttgtgaaaatgatccttaagcttttggaggataaaaatggggaggttcaaaatttggccgtcaaatgcctgggtccgctggtgtccaaggtaaaggagtaccaggtagaaactatcgtcgatacgctgtgcacaaacatgctgagtgataaggagcagttacgagatatttcatcaattggcctcaagaccgtcataggggagctccccccagcctcgtccggcagtgcactcgctgccaatgtgtgtaaaaagatcacaggacggctgactagcgccatcgcaaagcaagaggatgtaagcgtgcagctggaggccttggacataatggcggacatgctgtctcgacagggcggcctactggtgaatttccatcctagcatcctgacctgtctcctgccacaactgacctccccgcggctcgcggtccggaagagaacaatcatcgcactcggacacttagtgatgagttgtggcaatattgttttcgttgatctgattgaacaccttctctctgaactgtcaaagaacgattccatgtctacgaccagaacctatatccagtgtattgccgccatttcaagacaggccgggcataggattggcgagtatctggaaaagataattccactggtagtcaagttctgtaatgtggacgacgatgagctgagggagtactgcatacaggccttcgaatcctttgttaggagatgtccaaaagaagtgtatccccatgtgtctacaattattaacatctgcttgaagtatctcacttatgacccgaattacaattatgacgacgaggatgaagacgaaaacgctatggacgccgatggaggggatgacgacgatcagggtagcgacgacgagtattccgatgacgacgatatgagctggaaggtccgcagagcggccgccaagtgtctcgatgccgtggtgtctacccgccatgagatgctcccagaattttacaagactgtgagtcccgctcttatttcacgcttcaaagaacgagaggagaatgtgaaagccgatgtcttccatgcctatctgtctctgctgaagcagactcggccagttcagtcctggctgtgtgaccctgacgccatggagcagggagaaacccctctcacaatgctgcaatctcaggttcccaatatcgtcaaggccttgcacaagcaaatgaaggagaaatccgtcaaaacacggcagtgttgttttaatatgctgaccgaactggtgaacgtcttgcccggagcattgacgcaacatattcctgtcttggtcccgggaatcatattttctcttaatgataagtctagttcctctaacctgaaaatcgacgccctcagctgtctgtatgtgatactctgtaatcatagcccgcaggtgtttcaccctcatgttcaggcactagtgccaccagtcgtggcttgcgtgggtgaccccttttataaaatcacgagtgaggctctgctggtgactcagcagctggtcaaggtgatccggcctttggatcagccctccagtttcgacgccactccatatataaaggatctgttcacctgcacgattaagagactgaaggccgccgatattgatcaggaggttaaggaacgcgccatcagttgcatgggccagatcatctgcaacctgggagacaatctcggctcagacctgccgaacacacttcagattttcctcgagagactgaaaaatgaaattacacggctcacaacagtcaaagctttgacgctcatcgccggcagtccactcaaaatcgatctcagacctgtattgggggaaggcgtgcctatcctggccagctttcttaggaagaatcaaagagccctgaaattagggactctgtccgccctagacatcctgattaagaactattctgacagcctgacagcggctatgatcgacgctgtattggacgagcttccacctctgattagtgaatctgatatgcacgtctcacagatggctatcagctttctgacaaccctcgccaaggtgtacccaagtagcctgtccaaaatctccgggtcaatcttgaacgagttaatcggactggtgaggtccccactgctccaggggggagccttatctgcaatgctagacttcttccaggcactggtggttactggcaccaacaacttgggctatatggatctgctcaggatgttaaccgggccagtctacagtcagtccacagcactcacacacaaacagagttattactccatagctaaatgcgttgcggccctcactagagcctgtcctaaggagggaccggccgtggtaggtcaatttattcaggatgtaaagaactctcggtctactgacagtattagactgctggccctgctgtccctgggagaagtcgggcaccacatagacctttccggccagctggaattgaaatcagtgattctcgaggcttttagttcaccttcagaggaggtgaaaagcgcagcaagctacgctctcggctcaatctccgtaggaaacctgcccgagtatctaccgtttgtgctccaggagattacttcgcagccaaagcggcaatacctgttgctgcactctctcaaagaaattattagtagcgcgtctgtggtgggtttgaaaccatacgttgaaaacatctgggcgctgctgctcaaacactgcgagtgcgccgaagaaggtaccagaaacgtggttgctgagtgtctcgggaagcttacactgattgacccagaaacactgttacctcgtctgaaaggatatttgatttctgggtccagctatgccaggtcatccgtcgttaccgcagtgaagtttaccatttcagatcaccctcaacctatcgatccccttcttaagaactgcatcggcgatttcctgaaaacactagaggatcccgaccttaacgtaagaagagtggccctggtcacattcaactctgcagcccataataagccatccctgattagggacttgttggataccgtgctgcctcacctatataacgagactaaagtaagaaaggagcttatacgtgaagtggagatgggaccgtttaaacacaccgtggacgatggcttggacattaggaaagccgcattcgagtgtatgtataccctcttggacagctgtttggaccgtcttgatatcttcgaatttcttaaccatgtcgaagacggcttaaaggatcactacgatatcaaaatgctgacattcctcatgttggttagactttccaccctttgcccctccgcggttcttcaaagactcgatcggttagttgaaccgttgcgcgctacttgtaccacaaaagtaaaagcaaatagcgtgaaacaagaattcgaaaaacaggacgagctcaaaaggagtgcaatgagagctgttgcagccctgctgaccatccctgaagccgagaagagtcctcttatgagtgaattccagtcccaaatcagcagcaatccggagctggctgcgatttttgaatcgatccagaaggattcttcctcaaccaatctggagtcgatggatacctcttag

SEQ ID NO: 198620 - DNA, 1209 bp, Artificial Sequence
  derived and/or modified sequence
tatgagttggtctcacggcaaggaggcctcctcgtcaactttcacccttccatactgacctgcctcctcccccagctcacaagtccacgactcgccgtgaggaaaaggaccatcatcgccctggggcatctggtcatgtcatgtggcaatattgtttttgtagatctgattgagcacctgctatcagagttgagtaagaacgactctatgtctaccacccggacatatatccagtgtatcgcggcaatatcccgacaggctggacacaggatcggcgagtatttagaaaagattatacccctagttgtgaagttttgtaacgtggacgacgacgaattgagggaatactgtatccaagccttcgaaagctttgtgcggcgctgtcctaaagaggtttacccacacgtgagcacaataatcaatatctgcttgaaatacctcacatacgacccaaactataactacgatgatgaggacgaagatgaaaatgcgatggatgccgacggcggagatgacgatgatcaaggctcagacgatgaatattcagacgacgacgacatgtcgtggaaggtccgccgcgctgcggccaaatgtctggatgccgtggtgagcactaggcacgaaatgcttccagagttttacaaaacagtctcccccgccctgatttcacgtttcaaggagcgcgaggagaatgttaaggccgatgtttttcacgcctatctctccctcctcaagcagacgcgcccggttcaaagttggctgtgcgacccggacgcaatggagcaaggcgaaacccctctcactatgcttcagagtcaggtcccaaatatcgtcaaggcgttgcataaacaaatgaaggagaagagcgtcaaaactcgacagtgttgcttcaacatgctgacagaacttgtaaatgtgcttcctggagccctcacgcagcacattcctgttcttgtccccggaattattttcagtctcaatgataagtcctcctcctctaacctcaagatcgatgctctgagttgtttatatgtgatactctgtaaccactctcctcaggtctttcatcctcatgttcaggccctggtgccccccgtcgtagcttgtgtgggtgatccattctacaaaattacaagcgaagcgctgcttgtgacgcagcagcttgtgaaagctcatcatatgccagaagcccagtggttacgtctctag

SEQ ID NO: 198621 - DNA, 3693 bp, Artificial Sequence
  derived and/or modified sequence
atggcctccgccagttatcacattagcaacctgctggaaaaaatgacatcatccgataaggatttccgcttcatggctaccaatgacctcatgacagagctacagaaggattccattaagctggacgatgactccgagagaaaagtggttaagatgatcctgaagctgctcgaggataagaacggtgaggtacagaatctagcagtgaagtgtctcggtccattagtaagcaaagtcaaggagtaccaggtcgagacgatcgtggatacattgtgtacaaatatgttaagcgacaaggagcaactgagggatatcagctcgatcggactgaagaccgtgattggtgagctgccccctgcgtccagcggtagcgccctggctgcgaatgtgtgcaagaaaatcaccggtcggctgacatcagccatcgccaagcaggaagatgtgagcgtacagttggaagcgcttgacatcatggcggacatgctctcccgccaagggggcttgctggttaactttcacccctcaattcttacctgtttgctgccacagcttacttctcctaggctagcagtgcgaaagcggacaatcattgccttgggccatctggtgatgtcctgcgggaatatagtgtttgtcgatttgatcgaacacctcctatccgagctgtcaaaaaacgattcaatgtcgacaaccaggacttatatacagtgtattgcagcaattagccggcaggcaggacaccgaatcggcgaataccttgaaaaaattatccccttggtggtgaagttctgtaatgttgacgacgacgaattgcgggagtactgtatccaggctttcgaaagcttcgtgagacggtgtcctaaggaggtatacccccacgtatctaccattataaatatttgccttaagtatctgacttacgatccaaactacaactatgatgatgaagacgaagatgaaaatgctatggacgctgacggcggcgatgatgacgaccaaggtagtgatgacgagtactctgacgatgacgatatgagttggaaggtgcgccgagccgctgctaagtgtctggatgccgtagtgagcaccagacatgagatgctgcctgaattctacaagacggtgagtcccgccttaattagccggttcaaagagcgggaggagaacgtgaaagccgacgttttccatgcttatctgagcttgctgaaacagacccgacctgtgcagagttggttatgtgatccggatgcaatggagcagggcgagactcctctcaccatgcttcaatcccaggtacccaatatcgtcaaagcactgcataaacagatgaaggagaaaagtgtaaagacacgccagtgttgtttcaatatgctgacagagctggttaatgtcctgcccggagccttgacacaacatattcccgtgcttgtcccaggcattatcttctcactaaacgacaaaagcagcagctcaaatctgaaaattgacgccctgtcctgcctgtacgtcatactgtgcaatcatagccctcaggtgttccacccacacgtgcaggccctggtcccaccggttgttgcttgcgtgggcgaccctttttacaagattaccagcgaggctctgctggtgacacagcagttagtgaaggtcataaggccactggaccagccgagttcttttgacgctacaccctacatcaaggatttatttacatgcacgatcaaacggctcaaggcagcagacatcgaccaggaagtaaaggaacgcgccatctcctgtatggggcaaatcatttgcaacctgggtgataacctcgggtcagacctccctaataccttgcaaatcttcctggaacgcttgaaaaacgagattacacggctcacaacggtcaaggctcttaccctgatagccggatcacctctgaaaatcgacttgcggccagtgctgggtgagggtgtgcccattctggcaagttttctgcgaaagaaccagagagctttgaagctgggcaccctgagtgcgcttgatattctaataaaaaactactcagattccctgactgctgcaatgatcgacgctgtcttggatgagcttccccccctgatctcagaaagcgacatgcacgtctcacagatggccatctcctttttaacaaccttagccaaagtttacccatcgagtctaagcaagatctctgggtctatcctgaatgaactgattgggctggtcaggtcgcctctgttacagggcggtgccttgtcagcgatgcttgatttctttcaggccctggtggtgactggaactaataacctggggtatatggatctgctccgtatgctgacgggcccggtgtacagtcagagtactgcgttgacccacaagcagtcctattattcaattgctaagtgtgtagccgctctcaccagggcatgtcctaaagaaggacctgcagtggtggggcagttcatccaggatgtcaaaaactcccgaagcacagatagcatcaggctactggccctgctgagcttgggggaggtcgggcatcacatcgatctaagtggtcagctagagctaaagagcgtgatcctggaggcattctcaagcccctcggaggaagtgaagagcgcagcaagttacgcacttgggagcatctctgtggggaacttaccagagtacctcccctttgttctgcaggagatcacttcccagccgaagcgccaatatcttttgctacatagcttaaaggagataatcagttccgcctcagttgtcggcctcaaaccttacgtggaaaacatctgggcactcctgctgaaacattgtgagtgcgccgaggagggcactagaaatgtagtcgccgagtgtcttggcaaattaactctgattgacccagaaactttactcccaaggctgaaggggtacctcatctcggggtcaagctacgccaggagctccgttgtaaccgcagtaaaatttactatatcggaccatccacagcctatcgatcccttactgaagaattgtattggtgattttttgaagaccctcgaggatccagaccttaatgtccgcagagtggctcttgtgacctttaacagcgcggcccacaataagccgagtctcattcgggatctgctggacacagtccttcctcacctttataacgagaccaaggtaaggaaggaattgatcagggaggtggagatggggccattcaagcacaccgttgatgatgggctggacatccgaaaagctgcctttgaatgtatgtatacactgttggattcctgcctcgaccgactagatatctttgaatttctcaaccacgtcgaagacggactgaaagaccattatgacattaaaatgttgacattcctgatgctggtgagactctctactctctgtccttctgctgtcctccagcggcttgataggctcgtcgagcccttgcgggcaacctgtaccacgaaggtaaaagcgaattcagtgaagcaggagtttgagaagcaagatgagctgaaacgttccgcgatgcgcgcagtcgcagccctactgactataccagaagcagaaaagtcgcctctgatgtcggagttccaatcacagatctccagtaacccagagctggcggcaatatttgaaagcattcagaaagacagctcctccaccaatctggaaagcatggataccagttag

SEQ ID NO: 198622 - DNA, 3693 bp, Artificial Sequence
  derived and/or modified sequence
atggccagcgccagctaccacatcagcaacctgctggagaagatgaccagcagtgacaaggacttccgcttcatggccaccaatgacctgatgacagagctgcagaaggacagcatcaagctggatgatgattctgagaggaaggtggtgaagatgatcctgaagctgctggaggacaagaatggagaggtgcagaacctggccgtgaagtgcctgggccccctggtgtccaaggtgaaggagtaccaggtggagaccatcgtggacaccctgtgcaccaacatgctgagtgacaaggagcagctgcgggacatcagcagcatcggcctgaagacagtcatcggggagctgcccccagccagcagcggcagcgccctggccgccaacgtgtgcaagaagatcaccggccgcctgaccagcgccatcgccaagcaggaggatgtgtctgtgcagctggaggccctggacatcatggctgacatgctgagccggcagggcggcctgctggtgaacttccaccccagcatcctgacctgcctgctgccccagctgaccagcccccggctggccgtgaggaagaggaccatcatcgccctgggccacctggtgatgagctgtggcaacatcgtgtttgtggacctgattgagcacctgctgtctgagctgagcaagaatgacagcatgagcaccaccaggacctacatccagtgcatcgccgccatcagccggcaggccggccacagaattggagagtacctggagaagatcatccccctggtggtgaagttctgcaatgtggatgatgatgagctgcgggagtactgcatccaggcctttgagagctttgtgcggcgctgccccaaggaggtgtacccccacgtgtccaccatcatcaacatctgcctgaagtacctgacctatgaccccaactacaactatgatgatgaagatgaagatgaaaatgccatggatgctgatggaggagatgatgatgaccagggcagtgatgatgagtacagtgatgatgatgacatgtcctggaaggtgcggcgggctgctgccaagtgcctggatgctgtggtgtccaccaggcatgagatgctgcctgagttctacaagacagtgtccccagccctgatcagccgcttcaaggagcgggaggagaatgtgaaggcagatgtgttccacgcctacctgagcctgctgaagcagaccaggcctgtgcagagctggctgtgtgaccctgatgccatggagcagggcgagacccccctgaccatgctgcagagccaggtgcccaacatcgtgaaggccctgcacaagcagatgaaggagaagtctgtgaagacccggcagtgctgcttcaacatgctgacagagctggtgaatgtgctgcccggggccctgacccagcacatccctgtgctggtgcccggcatcatcttcagcctgaatgacaagagcagcagcagcaacctgaagattgatgccctgagctgcctgtatgtgatcctgtgcaaccacagcccccaggtgttccacccccacgtgcaggccctggtgccccctgtggtggcctgtgtgggggaccccttctacaagatcaccagcgaggccctgctggtgacccagcagctggtgaaggtgatccggcccctggaccagcccagcagctttgatgccaccccctacatcaaggacctcttcacctgcaccatcaagaggctgaaggctgctgacatcgaccaggaggtgaaggagcgggccatcagctgcatgggccagatcatctgcaacctgggggacaacctgggcagtgacctgcccaacaccctgcagatcttcctggagcggctgaagaatgagatcacccggctgaccaccgtgaaggccctgaccctgattgctggcagccccctgaagattgacctgcggcctgtgctgggggagggcgtgcccatcctggccagcttcctgaggaagaaccagagggccctgaagctgggcaccctgagcgccctggacatcctgatcaagaactacagcgacagcctgacagctgccatgattgatgctgtgctggatgagctgcccccactcatcagcgagagtgacatgcacgtgtcccagatggccatctccttcctgaccaccctggccaaggtgtaccccagcagcctgagcaagatcagcggcagcatcctgaatgagctgattggcctggtgcgcagccccctgctgcagggcggggccctgagcgccatgctggacttcttccaggccctggtggtgacaggcaccaacaacctgggctacatggacctgctgaggatgctgaccggccctgtgtacagccagagcacagccctgacccacaagcagagctactacagcatcgccaagtgtgtggccgccctgacccgggcctgccccaaggagggccctgctgtggtgggccagttcatccaggatgtgaagaacagccgcagcacagacagcatccggctgctggccctgctgagcctgggggaggtgggccaccacatcgacctgagcggccagctggagctgaagagcgtcatcctggaggccttcagcagccccagcgaggaggtgaagtctgctgccagctatgccctgggcagcatctctgtgggcaacctgcctgagtacctgccctttgtgctgcaggagatcaccagccagcccaagaggcagtacctgctgctgcacagcctgaaggagatcatcagcagcgcctctgtggtgggcctgaagccctacgtggagaacatctgggccctgctgctgaagcactgtgaatgtgccgaggagggcaccagaaatgtggtggctgaatgtctgggcaagctgaccctgattgatcctgagaccctgctgccccggctgaagggctacctgatcagcggcagcagctatgcccggagctctgtggtgacagctgtgaagttcaccatcagtgaccacccccagcccatcgaccccctgctgaagaactgcatcggggacttcctgaagaccctggaggaccctgacctgaatgtgagaagagtggccctggtgaccttcaacagcgctgcccacaacaagcccagcctcatccgggacctgctggacacagtgctgccccacctgtacaatgagaccaaggtgaggaaggagctgatccgggaggtggagatgggccccttcaagcacacagtggatgatggcctggacatcaggaaggccgcctttgagtgcatgtacaccctgctggacagctgcctggaccggctggacatctttgagttcctgaaccacgtggaggatggcctgaaggaccactatgacatcaagatgctgaccttcctgatgctggtgcggctgagcaccctgtgccccagcgctgtgctgcagaggctggaccggctggtggagcccctgcgggccacctgcaccaccaaggtgaaggccaacagcgtgaagcaggagtttgagaagcaggatgagctgaagaggtctgccatgagagctgtggccgccctgctgaccatccctgaggccgagaagagccccctgatgtctgagttccagagccagatcagcagcaaccctgagctggccgccatctttgagagcatccagaaggacagcagcagcaccaacctggagagcatggacaccagctag

SEQ ID NO: 198623 - DNA, 1209 bp, Artificial Sequence
  derived and/or modified sequence
tatgagctggtgtcccggcagggcggcctgctggtgaacttccaccccagcatcctgacctgcctgctgccccagctgaccagcccccggctggccgtgaggaagaggaccatcatcgccctgggccacctggtgatgagctgtggcaacatcgtgtttgtggacctgattgagcacctgctgtctgagctgagcaagaatgacagcatgagcaccaccaggacctacatccagtgcatcgccgccatcagccggcaggccggccacagaattggagagtacctggagaagatcatccccctggtggtgaagttctgcaatgtggatgatgatgagctgcgggagtactgcatccaggcctttgagagctttgtgcggcgctgccccaaggaggtgtacccccacgtgtccaccatcatcaacatctgcctgaagtacctgacctatgaccccaactacaactatgatgatgaagatgaagatgaaaatgccatggatgctgatggaggagatgatgatgaccagggcagtgatgatgagtacagtgatgatgatgacatgtcctggaaggtgcggcgggctgctgccaagtgcctggatgctgtggtgtccaccaggcatgagatgctgcctgagttctacaagacagtgtccccagccctgatcagccgcttcaaggagcgggaggagaatgtgaaggcagatgtgttccacgcctacctgagcctgctgaagcagaccaggcctgtgcagagctggctgtgtgaccctgatgccatggagcagggcgagacccccctgaccatgctgcagagccaggtgcccaacatcgtgaaggccctgcacaagcagatgaaggagaagtctgtgaagacccggcagtgctgcttcaacatgctgacagagctggtgaatgtgctgcccggggccctgacccagcacatccctgtgctggtgcccggcatcatcttcagcctgaatgacaagagcagcagcagcaacctgaagattgatgccctgagctgcctgtatgtgatcctgtgcaaccacagcccccaggtgttccacccccacgtgcaggccctggtgccccctgtggtggcctgtgtgggggaccccttctacaagatcaccagcgaggccctgctggtgacccagcagctggtgaaggcccaccacatgcctgaggcccagtggctgcggctgtag

SEQ ID NO: 198624 - DNA, 3693 bp, Artificial Sequence
  derived and/or modified sequence
atggccagcgccagctaccacatcagcaacctgctggagaagatgaccagctccgacaaagacttcaggttcatggcgacaaatgatttgatgacagaacttcaaaaagactccatcaagctggatgacgattcagagagaaaggtggtgaaaatgattttaaagctgctggaagataaaaatggagaagtgcagaacctggccgttaagtgtctcggaccgttggtcagcaaagtgaaagagtaccaggtcgaaaccattgtggacacgctgtgtacgaacatgttgtctgacaaggagcagctccgagacatttcgtcaataggacttaagaccgtgatcggcgaactaccacctgcttcatctggttccgccctagctgccaatgtttgtaagaagatcaccggccggctgacgagcgcaatagctaaacaggaagacgtttctgttcagctcgaggccctcgacataatggccgacatgctgtcacgccagggcggactgctggtgaatttccacccaagtatcctgacatgcttactcccacagctgacatcaccgcgattggcagtccgcaaacgaactataatcgccttgggccatctggttatgtcatgtggaaacattgttttcgtcgacctgatagagcatctgttgtccgaattatctaagaatgattccatgtccaccactagaacgtacatccaatgtatcgctgccatcagtcggcaagcagggcaccgaattggcgaatacctggagaaaattattccattggtggtgaaattttgtaatgtggatgatgacgaactgcgcgaatattgtattcaggcctttgagtccttcgtgagacgctgccccaaagaagtttacccacatgtctcgacaattataaatatttgtctgaagtacctcacctatgaccctaattacaactatgatgacgaagacgaagacgagaatgctatggatgccgacggcggggacgatgatgatcagggctctgatgatgagtattccgacgatgacgatatgtcctggaaggtacggagagcagctgcaaaatgcttggatgctgtcgtgtccacccgacatgagatgctgcccgagttctataagaccgtctcacccgcactgatttctcgcttcaaagaaagagaagagaatgtgaaggctgatgtgtttcatgcctacctgtcactgttaaaacagacaagacctgtccaatcctggctatgcgacccagacgccatggaacagggcgagacacctcttaccatgttgcagtctcaggtgcccaatatcgtgaaggctctgcataaacagatgaaggaaaagtcagtcaagaccagacagtgctgttttaatatgctcacagagctggtgaatgtcctccccggcgcactgacacaacacatccctgtactcgttcctggtatcatcttctctctgaatgataagtcttcctctagcaacctgaagatagatgccctgtcctgtctgtacgttattctttgtaaccacagtccacaggtgttccacccgcacgtgcaagcattggtgcctccagtggttgcttgtgtaggagaccccttctacaagatcacaagcgaggccctactggtgactcaacagctagtgaaagttattagacccctcgatcagccctcctcgttcgacgccacgccatacatcaaggatctctttacatgcactattaagcggctgaaagccgctgacatcgaccaggaggtcaaggagagggcaatttcatgcatgggtcagatcatctgcaacctaggtgataatttgggcagcgacctgcctaacaccctgcagattttcctggagcgactgaaaaatgaaattaccaggcttactaccgttaaagcactaacgctcattgccgggtctccattgaagattgacctgaggcctgtcctgggggagggcgtacccatcctggccagctttttaagaaagaatcagcgggccctaaagctggggaccttgtccgccctggacattctgatcaagaactatagtgactccctcacagccgcgatgatagacgctgtactggacgagttgccaccccttatttccgaatccgacatgcacgtctctcagatggccatctcattcctcacaacactggcaaaagtgtacccatctagcctgtcaaagataagtggcagcatcctgaacgagttgattggtcttgtgaggtctccgctactgcagggtggggctctctcggctatgctggactttttccaagcgctggtagttaccggtaccaacaatctgggatatatggacctcttgagaatgctcaccggacccgtttactctcagtctacggctttaacccacaaacagagctactactccattgccaagtgcgtagcggcacttacaagggcctgtccaaaggagggtcccgcggtggtggggcagtttatccaggatgttaaaaactctagatccacagactcaatacgacttctagctctgctgagcctgggtgaggtaggtcatcacatagacctgtccggccagttagaactcaagtcagttatcctggaagccttttcgagcccatccgaggaggtgaaatcggctgcttcgtacgccctgggcagcataagcgttggaaacctgccggaatatttgcctttcgttctgcaggagatcaccagtcaacctaagcgtcaatacctgctgcttcactcccttaaagaaatcatctcatccgcctcagttgtaggactgaaaccttacgttgagaacatttgggcgctgctcctgaagcactgcgagtgcgcggaagagggcactaggaacgtggtggcagaatgtctcggcaagcttaccctgatcgatccagagactcttctccctagactgaaagggtacctgatttcagggtcgtcttacgccagatccagcgtagtgacagcagttaagttcacgatttccgatcaccctcagccgattgatcctctcctcaagaactgcatcggagacttcctcaagacactggaagatccggacctgaacgtgagacgcgtggcgctggtgacattcaattccgccgctcataacaaaccatcgttgatacgggacttactggacactgtcctgccacatctgtataatgagacaaaggtgcgcaaagaactgattcgggaggtggaaatgggcccatttaagcacacagtagatgatggcctcgatattcgcaaggccgcctttgagtgcatgtacaccttgctggactcgtgcttggacagacttgatatatttgaatttcttaaccacgtggaggatgggttaaaggaccactacgatatcaaaatgttgactttcctcatgttggtgcgtctcagcacgctttgtcccagcgccgtactgcaacggctggatcggctggtggagcccctcagggcaacatgcaccactaaagtcaaagcaaattcagtgaagcaggaattcgagaagcaggatgagctgaagcgatcagcgatgcgtgctgtggctgccctgctcacaatcccagaagcagagaaatcacccctgatgagcgagtttcaatctcagatctcgtctaatcctgagctcgctgccatctttgaaagcatacagaaagacagctcctctaccaacttagagagtatggatactagttag

SEQ ID NO: 198625 - DNA, 1209 bp, Artificial Sequence
  derived and/or modified sequence
tacgagctggtgagccggcagggcggcctgctggtgaacttccaccctagcattctcacatgcctgcttccccagctaacctcgcctcgtctcgcagttagaaagcggactatcatagccctgggccacctcgtcatgtcttgtggcaacatcgttttcgtggatctcatagaacatctgctgtctgaactcagcaagaatgatagcatgtctacaactcgtacttatattcagtgcatcgctgccatctctcgtcaagccgggcatcgaattggcgagtacctggagaaaatcatcccattagtggtgaaattctgtaacgtggacgacgatgagctgagagaatattgtattcaggcttttgagtcctttgtgaggcgctgccccaaggaagtgtatcctcacgtgtcaaccattatcaacatttgcctgaaataccttacttacgatcctaattataattacgatgatgaagatgaggatgagaatgccatggacgccgacggaggtgacgacgacgaccagggtagcgatgatgagtactctgatgatgacgacatgtcatggaaggtgagacgggcagcagctaaatgcctcgacgccgttgtttctaccagacacgaaatgctgcccgaattctacaagaccgtcagcccagccttgatcagcagattcaaagaacgagaagagaacgtgaaagccgacgtgtttcatgcttacctctccctgctgaagcagacgagacctgtgcaaagctggctttgtgatcctgacgccatggaacagggagagactccattaacaatgctgcagtcccaagtgccaaacattgtaaaggcattgcataagcagatgaaagaaaagtccgtaaagacgcgccagtgttgtttcaatatgctaacggaactggtcaacgttctgcctggagccttgacacagcacattccggtcctggttcccgggatcattttttctctgaacgacaagagctcatcctccaatctgaagatcgatgccttgtcatgtctgtacgtgattctttgtaaccactctccgcaagtattccatccacacgtccaggccctcgtcccaccagtcgttgcatgcgtaggagacccattctacaaaataacttctgaggccctccttgtgacccagcagttggtcaaagctcatcatatgccagaggctcagtggctcagactgtag

SEQ ID NO: 198626 - DNA, 3693 bp, Artificial Sequence
  derived and/or modified sequence
atggccagcgccagctaccacatcagcaacctgctggagaagatgacctctagcgataaggattttagattcatggctaccaatgatctcatgacggagctgcagaaagattctattaagctggacgacgactccgagaggaaagttgtgaagatgatactgaagctcttggaagacaagaatggagaggtgcagaatttggcggtgaagtgcctcggacccttagtcagtaaagtgaaagagtatcaagttgagacaattgtggataccttgtgcacaaatatgttatccgacaaggagcagctccgcgatatcagcagcatcggccttaagactgtgattggtgagctgcctcccgctagctccggcagcgccctcgctgccaacgtctgcaaaaagatcactggccgcttgacatccgccatagcaaagcaggaggatgtgtccgtccagttggaagcactcgatataatggcagacatgctgtcacgccaaggaggactgctggtcaactttcacccctccatcctgacctgcctcctgccacaattgaccagcccacggctcgccgtccgaaagagaactattatcgccctcggtcacctggtgatgagttgtgggaatatagtgtttgtggatctcatcgaacacctgctgtcagaactgtcaaaaaacgacagtatgtctaccacccgcacatacatccaatgtattgccgccataagtaggcaggcagggcataggataggcgaatatttggagaaaatcatacccctcgtagtcaagttctgcaacgtggacgacgatgaactccgggagtactgcattcaggcgttcgagagcttcgtcaggagatgtcctaaggaggtatatccccacgtctccaccattatcaatatatgcctcaagtatctgacttacgatccaaactacaactacgatgacgaggacgaagatgagaacgccatggacgcagacggaggtgatgatgacgaccagggttccgatgacgagtactccgacgacgacgatatgtcctggaaggtgaggagagcggctgccaagtgcctggatgccgttgtgtcaacccggcacgagatgctccctgagttctacaaaaccgtaagccccgcgctgatttccagatttaaagagcgtgaagagaatgtgaaggcagatgtttttcacgcctacctgagtctgctgaaacagactcgcccggtgcagtcttggctctgcgacccggacgctatggagcagggtgagacacccttgacgatgttgcagagccaggtgcctaatatcgtgaaagcactccataaacaaatgaaagaaaaaagtgtcaaaactaggcagtgttgctttaatatgcttacggagctggttaacgtgctgcccggtgcattaactcaacacatccccgtgcttgtgcccggaatcattttttcactcaatgataagagttcgtccagcaacttgaaaatcgacgccctatcctgcctttacgtcatcctttgcaaccactcacctcaagtgttccacccacacgtgcaggccctcgtgccacctgtagttgcatgcgtgggcgatcctttctataaaattacatccgaggcgcttttggtgactcagcagttggtgaaagtgatccgccctttggaccagcctagctcttttgacgcgactccatacatcaaggacctattcacgtgcaccatcaaaagattgaaggccgccgatatagatcaggaagttaaagagcgagccatctcgtgcatgggtcagataatctgcaatctgggcgataatctgggttccgacctccccaacactcttcaaattttcttggaacggttgaagaacgaaattacaagacttactacagtcaaggccttgaccttaatcgcagggtctccattgaagatagacctccgccccgtgttgggagagggcgtgccgatcttagcttccttcctcaggaaaaatcagagggctctgaaactcggcacattaagcgctctcgacattcttatcaagaactactcagatagtctgactgctgctatgatcgatgcagttctggacgaactgccgccgctgatttctgaaagtgatatgcacgtgtcccagatggcaattagcttcctgaccacgctcgccaaggtctatccgtcgtccttgtccaaaatctccggaagcatcctgaatgaactgatcggcttagttaggagcccactcctacagggtggcgcgctgtctgctatgcttgacttttttcaggctctcgtggtcacgggcaccaacaacttaggatacatggacttgcttaggatgttgacaggccccgtgtactctcaatcgactgctctgacacacaaacagtcatattattcgatcgctaagtgcgttgccgccctcactcgtgcatgtccaaaggaggggcccgcagtcgtggggcagttcatccaggatgttaagaattcaagaagcaccgactccatacggctgctggccctcttgtcactcggtgaggtggggcatcacatcgacctgagtggccagctggagctgaagtcggtgatcctggaggcctttagctctccctccgaggaggtaaaatcagccgcctcttatgcgctgggctcgatttctgtggggaatctgccagagtatctccccttcgtcctgcaagaaatcacgagccagcccaagcgccagtacctattgcttcacagcctgaaagagatcataagcagcgctagtgtcgtcggcctcaaaccttacgtggaaaacatttgggcactcttgctgaaacactgcgaatgtgccgaggaaggaaccaggaatgtcgtggcagagtgcttgggaaagctgacccttatcgaccccgagacactgctccccaggctaaaaggttacctgatttccggctcaagttacgcccgatcaagcgtggtgactgccgtgaagttcaccatcagcgatcatccacagccaatcgatcccttacttaagaactgtattggcgattttctaaagacacttgaagacccggacctgaacgtgcgccgggtggcattagtgacctttaactccgccgcacacaataagccctcactcattcgggacctcctggacacggtgttgccacatctgtataatgagaccaaagtcagaaaggagctcattagagaggtggagatggggccttttaaacacacggttgacgatggtttagatatccgcaaagccgcctttgagtgtatgtatactctgctagactcatgcctcgacaggttggacatctttgaattcctgaaccatgtcgaggacggactgaaagatcattacgatattaagatgttgacctttttgatgcttgtgagactctcgactctgtgtccttccgctgtgttacagcgtcttgataggctagttgagcccctccgggcaacttgtaccaccaaagtcaaggcaaactctgtcaaacaagaatttgagaagcaagacgagcttaaacgctccgcaatgagagccgtggccgcgctgctgacaattccagaggccgaaaagtcccctctgatgtctgaattccagtcccagatcagttccaacccagagctagctgcaattttcgaatccatccagaaggacagcagctcaaccaatctggagagcatggacacgtcatag

SEQ ID NO: 198627 - DNA, 3693 bp, Artificial Sequence
  derived and/or modified sequence
atggcttcggcctcctatcacatctccaacctattggagaaaatgacatctagcgacaaagacttccgcttcatggccaccaacgacctgatgaccgagctccagaaggactccataaagctcgatgacgactcagagcgcaaggttgtcaaaatgatccttaaacttcttgaagacaaaaacggggaagttcagaaccttgcagttaaatgtctcggaccccttgtttcaaaggtcaaggagtaccaagtggagaccatcgttgatactctgtgtaccaacatgctttctgataaagaacagttgcgcgatatttcttctatcgggctcaagaccgtgattggagagctgcctccagctagtagtgggagcgcgctcgctgccaacgtgtgtaagaagatcaccggaaggttaacttcagccattgccaagcaagaagacgtgagcgtccagcttgaagctctggacatcatggctgatatgctgagcagacagggtggcctgctggtgaactttcaccctagcattctcacttgtcttctgccacaacttactagtccacgactggccgtgcggaaacgcacaatcatcgccctcggtcacttggtgatgtcatgtgggaacattgttttcgttgatctgatcgagcatctgctgagcgagttgtcgaagaatgatagcatgagcaccacacgaacttatattcagtgtatcgcagcaatttcacggcaggccggacacagaatcggggagtacctggaaaaaatcattccgcttgtcgtgaagttctgcaacgtggatgacgacgagcttagagaatactgcatccaggcctttgagagttttgttcgaaggtgccccaaagaagtttatcctcacgttagcactattataaatatatgtctcaaatacctgacatacgaccccaactacaactatgacgatgaagatgaggacgagaatgccatggacgccgatggaggggacgatgatgaccagggcagtgacgatgaatatagtgatgatgacgatatgtcgtggaaggtccgcagggctgccgctaaatgtctcgacgccgtggtctctacacgacatgagatgctgcccgaattttacaaaaccgttagccctgccttaataagtcgtttcaaggaacgggaggagaacgtaaaagccgatgtgttccacgcctatttatctcttctgaagcagacaaggcccgtgcagagctggctgtgcgaccccgatgctatggaacaaggggagaccccacttacaatgctgcagagtcaggtgccaaatattgttaaggctctgcacaaacagatgaaggagaagtccgtgaagacccgccagtgctgcttcaacatgcttactgaattggtgaatgtgctgcctggcgctctaacgcagcacatcccagtactagtgcctggcataatcttcagcctcaatgacaagagctcctcatctaatctcaagatcgatgcactgtcttgtctgtatgtgatcctctgtaaccactccccacaggtgttccacccacacgtgcaggcactggttccccctgtggttgcttgtgtaggggaccctttttacaagatcacaagcgaggctctcttggtgacacagcagctggtgaaagtaatccgaccgctcgaccaacctagctcttttgatgcgaccccatacatcaaggatctctttacttgtacaataaaacgccttaaggcggctgatatcgatcaagaggtaaaggagcgtgccatctcttgtatgggccaaattatctgcaatttgggggacaacctcgggtctgacctgccaaataccctccagatattcctggaacggcttaagaatgaaattacgcgactgaccaccgtgaaagcgttgactttaatcgccggtagccccctaaagatcgacctgaggcccgttctaggcgaaggcgtgcctatcctcgcctcctttctcagaaagaaccaacgagccctcaaactcggcactttaagcgccctggacatacttatcaaaaactactccgattctcttacggccgcaatgatagacgcagtcctggatgagctcccaccacttatcagcgaatccgatatgcacgtttcccaaatggctataagttttttgactacactggccaaagtgtatccgtccagcctgagcaaaatctcaggcagcattctgaacgagctcattggcctagtcaggtctccactccttcagggcggagctctatcggcaatgttggactttttccaagctctcgtagtgactggcacgaataatctgggatacatggatctactgagaatgctaacaggacctgtctactctcagtccactgcactaacccacaagcagtcctactatagcatcgctaagtgtgtggccgctctgactcgagcctgtcctaaagaaggacccgctgttgtggggcagtttattcaggatgtgaaaaactccagatcgacagattctatcaggctattagcactgctgagccttggcgaggtggggcatcatattgacctctcaggccagctggagctgaaatccgtcattctagaggcattcagttctccttctgaggaggtgaaaagtgcagccagctacgccctggggtccatctctgttggcaacctgccagagtatcttccattcgtattacaggaaattacttcccaacctaagagacaatatttgctacttcatagtctgaaggagattatatcctccgcttcggtggtcggcctcaagccctatgtggagaacatttgggcccttttactgaagcactgcgaatgtgctgaagaggggacaagaaatgtggtggccgagtgcctggggaagttaacactcattgatccagaaacactgttacccaggctgaaaggatacctcatctctggctcaagttatgcaagatcctcagtggttacagctgtcaaattcactatttccgaccatccgcaacccatagatcctctcctgaagaactgtatcggggattttctgaaaacgctggaggatcccgacttaaatgtcagacgggtcgccctggtaacttttaactcagcggctcacaataaaccctccctgatccgggacctgctggatacagtcttgccccatctctacaatgagaccaaggtgcggaaggagttgatccgggaggtcgagatgggacccttcaagcacaccgtcgacgacggcttggacatccgtaaggcagctttcgaatgcatgtacacgcttcttgactcatgtctggataggctggacatcttcgaatttcttaatcatgtggaagatggccttaaggatcactacgatattaaaatgctgacctttctcatgctagtacggctgtctaccctctgtcccagcgccgtactgcagcggcttgataggctggtcgagcccctgcgtgcaacttgcacgaccaaagtgaaagccaacagcgtgaaacaggagtttgagaagcaggacgagctgaagcgcagcgctatgcgggctgtggctgccctgctcacaatcccggaggccgaaaaatccccactcatgtccgaattccagtcccaaataagcagcaaccctgagctggctgccatctttgagtctattcagaaagacagcagcagcaccaacctcgaatctatggacactagttag

SEQ ID NO: 198628 - DNA, 1209 bp, Artificial Sequence
  derived and/or modified sequence
tacgaactggtctctaggcagggcggactgcttgttaatttccaccctagcatcctgacttgccttctgccacagctgacatcccccagactcgccgtacgaaaaagaaccatcattgccctggggcacctggtcatgtcttgcggaaatattgtctttgtggacctgatcgagcacctgctgagcgagctctccaaaaatgattcaatgtctacaacgcggacttatatccagtgcatcgcagctatctctcggcaggctggtcatcgaatcggcgagtatctggagaaaatcatcccgctcgtggtgaagttttgtaatgttgatgacgacgagttacgggaatattgcatccaggctttcgagtcgttcgtgagaagatgtcccaaagaagtgtaccctcacgtgagcaccatcattaatatttgtcttaagtaccttacgtacgatccaaattataactatgatgacgaggacgaggatgagaacgcgatggatgctgacggtggagacgacgatgatcaagggtctgacgatgaatatagtgatgacgacgacatgtcttggaaggtgcgccgagctgccgctaaatgtctcgatgctgttgttagcactcgccacgagatgttaccagagttttacaaaacagtgagtcccgcactaatcagcagattcaaggagcgggaagagaacgtgaaggccgatgtcttccacgcatacctttccctgttaaaacagacgagaccagtacagagctggctttgtgacccagacgcaatggaacaaggcgagacacctctcacaatgctgcagagccaagtacctaacatcgtaaaggctctgcacaaacaaatgaaggaaaagagtgtaaaaacacgacaatgctgcttcaatatgctgaccgagttagtgaacgttctgcccggagcccttacccagcacattccagtgctggtccccggtattattttcagcctgaacgacaagtcctcctctagcaatctaaagattgatgccctgagctgcctctacgttatcttgtgcaatcacagtcctcaggtctttcacccccatgtgcaggcgctggtgcctcccgttgtggcctgcgtgggggatccgttctacaaaattacctccgaggctttgttagtcactcagcagctagtgaaggcccaccacatgccagaagcccagtggctgcgactttag

SEQ ID NO: 198629 - DNA, 3693 bp, Artificial Sequence
  derived and/or modified sequence
atggcaagcgcaagctaccacattagcaacctgctggagaagatgacttcctccgacaaggattttagattcatggcgacaaatgaccttatgaccgaactgcaaaaggactccattaaacttgacgatgattccgagaggaaggtggttaaaatgatccttaagctcttggaggacaaaaatggtgaggtgcaaaatttggccgtgaagtgtctcggtcccctggtctccaaggtcaaagaataccaggtagagacaatcgtggacaccctgtgcaccaatatgctttctgataaggagcagctgcgagacatatccagcattggattgaaaaccgtcatcggagagctccccccagcctcgtcgggcagcgcactggcagcaaatgtgtgcaagaaaataacgggacgactcacttctgccatagcgaagcaggaagatgtcagcgtgcagctggaagctctggatattatggcggatatgctgagccggcaaggcggtcttcttgtcaactttcatcctagtatattgacctgtttgctcccacagcttacatccccacgcttagctgtcagaaagagaaccattattgctctgggccatctggttatgtcttgcggtaatatcgtatttgtagacctgatcgagcatttgctttctgagctctcaaagaacgactctatgtcgacaacgcgcacatacatccagtgcattgccgcaatctcgcggcaggcaggacatcgcataggcgagtacctcgagaaaattattcccttagtggtgaaattctgcaatgtcgacgatgacgagctcagagaatactgtatacaagccttcgaatcttttgtcaggcgctgcccaaaagaggtttatccccatgtgtcaaccatcatcaacatatgcttaaaatatctcacttacgaccctaattacaactacgacgacgaagatgaggatgaaaatgcaatggatgccgacggaggcgatgatgacgaccagggaagcgatgatgagtactccgatgatgacgatatgtcttggaaggtgcgtcgagcagctgctaaatgccttgacgcagtcgtcagtacccgacacgagatgcttcccgaattttataagactgttagccctgctctgattagccggttcaaggagcgggaggaaaacgttaaagcagacgtcttccatgcctatttatctctcctgaagcaaactagaccagttcagtcttggttatgtgatccagatgcaatggagcaaggggaaacccctctgacaatgctccaatcccaggtgccaaacatagtcaaggccttgcataagcagatgaaagaaaaaagcgtcaaaacccggcagtgctgctttaatatgcttacagagctcgtgaatgttttgcctggagcactgactcagcacatccccgtgctagtcccaggaatcatttttagcttgaatgataagtccagtagttcaaatttaaagattgatgctctgtcgtgcctgtacgtcatcctctgcaaccactccccccaggtctttcatccacacgtccaggcactggtccccccagtggtggcctgtgtcggtgatccattttacaagatcaccagtgaggccctgctggtgactcaacaactggtgaaagtgattagacccctggatcaaccctcatccttcgacgctaccccgtatataaaagatctgttcacctgtacaataaagcggcttaaagcggcagatatcgatcaggaggtgaaagagcgcgcaatctcttgtatgggccagatcatttgcaacttgggcgataatctggggtctgacctgcctaacactctccagatattccttgaaaggctgaaaaacgaaattactcgcttgacgaccgtaaaagctctaaccctaattgcaggctctcccctgaagatcgatctaaggcctgtactcggggagggagtgcctatcttggcctcatttctcaggaagaatcagagagccctgaagttgggaacactgtctgccttagacattctcatcaagaactactctgacagccttaccgctgccatgattgacgccgtcttggacgagcttccacctcttatttctgaatccgacatgcacgtaagccagatggccatatctttcctaacaactttagccaaagtgtatccctcctcgctgtctaagatttcaggatcaattctcaacgagttaatcgggcttgtccggtccccactgctgcagggaggggcacttagtgcaatgctggatttcttccaggccctggtggtgaccggcactaataacttaggctatatggacctgctgcgaatgcttacagggccagtctatagccagtcgaccgcgctgactcataaacagagctattattccatcgccaagtgcgttgctgccctgaccagagcttgtcctaaagagggcccagcagttgtgggacaatttatccaagatgtcaagaactctagaagtactgacagtataaggctgctcgcgctgctatccttgggcgaggtcggtcaccacatagatctctccggacaactggaacttaaatcagtaatcctggaagccttctcatcgccatccgaggaggttaagtcagcagcgtcgtacgcccttggatccattagcgttggtaacctgcctgagtacttgccatttgtactgcaagaaattacaagccagccaaaaagacagtatcttctgctgcacagtctgaaggagatcatttccagtgccagcgtggtgggcctcaagccgtacgtcgaaaatatttgggctctgctcttgaagcactgcgagtgtgccgaagagggaacccggaacgtggtcgccgaatgtctaggcaagctaacactgatcgaccctgagacactgctgcctcgattaaagggttaccttataagcgggagctcctacgcccgtagctctgtcgttacggccgtgaagtttaccatatcggatcacccccaacccatagatcccctgctgaaaaactgtataggggactttctcaaaaccctggaagacccagacctcaatgtgagacgggtggccctcgtaaccttcaacagtgcagcccataataagccttcactgatcagggatttactggacacggtcctgccacacctatacaatgagaccaaagtgcgtaaagagctcatacgcgaagttgaaatgggacccttcaaacacaccgttgatgatgggctggacatacgcaaagccgcatttgaatgtatgtacacactgctagactcttgtctggaccgcctggacatatttgagtttcttaatcacgttgaggacggtctgaaagaccattatgatattaagatgttgaccttccttatgttggtgagactgtccactctgtgcccatctgctgtactccaacgattggacagattagtggagcctcttcgggcaacctgcacgacgaaagtgaaagccaacagcgtcaagcaagagtttgagaaacaggatgaactcaaacggagtgcaatgagagccgtggccgcactactgacgattcctgaggcagagaagtcacccctgatgtcggaatttcaatcccagatctcctccaatcccgagttggcagcaattttcgagagtatccagaaggactccagctctactaacctcgaaagtatggacacaagttag

SEQ ID NO: 198630 - DNA, 4113 bp, Artificial Sequence
  derived and/or modified sequence
gagcgaaggaggcgggctttggccttttgccctagggagcgagtgcggagcgagtgggagcgagacggccctgagtggaagtgtctggctccccgtagaggcccttctgtacgccccgccgcccatgagctcgttctcacgcgaacagcgccgtcgttaggctggctctgtagcctcagcgtcggcgtcgcgctgcgaccctggcggcggcggcggcggcagcggcagcgggcagcagctccagcagcgccagcaggcgggatcgaggccgtcaacatggcgagcgcctcgtaccacatttccaatttgctggaaaaaatgacatccagcgacaaggactttaggtttatggctacaaatgatttgatgacggaactgcagaaagattccatcaagttggatgatgatagtgaaaggaaagtagtgaaaatgattttgaagttattggaagataaaaatggagaggtacagaatttagctgtcaaatgtcttggtcctttagtgagtaaagtgaaagaataccaagtagagacaattgtagataccctctgcactaacatgctttctgataaagaacaacttcgagacatttcaagtattggtcttaaaacagtaattggagaacttcctccagcttccagtggctctgcattagctgctaatgtatgtaaaaagattactggacgtcttacaagtgcaatagcaaaacaggaagatgtctctgttcagctagaagccttggatattatggctgatatgttgagcaggcaaggaggacttcttgttaatttccatccttcaattctgacctgtctacttccccagttgaccagccctagacttgcagtgaggaaaagaaccattatcgctcttggccatctggttatgagctgtggaaatatagtttttgtagatcttattgaacatctgttgtcagagttgtccaaaaatgattctatgtcaacaacaagaacctacatacaatgtattgctgctattagtaggcaagctggtcatagaataggtgaataccttgagaagataattcctttggtggtaaaattttgcaatgtagatgatgatgaattaagagagtactgtattcaagcctttgaatcatttgtaagaagatgtcctaaggaagtatatcctcatgtttctaccattataaatatttgtcttaaatatcttacctatgatccaaattataattacgatgatgaagatgaagatgaaaatgcaatggatgctgatggtggtgatgatgatgatcaagggagtgatgatgaatacagtgatgatgatgacatgagttggaaagtgagacgtgcagctgcgaagtgcttggatgctgtagttagcacaaggcatgaaatgcttccagaattctacaagaccgtctctcctgcactaatatccagatttaaagagcgtgaagagaatgtaaaggcagatgtttttcacgcatacctttctcttttgaagcaaactcgtcctgtacaaagttggctatgtgaccctgatgcaatggagcagggagaaacacctttaacaatgcttcagagtcaggttcccaacattgttaaagctcttcacaaacagatgaaagaaaaaagtgtgaagacccgacagtgttgttttaacatgttaactgagctggtaaatgtattacctggggccctaactcaacacattcctgtacttgtaccaggaatcattttctcactgaatgataaatcaagctcatcgaatttgaagatcgatgctttgtcatgtctatacgtaatcctctgtaaccattctcctcaagtcttccatcctcacgttcaggctttggttcctccagtggtggcttgtgttggagacccattttacaaaattacatctgaagcacttcttgttactcaacagcttgtcaaagtaattcgtcctttagatcagccttcctcgtttgatgcaactccttatatcaaagatctatttacctgtaccattaagagattaaaagcagctgacattgatcaggaagtcaaggaaagggctatttcctgtatgggacaaattatttgcaaccttggagacaatttgggttctgacttgcctaatacacttcagattttcttggagagactaaagaatgaaattaccaggttaactacagtaaaggcattgacactgattgctgggtcacctttgaagatagatttgaggcctgttctgggagaaggggttcctatccttgcttcatttcttagaaaaaaccagagagctttgaaactgggtactctttctgcccttgatattctaataaaaaactatagtgacagcttgacagctgccatgattgatgcagttctagatgagctcccacctcttatcagcgaaagtgatatgcatgtttcacaaatggccatcagttttcttaccactttggcaaaagtatatccctcctccctttcaaagataagtggatccattctcaatgaacttattggacttgtgagatcacccttattgcaggggggagctcttagtgccatgctagactttttccaagctctggttgtcactggaacaaataatttaggatacatggatttgttgcgcatgctgactggtccagtttactctcagagcacagctcttactcataagcagtcttattattccattgccaaatgtgtagctgcccttactcgagcatgccctaaagagggaccagctgtagtaggtcagtttattcaagatgtcaagaactcaaggtctacagattccattcgtctcttagctctactttctcttggagaagttgggcatcatattgacttaagtggacagttggaactaaaatctgtaatactagaagctttctcatctcctagtgaagaagtcaaatcagctgcatcctatgcattaggcagcattagtgtgggcaaccttcctgaatatctgccgtttgtcctgcaagaaataactagtcaacccaaaaggcagtatcttttacttcattccttgaaggaaattattagctctgcatcagtggtgggccttaaaccatatgttgaaaacatctgggccttattactaaagcactgtgagtgtgcagaggaaggaaccagaaatgttgttgctgaatgtctaggaaaactcactctaattgatccagaaactctccttccacggcttaaggggtacttgatatcaggctcatcatatgcccgaagctcagtggttacggctgtgaaatttacaatttctgaccatccacaacctattgatccactgttaaagaactgcataggtgatttcctaaaaactttggaagacccagatttgaatgtgagaagagtagccttggtcacatttaattcagcagcacataacaagccatcattaataagggatctattggatactgttcttccacatctttacaatgaaacaaaagttagaaaggagcttataagagaggtagaaatgggtccatttaaacatacggttgatgatggtctggatattagaaaggcagcatttgagtgtatgtacacacttctagacagttgtcttgatagacttgatatctttgaatttctaaatcatgttgaagatggtttgaaggaccattatgatattaagatgctgacatttttaatgttggtgagactgtctaccctttgtccaagtgcagtactgcagaggttggaccgacttgttgagccattacgtgcaacatgtacaactaaggtaaaggcaaactcagtaaagcaggagtttgaaaaacaagatgaattaaagcgatctgccatgagagcagtagcagcactgctaaccattccagaagcagagaagagtccactgatgagtgaattccagtcacagatcagttctaaccctgagctggcggctatctttgaaagtatccagaaagattcatcatctactaacttggaatcaatggacactagttagatgtttgttcaccatggggaccattacatatgaccatacaatgcactgaattgacaggttaatcataagacatggaaagagaagtgtctaaaagcttcaaaatgttccacttttttttccttcatggagactgtttgtttggct

SEQ ID NO: 198631 - DNA, 3712 bp, Artificial Sequence
  derived and/or modified sequence
tatgaattagtctcaaggcaaggaggacttcttgttaatttccatccttcaattctgacctgtctacttccccagttgaccagccctagacttgcagtgaggaaaagaaccattatcgctcttggccatctggttatgagctgtggaaatatagtttttgtagatcttattgaacatctgttgtcagagttgtccaaaaatgattctatgtcaacaacaagaacctacatacaatgtattgctgctattagtaggcaagctggtcatagaataggtgaataccttgagaagataattcctttggtggtaaaattttgcaatgtagatgatgatgaattaagagagtactgtattcaagcctttgaatcatttgtaagaagatgtcctaaggaagtatatcctcatgtttctaccattataaatatttgtcttaaatatcttacctatgatccaaattataattacgatgatgaagatgaagatgaaaatgcaatggatgctgatggtggtgatgatgatgatcaagggagtgatgatgaatacagtgatgatgatgacatgagttggaaagtgagacgtgcagctgcgaagtgcttggatgctgtagttagcacaaggcatgaaatgcttccagaattctacaagaccgtctctcctgcactaatatccagatttaaagagcgtgaagagaatgtaaaggcagatgtttttcacgcatacctttctcttttgaagcaaactcgtcctgtacaaagttggctatgtgaccctgatgcaatggagcagggagaaacacctttaacaatgcttcagagtcaggttcccaacattgttaaagctcttcacaaacagatgaaagaaaaaagtgtgaagacccgacagtgttgttttaacatgttaactgagctggtaaatgtattacctggggccctaactcaacacattcctgtacttgtaccaggaatcattttctcactgaatgataaatcaagctcatcgaatttgaagatcgatgctttgtcatgtctatacgtaatcctctgtaaccattctcctcaagtcttccatcctcacgttcaggctttggttcctccagtggtggcttgtgttggagacccattttacaaaattacatctgaagcacttcttgttactcaacagcttgtcaaagctcatcatatgcccgaagctcagtggttacggctgtgaaatttacaatttctgaccatccacaacctattgatccactgttaaagaactgcataggtgatttcctaaaaactttggaagacccagatttgaatgtgagaagagtagccttggtcacatttaattcagcagcacataacaagccatcattaataagggatctattggatactgttcttccacatctttacaatgaaacaaaagttagaaaggagcttataagagaggtagaaatgggtccatttaaacatacggttgatgatggtctggatattagaaaggcagcatttgagtgtatgtacacacttctagacagttgtcttgatagacttgatatctttgaatttctaaatcatgttgaagatggtttgaaggaccattatgatattaagatgctgacatttttaatgttggtgagactgtctaccctttgtccaagtgcagtactgcagaggttggaccgacttgttgagccattacgtgcaacatgtacaactaaggtaaaggcaaactcagtaaagcaggagtttgaaaaacaagatgaattaaagcgatctgccatgagagcagtagcagcactgctaaccattccagaagcagagaagagtccactgatgagtgaattccagtcacagatcagttctaaccctgagctggcggctatctttgaaagtatccagaaagattcatcatctactaacttggaatcaatggacactagttagatgtttgttcaccatggggaccattacatatgaccatacaatgcactgaattgacaggttaatcataagacatggaaagagaagtgtctaaaagcttcaaaatgttccacttttttttccttcatggagactgtttgtttggctttcttccattgttgtttttgtagcatttatttcagaaatgtgtatttccataatccagaggttgtaaaaccactagtgttttagtggttacagcaacatttgaaatggaaactaaaagttaggattttatggagtatggagatagggtccagtatctatttaccctgtaatgtttaggattaaaatgttaaaattttgtgaccatgaatttctttcttttataaattttctcatttaaaaatcaaaaatcttgcaaaacaaaaaccatgtttctttttcttgtataactttttgttttcagcaacataaattgatttttagctggcagacaagaatatccatataagatttgttaaccatttcagagagtttggcaatttttaaaagataataaggtatcatttttaagtatgaaaattaacaatatccctgttgcgcacactaattttgcatgagtaagtttacaaatatgtatcgtctgtaaagcagcatgtgcagattattcataatatagaagttaaaataagtattagtgcaattttcagatatttatttttgcacagaaaacacattatctggagagaaagaaaggagaatttttgagacttgggttttcttaatgccagtgtgaatttgcagatgttttcagaaaatcaagtcacagtaacaatttgccacttttttctattataaatcttcttacttaaattttgaatatttagtttttctcagttacccatttgtgtgtgtgtgattccacttagaaattcttaaaaccagatttttctttcattccgtttggatgtctacattccttatcaaaggatataaatactgtgtatgcttttgaattttatttttaggaaaattctgaagccagctatcacaggtttgttagctaataatagtattttcttttagttgagttaggtttttccccatctcctgtagagcgaatttacatattgtattgggtaagtgttcactacttttcctgattaagggatctgtgctggggaacaaagcttttgcagtaccttatattgtagttaaaattttatttaacatatccttcagtgagctcatttcacactgtagcctcttccttaaaatttgtggtgctcctgtaacagtaagaactaattctgaaataaaagacatctcctaatgctgtgcaaacatagtttacatgtattgaaggaggcagttgttaaattgagtgaccaatttaagcaatcagatatttgaaaactgcaccctttagttttgaaactgtgaattagaaacacttttcctgctgtattactacctgctttaacatccaaatatacagtgattttaaatgataacatactgtggttattagattaacagcttgattttgaatgttcagatgataatgcagaagacatcacttctagtaaggattttgactagtgcattgatgttgaagttggtgccatttcaaaatgtggcaggtgataatcttttaccataatttgcataaaactgtaatagaagtttattttgagatgttagtatattatgtactatgcatttctgtggtatagatgttgtggatatatttaagtatttggttacatggttttacaataaattacaatactgcaggc

SEQ ID NO: 198632 - DNA, 11251 bp, Artificial Sequence
  derived and/or modified sequence
gtgaactctgaccttagctttccgtagcgcccgcgtctgccgcccccgcccccggagcgaaggaggcgggctttggccttttgccctagggagcgagtgcggagcgagtgggagcgagacggccctgagtggaagtgtctggctccccgtagaggcccttctgtacgccccgccgcccatgagctcgttctcacgcgaacagcgccgtcgttaggctggctctgtagcctcggcttaccccgggacaggcccacgcctcgccagggagggggcagcccgtcgaggcgcctccctagtcagcgtcggcgtcgcgctgcgaccctggaagcgggagccgccgcgagcgagaggaggagctccagtggcggcggcggcggcggcagcggcagcgggcagcagctccagcagcgccagcaggcgggatcgaggccgtcaacatggcgagcgcctcgtaccacatttccaatttgctggaaaaaatgacatccagcgacaaggactttaggtttatggctacaaatgatttgatgacggaactgcagaaagattccatcaagttggatgatgatagtgaaaggaaagtagtgaaaatgattttgaagttattggaagataaaaatggagaggtacagaatttagctgtcaaatgtcttggtcctttagtgagtaaagtgaaagaataccaagtagagacaattgtagataccctctgcactaacatgctttctgataaagaacaacttcgagacatttcaagtattggtcttaaaacagtaattggagaacttcctccagcttccagtggctctgcattagctgctaatgtatgtaaaaagattactggacgtcttacaagtgcaatagcaaaacaggaagatgtctctgttcagctagaagccttggatattatggctgatatgttgagcaggcaaggaggacttcttgttaatttccatccttcaattctgacctgtctacttccccagttgaccagccctagacttgcagtgaggaaaagaaccattatcgctcttggccatctggttatgagctgtggaaatatagtttttgtagatcttattgaacatctgttgtcagagttgtccaaaaatgattctatgtcaacaacaagaacctacatacaatgtattgctgctattagtaggcaagctggtcatagaataggtgaataccttgagaagataattcctttggtggtaaaattttgcaatgtagatgatgatgaattaagagagtactgtattcaagcctttgaatcatttgtaagaagatgtcctaaggaagtatatcctcatgtttctaccattataaatatttgtcttaaatatcttacctatgatccaaattataattacgatgatgaagatgaagatgaaaatgcaatggatgctgatggtggtgatgatgatgatcaagggagtgatgatgaatacagtgatgatgatgacatgagttggaaagtgagacgtgcagctgcgaagtgcttggatgctgtagttagcacaaggcatgaaatgcttccagaattctacaagaccgtctctcctgcactaatatccagatttaaagagcgtgaagagaatgtaaaggcagatgtttttcacgcatacctttctcttttgaagcaaactcgtcctgtacaaagttggctatgtgaccctgatgcaatggagcagggagaaacacctttaacaatgcttcagagtcaggttcccaacattgttaaagctcttcacaaacagatgaaagaaaaaagtgtgaagacccgacagtgttgttttaacatgttaactgagctggtaaatgtattacctggggccctaactcaacacattcctgtacttgtaccaggaatcattttctcactgaatgataaatcaagctcatcgaatttgaagatcgatgctttgtcatgtctatacgtaatcctctgtaaccattctcctcaagtcttccatcctcacgttcaggctttggttcctccagtggtggcttgtgttggagacccattttacaaaattacatctgaagcacttcttgttactcaacagcttgtcaaagtaattcgtcctttagatcagccttcctcgtttgatgcaactccttatatcaaagatctatttacctgtaccattaagagattaaaagcagctgacattgatcaggaagtcaaggaaagggctatttcctgtatgggacaaattatttgcaaccttggagacaatttgggttctgacttgcctaatacacttcagattttcttggagagactaaagaatgaaattaccaggttaactacagtaaaggcattgacactgattgctgggtcacctttgaagatagatttgaggcctgttctgggagaaggggttcctatccttgcttcatttcttagaaaaaaccagagagctttgaaactgggtactctttctgcccttgatattctaataaaaaactatagtgacagcttgacagctgccatgattgatgcagttctagatgagctcccacctcttatcagcgaaagtgatatgcatgtttcacaaatggccatcagttttcttaccactttggcaaaagtatatccctcctccctttcaaagataagtggatccattctcaatgaacttattggacttgtgagatcacccttattgcaggggggagctcttagtgccatgctagactttttccaagctctggttgtcactggaacaaataatttaggatacatggatttgttgcgcatgctgactggtccagtttactctcagagcacagctcttactcataagcagtcttattattccattgccaaatgtgtagctgcccttactcgagcatgccctaaagagggaccagctgtagtaggtcagtttattcaagatgtcaagaactcaaggtctacagattccattcgtctcttagctctactttctcttggagaagttgggcatcatattgacttaagtggacagttggaactaaaatctgtaatactagaagctttctcatctcctagtgaagaagtcaaatcagctgcatcctatgcattaggcagcattagtgtgggcaaccttcctgaatatctgccgtttgtcctgcaagaaataactagtcaacccaaaaggcagtatcttttacttcattccttgaaggaaattattagctctgcatcagtggtgggccttaaaccatatgttgaaaacatctgggccttattactaaagcactgtgagtgtgcagaggaaggaaccagaaatgttgttgctgaatgtctaggaaaactcactctaattgatccagaaactctccttccacggcttaaggggtacttgatatcaggctcatcatatgcccgaagctcagtggttacggctgtgaaatttacaatttctgaccatccacaacctattgatccactgttaaagaactgcataggtgatttcctaaaaactttggaagacccagatttgaatgtgagaagagtagccttggtcacatttaattcagcagcacataacaagccatcattaataagggatctattggatactgttcttccacatctttacaatgaaacaaaagttagaaaggagcttataagagaggtagaaatgggtccatttaaacatacggttgatgatggtctggatattagaaaggcagcatttgagtgtatgtacacacttctagacagttgtcttgatagacttgatatctttgaatttctaaatcatgttgaagatggtttgaaggaccattatgatattaagatgctgacatttttaatgttggtgagactgtctaccctttgtccaagtgcagtactgcagaggttggaccgacttgttgagccattacgtgcaacatgtacaactaaggtaaaggcaaactcagtaaagcaggagtttgaaaaacaagatgaattaaagcgatctgccatgagagcagtagcagcactgctaaccattccagaagcagagaagagtccactgatgagtgaattccagtcacagatcagttctaaccctgagctggcggctatctttgaaagtatccagaaagattcatcatctactaacttggaatcaatggacactagttagatgtttgttcaccatggggaccattacatatgaccatacaatgcactgaattgacaggttaatcataagacatggaaagagaagtgtctaaaagcttcaaaatgttccacttttttttccttcatggagactgtttgtttggctttcttccattgttgtttttgtagcatttatttcagaaatgtgtatttccataatccagaggttgtaaaaccactagtgttttagtggttacagcaacatttgaaatggaaactaaaagttaggattttatggagtatggagatagggtccagtatctatttaccctgtaatgtttaggattaaaatgttaaaattttgtgaccatgaatttctttcttttataaattttctcatttaaaaatcaaaaatcttgcaaaacaaaaaccatgtttctttttcttgtataactttttgttttcagcaacataaattgatttttagctggcagacaagaatatccatataagatttgttaaccatttcagagagtttggcaatttttaaaagataataaggtatcatttttaagtatgaaaattaacaatatccctgttgcgcacactaattttgcatgagtaagtttacaaatatgtatcgtctgtaaagcagcatgtgcagattattcataatatagaagttaaaataagtattagtgcaattttcagatatttatttttgcacagaaaacacattatctggagagaaagaaaggagaatttttgagacttgggttttcttaatgccagtgtgaatttgcagatgttttcagaaaatcaagtcacagtaacaatttgccacttttttctattataaatcttcttacttaaattttgaatatttagtttttctcagttacccatttgtgtgtgtgtgattccacttagaaattcttaaaaccagatttttctttcattccgtttggatgtctacattccttatcaaaggatataaatactgtgtatgcttttgaattttatttttaggaaaattctgaagccagctatcacaggtttgttagctaataatagtattttcttttagttgagttaggtttttccccatctcctgtagagcgaatttacatattgtattgggtaagtgttcactacttttcctgattaagggatctgtgctggggaacaaagcttttgcagtaccttatattgtagttaaaattttatttaacatatccttcagtgagctcatttcacactgtagcctcttccttaaaatttgtggtgctcctgtaacagtaagaactaattctgaaataaaagacatctcctaatgctgtgcaaacatagtttacatgtattgaaggaggcagttgttaaattgagtgaccaatttaagcaatcagatatttgaaaactgcaccctttagttttgaaactgtgaattagaaacacttttcctgctgtattactacctgctttaacatccaaatatacagtgattttaaatgataacatactgtggttattagattaacagcttgattttgaatgttcagatgataatgcagaagacatcacttctagtaaggattttgactagtgcattgatgttgaagttggtgccatttcaaaatgtggcaggtgataatcttttaccataatttgcataaaactgtaatagaagtttattttgagatgttagtatattatgtactatgcatttctgtggtatagatgttgtggatatatttaagtatttggttacatggttttacaataaattacaatactgcaggctctaggactgaacaggagactgacatgcatatgttgtgtgaatgtcttagttgggtaaagttaaatccaaatacttcaactggctttttcttcagtttgtttgtttttaactttcaagatgcatgttttgttttgttttgctttgtttttgtctcttaagccaattcatttttctaacagttgaaattcttttagtactaaagaaatagatactgctcttttatggctttagtgtttatatacctgtttatatgcatacattaacaaaattagtaacagcagtgcttagaatttcaatgctgtgtcatactgatgattaactccatactcctagtggtgatgtggtccagatactggaatggaagtggcaggatgtggagtccagacatagtctaccactcatgctacttactagtaatattaaggtgttaaacttaggaatttgtcacatgtaggttcctgaggagatctaaaagttaatacaaaaccaagctgtttactgattttcatgagaacatttaagttagtttaggtctacctgatttattttaaaagaaggcagagggctggacgcagtggcttacgcctgtaatcccagcactttgggaggccgaggcgggcggatcacgaggtcaggagatcgagactatcctggctaacactgtgaaaacccatctctactgaaaatacaaaaaattagctgggcgtggtggcagacgcctgtagtcctagctgctacagctgaggcaggagaatggcgtgaacccaggaggcggagctggcagtgagccgagatcacgccactgcactctggcctgggcaacagagcgagagtctgtctcaaaaaaaaaaaaaaaaaaaaggcaggaaggaaatttggtatggcagggcctaacctaaaaggttatttataaaatcaatagcactgaatgataatttttttaatgacagtcatgtattttattaatgatatctgaaagctgcttaaccattaggaattacaattctttatggttggagtatgatgatttcatcaaatgtttgaatatttacataatttttatgtaaccataattaaaccaaattagtctttttttcttcatacttttcttcggtaaatagtgaagaaataatgggcatatctaattaaccagttctagtgggtgttgtgatatctttatatctagttcagtctcagatgtatgaatatgattatatagtcatgattgaagttcaaaatgaggaagtatacaaaatcctcagccactgaaaaattcagttaacttgtttatactcctgtaagctctagttagtcacaagacaaagtatatagtaacactttgtaatgaagtaacattttctgcccacattaattttactaaagacctaaattgttaaaattaattgccaatctctggatatattatgcttagtaagtgttttgaaattaaagaccttaaacatttcagcaagtaaattttggattctagctctgttttaaattgaatcctaattttcaaaccactgctaccccagattcatacctgtttttgaaatcttgtttatggaatggaaaattgacagtatggtaatagtttattgactgattggacaaaggatattctggttttaactgacttttccatttaaataaaattcatttgataattttggttgcaaaagtggaacacagtggaagtatttggctacaggctacccaaatctcatcagataaggctgttttcttaaaggaaatgcaaaatgaaatcatatgttttccttttccaatacagtaaattgcttgttttcctatgaatatcagaaaagattttgtaaacacctttgctgtagtttcaggcaagatctttcagcaacatgtttttgctctttgtaacttagaaagttagctctgaatccaaaaactactgaagtgagtaatgcatataattttacttttttggaccctataatgccagtgtgtcaggtttcagaatgatatttagtagacagaaatacctaattttgttttggaatcttaataccctgtcctcttcataactttctagtggtgattttagcaagtttaattattttgctgaggtcttagaagacagaaagcttatgctatgtaaagtgacattgtttccagattaggaagtattggaattaatttgctattgccagtaagtaatggttgatggatattaagtgattttagtctagaatgctctcaaaaaaatagtaaagaattgtacttcagggccagatggcagctcacgcctgtaatctcagcactttgggaggccaaggtgggggatcacttgaagacaggagttggagaccagctctaggcaacatagtgagaccctgtctctaccaaaaagaagaaaaaagaaatcaacaacatgcaaccataagaatggatgagatggccctaaaagaataaggattacatataatgagaagacgtgtgggctgaaatacctagtgaacaatatttaagggaaactgaagtgcaaatggcctcacaggtttgtttttgtgtttaagacaaggtctcactctgttgcctggactggagtacatagcacgaacatggtttactgcacctcagcttcctgggcacaagtgattctcccacctcagcctcccgagtagctgggagtataggtgtgtgccaccacgtccagctaatttttttatttccttgtggagatggggtctcatgaccttgtccaggatgatctcaaactcctgggctcaagcaatcctgtgttggcctcctaaactgctgagattattgcaagtgcctccttgcccagccacatgttgttgatttcttttttctttttttttctttcttaatttttttttttttttttttttttgagattgatggagtcttgctttgtctcccaggctggagtgcagtggcgcaatatcggctcactgcaacctctgcctcccgggttctagctattctcctgcctcagcctcccaagtagctgtgattacaggcgtgtgccaccatgcccagctaatttttgtatttttagtagagatggagttttgccatgttggccaggctggtttcaaactcctgatcttaggtgatacacccgcctcggcctcccaaagtgctgggattacaggcgtgagccacgtcccccagccagtttcttaatctatacatctagcccagtccatgcccctgtttcagactattatatccaaccacctgctatacatctcataaaggtatctcaaacacagcatatctaaagctgaagtcatcatcttgccctggtttttcctgtctctttgctgatggcatcccatttacccagtcattcaaactggaaatctaaaagcctcacttagcaagagtttggaggcagaatatgataaagaacaaggactctgggaggccaaggcaggtggattgcttgaggtcaagagttcgagaccagtctggccaacatggcgaaaccccgtctttgctaaaaaaacacaaagaaattagctagacgtggtggcacatgcctgtagtcccagctgtgtgggaggctgaggcaggggaattgcttgaacctgggaggtggaggttgcagtgacccaagattgcatgcaccactgcactccagcctgggtgacaaagcgagaccctgtctcaaaaaaaacaaggactctacagatagatagacatcatatatcatattagtttgaatcctggctgttagctgttagacttgggcaaataatttaacctcaactttccctatctataaaatgggaattaaaatatttgcaccttatagggttattgtgaggattaaataggaacattgtataaagcacttaaaacagtacctgggacatactaagtaatataattgttaactcttactagcattctgtcccttttatttcctaaatatctctcatgcccatctcctaaatatctctttcctaaatatctctcatgcttttggcttaagacctcttttcctccttatctattgactggactgcggcaaatgcctgctaatcgttatttttgtgttcattcatttagcaagccaatttattacgcgcttagggtgctgccagggctacaaaagctgttgagactgtacttgatatgaagaagcttgctgattatcatgggaagactgacataaggaagcaccataaaattctgctgtatgagaggtatacacgggatactgggggttaataattgagggtatggtccattcaacatgagtgagacagaaacaattcataaaggagatgaaatgtcttgaggaatgagctcttagaagaatagttttcaaatgagtgtgcatcacagtcacctgtaagacttattaaaacagatcgctgggccctacacccagaggctgtggttcagtaggctgtagtaaaccagtaatttgtatttctatgacgttcccaggttctaatgctgttccccaaggccacaccttggaaaccaccacattaaaatacccagaaggcattaattcccagtccttcctctacacagctgcaaaacaatggtcctgaccatttcatctttgcactacatccttcactgtctctcttttgcccataggataagtacaaactagatctggttactgcctgccccaccagcctcagcatctctcacaactaggactaactttttcttctgacaactataaaatatttcccttgccttctcaagtttgctcaaggtcaagttatgccttttgcctggaatgacttgacttctcttttgttttacttagctggctgcttttcatcttgtaggttaggtcaaggactccaggaagtcttccctggacaagtaatgaagagggcataatccaagggccaactcccatgtttggaacctgactccattttcaggcacgtaatattgtcaaattccttttaaaagcacctgtctgtctgttaacgttggtgcagatactgctattcccctcctccataccattgctgatggttactgagggtatgggaagggccgactagtccagctgttcacaaacagcccttaatgtcaaactgaatactgccaacgtagttccagtttctgtatctaaagactcagcttggagtcacttgtctggactaaaagtaacccctccttgtctggtttgtgactttctgtactctgatgcccccagctttctgccttctagaaatttgtcagaatttccaaaattcttgggccttccttcttgctctatatatggttttggattcattccttttaaaaaatatttactgtcatttcagtagaattttgacacaataaatataagcacatca

SEQ ID NO: 198633 - DNA, 3693 bp, Artificial Sequence
  derived and/or modified sequence
atggccagcgccagctaccacatcagcaacctgctggagaagatgaccagcagcgacaaggacttcagattcatggccaccaacgacctgatgaccgagctgcagaaggacagcatcaagctggacgacgacagcgagagaaaggtggtgaagatgatcctgaagctgctggaggacaagaacggcgaggtgcagaacctggccgtgaagtgcctgggccccctggtgagcaaggtgaaggagtaccaggtggagaccatcgtggacaccctgtgcaccaacatgctgagcgacaaggagcagctgagagacatcagcagcatcggcctgaagaccgtgatcggcgagctgccccccgccagcagcggcagcgccctggccgccaacgtgtgcaagaagatcaccggcagactgaccagcgccatcgccaagcaggaggacgtgagcgtgcagctggaggccctggacatcatggccgacatgctgagcagacagggcggcctgctggtgaacttccaccccagcatcctgacctgcctgctgccccagctgaccagccccagactggccgtgagaaagagaaccatcatcgccctgggccacctggtgatgagctgcggcaacatcgtgttcgtggacctgatcgagcacctgctgagcgagctgagcaagaacgacagcatgagcaccaccagaacctacatccagtgcatcgccgccatcagcagacaggccggccacagaatcggcgagtacctggagaagatcatccccctggtggtgaagttctgcaacgtggacgacgacgagctgagagagtactgcatccaggccttcgagagcttcgtgagaagatgccccaaggaggtgtacccccacgtgagcaccatcatcaacatctgcctgaagtacctgacctacgaccccaactacaactacgacgacgaggacgaggacgagaacgccatggacgccgacggcggcgacgacgacgaccagggcagcgacgacgagtacagcgacgacgacgacatgagctggaaggtgagaagagccgccgccaagtgcctggacgccgtggtgagcaccagacacgagatgctgcccgagttctacaagaccgtgagccccgccctgatcagcagattcaaggagagagaggagaacgtgaaggccgacgtgttccacgcctacctgagcctgctgaagcagaccagacccgtgcagagctggctgtgcgaccccgacgccatggagcagggcgagacccccctgaccatgctgcagagccaggtgcccaacatcgtgaaggccctgcacaagcagatgaaggagaagagcgtgaagaccagacagtgctgcttcaacatgctgaccgagctggtgaacgtgctgcccggcgccctgacccagcacatccccgtgctggtgcccggcatcatcttcagcctgaacgacaagagcagcagcagcaacctgaagatcgacgccctgagctgcctgtacgtgatcctgtgcaaccacagcccccaggtgttccacccccacgtgcaggccctggtgccccccgtggtggcctgcgtgggcgaccccttctacaagatcaccagcgaggccctgctggtgacccagcagctggtgaaggtgatcagacccctggaccagcccagcagcttcgacgccaccccctacatcaaggacctgttcacctgcaccatcaagagactgaaggccgccgacatcgaccaggaggtgaaggagagagccatcagctgcatgggccagatcatctgcaacctgggcgacaacctgggcagcgacctgcccaacaccctgcagatcttcctggagagactgaagaacgagatcaccagactgaccaccgtgaaggccctgaccctgatcgccggcagccccctgaagatcgacctgagacccgtgctgggcgagggcgtgcccatcctggccagcttcctgagaaagaaccagagagccctgaagctgggcaccctgagcgccctggacatcctgatcaagaactacagcgacagcctgaccgccgccatgatcgacgccgtgctggacgagctgccccccctgatcagcgagagcgacatgcacgtgagccagatggccatcagcttcctgaccaccctggccaaggtgtaccccagcagcctgagcaagatcagcggcagcatcctgaacgagctgatcggcctggtgagaagccccctgctgcagggcggcgccctgagcgccatgctggacttcttccaggccctggtggtgaccggcaccaacaacctgggctacatggacctgctgagaatgctgaccggccccgtgtacagccagagcaccgccctgacccacaagcagagctactacagcatcgccaagtgcgtggccgccctgaccagagcctgccccaaggagggccccgccgtggtgggccagttcatccaggacgtgaagaacagcagaagcaccgacagcatcagactgctggccctgctgagcctgggcgaggtgggccaccacatcgacctgagcggccagctggagctgaagagcgtgatcctggaggccttcagcagccccagcgaggaggtgaagagcgccgccagctacgccctgggcagcatcagcgtgggcaacctgcccgagtacctgcccttcgtgctgcaggagatcaccagccagcccaagagacagtacctgctgctgcacagcctgaaggagatcatcagcagcgccagcgtggtgggcctgaagccctacgtggagaacatctgggccctgctgctgaagcactgcgagtgcgccgaggagggcaccagaaacgtggtggccgagtgcctgggcaagctgaccctgatcgaccccgagaccctgctgcccagactgaagggctacctgatcagcggcagcagctacgccagaagcagcgtggtgaccgccgtgaagttcaccatcagcgaccacccccagcccatcgaccccctgctgaagaactgcatcggcgacttcctgaagaccctggaggaccccgacctgaacgtgagaagagtggccctggtgaccttcaacagcgccgcccacaacaagcccagcctgatcagagacctgctggacaccgtgctgccccacctgtacaacgagaccaaggtgagaaaggagctgatcagagaggtggagatgggccccttcaagcacaccgtggacgacggcctggacatcagaaaggccgccttcgagtgcatgtacaccctgctggacagctgcctggacagactggacatcttcgagttcctgaaccacgtggaggacggcctgaaggaccactacgacatcaagatgctgaccttcctgatgctggtgagactgagcaccctgtgccccagcgccgtgctgcagagactggacagactggtggagcccctgagagccacctgcaccaccaaggtgaaggccaacagcgtgaagcaggagttcgagaagcaggacgagctgaagagaagcgccatgagagccgtggccgccctgctgaccatccccgaggccgagaagagccccctgatgagcgagttccagagccagatcagcagcaaccccgagctggccgccatcttcgagagcatccagaaggacagcagcagcaccaacctggagagcatggacaccagctag

SEQ ID NO: 198634 - DNA, 1209 bp, Artificial Sequence
  derived and/or modified sequence
tacgagctggtgagcagacagggcggcctgctggtgaacttccaccccagcatcctgacctgcctgctgccccagctgaccagccccagactggccgtgagaaagagaaccatcatcgccctgggccacctggtgatgagctgcggcaacatcgtgttcgtggacctgatcgagcacctgctgagcgagctgagcaagaacgacagcatgagcaccaccagaacctacatccagtgcatcgccgccatcagcagacaggccggccacagaatcggcgagtacctggagaagatcatccccctggtggtgaagttctgcaacgtggacgacgacgagctgagagagtactgcatccaggccttcgagagcttcgtgagaagatgccccaaggaggtgtacccccacgtgagcaccatcatcaacatctgcctgaagtacctgacctacgaccccaactacaactacgacgacgaggacgaggacgagaacgccatggacgccgacggcggcgacgacgacgaccagggcagcgacgacgagtacagcgacgacgacgacatgagctggaaggtgagaagagccgccgccaagtgcctggacgccgtggtgagcaccagacacgagatgctgcccgagttctacaagaccgtgagccccgccctgatcagcagattcaaggagagagaggagaacgtgaaggccgacgtgttccacgcctacctgagcctgctgaagcagaccagacccgtgcagagctggctgtgcgaccccgacgccatggagcagggcgagacccccctgaccatgctgcagagccaggtgcccaacatcgtgaaggccctgcacaagcagatgaaggagaagagcgtgaagaccagacagtgctgcttcaacatgctgaccgagctggtgaacgtgctgcccggcgccctgacccagcacatccccgtgctggtgcccggcatcatcttcagcctgaacgacaagagcagcagcagcaacctgaagatcgacgccctgagctgcctgtacgtgatcctgtgcaaccacagcccccaggtgttccacccccacgtgcaggccctggtgccccccgtggtggcctgcgtgggcgaccccttctacaagatcaccagcgaggccctgctggtgacccagcagctggtgaaggcccaccacatgcccgaggcccagtggctgagactgtag

SEQ ID NO: 198635 - protein, 581 aa, Artificial Sequence
  derived and/or modified sequence
MMTSVSSDHCRGAREKPQISAAQSTQPQKQVVQATAEQMRLAQVIFDKNDSDFEAKVKQLMEVTGKNQDECIVALHDCNGDVNKAINILLEGNSDTTSWETVGCKKKNFAKENSENKENREKKKHTGDLTSSPLSQLSSSLSSHQSSLSAHAALSSSTSHTHASVESASSHQSSATFSTAATSVSSSASSGASLSSSMNTANSLCLGGTPASASSSSSRAAPLVTSGKAPPNLPQGVPPLLHNQYLVGPGGLLPAYPIYGYDELQMLQSRLPVDYYGIPFAAPTALASRDGSLANNPYPGDVTKFGRGDSASPAPATTSSATAEPITDPPHSPAALRESCTATWSYTGLPYYTGMPSAFQYGPTMFVPPASAKQHGVNLSTPTPPFQQASGYGQHGYSTGYDDLTQGTAAGDYSKGGYAGSSQAPNKSAGSGPGKGVSVSSSTTGLPDMTGSVYNKTQTFDKQGFHAGTPPPFSLPSVLGSTGPLASGAAPGYAPPPFLHILPAHQQPHSQLLHHHLPQDAQSGSGQRSPAPCSPSLKPPNLPTLSILDKLNPEERGGLGQGLSWAGENTRARIWEPSALS

SEQ ID NO: 198636 - protein, 1119 aa, Artificial Sequence
  derived and/or modified sequence
MMTSVSSDHCRGAREKPQISAAQSTQPQKQVVQATAEQMRLAQVIFDKNDSDFEAKVKQLMEVTGKNQDECIVALHDCNGDVNKAINILLEGNSDTTSWETVGCKKKNFAKENSENKENREKKSEKESSRGRGNNNRKGRGGNRGREFRGEENGIDCNQVDKPSDRGKRARGRGFGRGRGRGAGRFSTQGMGTFNPADYSDSTSTDVCGTKLVVWEAAQNGADEGTELASNTHNIAQDLSNKSSYGLKGAWKNSVEEWTTEDWTEDLSETKVFTASSAPAENHILPGQSIDLVALLQKPVPHSQASEANSFETSQQQGFGQALVFTNSQHNNQMAPGTGSSTAVNSCSPQSLSSVLGSGFGELAPPKMANITSSQILDQLKAPSLGQFTTTPSTQQNSTSHPTTTTSWDLKPPTSQSSVLSHLDFKSQPEPSPVLSQLSQRQQHQSQAVTVPPPGLESFPSQAKLRESTPGDSPSTVNKLLQLPSTTIENISVSVHQPQPKHIKLAKRRIPPASKIPASAVEMPGSADVTGLNVQFGALEFGSEPSLSEFGSAPSSENSNQIPISLYSKSLSEPLNTSLSMTSAVQNSTYTTSVITSCSLTSSSLNSASPVAMSSSYDQSSVHNRIPYQSPVSSSESAPGTIMNGHGGGRSQQTLDTPKTTGPPSALPSVSSLPSTTSCTALLPSTSQHTGDLTSSPLSQLSSSLSSHQSSLSAHAALSSSTSHTHASVESASSHQSSATFSTAATSVSSSASSGASLSSSMNTANSLCLGGTPASASSSSSRAAPLVTSGKAPPNLPQGVPPLLHNQYLVGPGGLLPAYPIYGYDELQMLQSRLPVDYYGIPFAAPTALASRDGSLANNPYPGDVTKFGRGDSASPAPATTPAQPQQSQSQTHHTAQQPFVNPALPPGYSYTGLPYYTGMPSAFQYGPTMFVPPASAKQHGVNLSTPTPPFQQASGYGQHGYSTGYDDLTQGTAAGDYSKGGYAGSSQAPNKSAGSGPGKGVSVSSSTTGLPDMTGSVYNKTQTFDKQGFHAGTPPPFSLPSVLGSTGPLASGAAPGYAPPPFLHILPAHQQPHSQLLHHHLPQDAQSGSGQRSQPSSLQPKSQASKPAYGNSPYWTN

SEQ ID NO: 198637 - protein, 325 aa, Artificial Sequence
  derived and/or modified sequence
MANITSSQILDQLKAPSLGQFTTTPSTQQNSTSHPTTTTSWDLKPPTSQSSVLSHLDFKSQPEPSPVLSQLSQRQQHQSQAVTVPPPGLESFPSQAKLRESTPGDSPSTVNKLLQLPSTTIENISVSVHQPQPKHIKLAKRRIPPASKIPASAVEMPGSADVTGLNVQFGALEFGSEPSLSEFGSAPSSENSNQIPISLYSKSLSEPLNTSLSMTSAVQNSTYTTSVITSCSLTSSSLNSASPVAMSSSYDQSSVHNRIPYQSPVSSSESAPGTIMNGHGGGRSQQTLDSKYSSKLLLSWLVPTKQRKRIAHVMWKTPVGQWLIR

SEQ ID NO: 198638 - protein, 358 aa, Artificial Sequence
  derived and/or modified sequence
MNTANSLCLGGTPASASSSSSRAAPLVTSGKAPPNLPQGVPPLLHNQYLVGPGGLLPAYPIYGYDELQMLQSRLPVDYYGIPFAAPTALASRDGSLANNPYPGDVTKFGRGDSASPAPATTPAQPQQSQSQTHHTAQQPFVNPALPPGYSYTGLPYYTGMPSAFQYGPTMFVPPASAKQHGVNLSTPTPPFQQASGYGQHGYSTGYDDLTQGTAAGDYSKGGYAGSSQAPNKSAGSGPGKGVSVSSSTTGLPDMTGSVYNKTQTFDKQGFHAGTPPPFSLPSVLGSTGPLASGAAPGYAPPPFLHILPAHQQPHSQLLHHHLPQDAQSGSGQRSQPSSLQPKSQASKPAYGNSPYWTN

SEQ ID NO: 198639 - protein, 340 aa, Artificial Sequence
  derived and/or modified sequence
MEVTGKNQDECIVALHDCNGDVNKAINILLEGNSDTTSWETVGCKKKNFAKENSENKENREKKSEKESSRGRGNNNRKGRGGNRGREFRGEENGIDCNQVDKPSDRGKRARGRGFGRGRGRGAGRFSTQGMGTFNPADYSDSTSTDVCGTKLVVWEAAQNGADEGTGAWKNSVEEWTTEDWTEDLSETKVFTASSAPAENHILPGQSIDLVALLQKPVPHSQASEANSFETSQQQGFGQALVFTNSQHNNQMAPGTGSSTAVNSCSPQSLSSVLGSGFGELAPPKMANITSSQILDQLKAPSLGQFTTTPSTQQNSTSHPTTTTSWDLKPPTSQSSVLSH

SEQ ID NO: 198640 - protein, 412 aa, Artificial Sequence
  derived and/or modified sequence
MMTSVSSDHCRGAREKPQISAAQSTQPQKQVVQATAEQMRLAQVIFDKNDSDFEAKVKQLMEVTGKNQDECIVALHDCNGDVNKAINILLEGNSDTTSWETVGCKKKNFAKENSENKENREKKSEKESSRGRGNNNRKGRGGNRGREFRGEENGIDCNQVDKPSDRGKRARGRELASNTHNIAQDLSNKSSYGLKGAWKNSVEEWTTEDWTEDLSETKVFTASSAPAENHILPGQSIDLVALLQKPVPHSQASEANSFETSQQQGFGQALVFTNSQHNNQMAPGTGSSTAVNSCSPQSLSSVLGSGFGELAPPKMANITSSQILDQLKAPSLGQFTTTPSTQQNSTSHPTTTTSWDLKPPTSQSSVLSHLDFKSQPEPSPVLSQLSQRQQHQSQAVTVPPPGLESFPSQAKL

SEQ ID NO: 198641 - protein, 686 aa, Artificial Sequence
  derived and/or modified sequence
MMTSVSSDHCRGAREKPQISAAQSTQPQKQVVQATAEQMRLAQVIFDKNDSDFEAKVKQLMEVTGKNQDECIVALHDCNGDVNKAINILLEGNSDTTSWETVGCKKKNFAKENSENKENREKKSEKESSRGRGNNNRKGRGGNRGREFRGEENGIDCNQVDKPSDRGKRARGRELASNTHNIAQDLSNKSSYGLKGAWKNSVEEWTTEDWTEDLSETKVFTASSAPAENHILPGQSIDLVALLQKPVPHSQASEANSFETSQQQGFGQALVFTNSQHNNQMAPGTGSSTAVNSCSPQSLSSVLGSGFGELAPPKMANITSSQILDQLKAPSLGQFTTTPSTQQNSTSHPTTTTSWDLKPPTSQSSVLSHLDFKSQPEPSPVLSQLSQRQQHQSQAVTVPPPGLESFPSQAKLRESTPGDSPSTVNKLLQLPSTTIENISVSVHQPQPKHIKLAKRRIPPASKIPASAVEMPGSADVTGLNVQFGALEFGSEPSLSEFGSAPSSENSNQIPISLYSKSLSEPLNTSLSMTSAVQNSTYTTSVITSCSLTSSSLNSASPVAMSSSYDQSSVHNRIPYQSPVSSSESAPGTIMNGHGGGRSQQTLDTPKTTGPPSALPSVSSLPSTTSCTALLPSTSQHTGDLTSSPLSQLSSMPVWRAPLPTSPQPPSPRQRPPSQVPHPQAPACPVA

SEQ ID NO: 198642 - protein, 276 aa, Artificial Sequence
  derived and/or modified sequence
EKESSRGRGNNNRKGRGGNRGREFRGEENGIDCNQVDKPSDRGKRARGRGFGRGRGRGAGRFSTQGMGTFNPADYSDSTSTDVCGTKLVVWEAAQNGADEGTGAWKNSVEEWTTEDWTEDLSETKVFTASSAPAENHILPGQSIDLVALLQKPVPHSQASEANSFETSQQQGFGQALVFTNSQHNNQMAPGTGSSTAVNSCSPQSLSSVLGSGFGELAPPKMANITSSQILDQLKAPSLGQFTTTPSTQQNSTSHPTTTTSWDLKPPTSQSSVLSH

SEQ ID NO: 198643 - DNA, 3360 bp, Artificial Sequence
  derived and/or modified sequence
atgatgaccagcgtgagcagcgaccactgcagaggcgccagagagaagccccagatcagcgccgcccagagcacccagccccagaagcaggtggtgcaggccaccgccgagcagatgagactggcccaggtgatcttcgacaagaacgacagcgacttcgaggccaaggtgaagcagctgatggaggtgaccggcaagaaccaggacgagtgcatcgtggccctgcacgactgcaacggcgacgtgaacaaggccatcaacatcctgctggagggcaacagcgacaccaccagctgggagaccgtgggctgcaagaagaagaacttcgccaaggagaacagcgagaacaaggagaacagagagaagaagagcgagaaggagagcagcagaggcagaggcaacaacaacagaaagggcagaggcggcaacagaggcagagagttcagaggcgaggagaacggcatcgactgcaaccaggtggacaagcccagcgacagaggcaagagagccagaggcagaggcttcggcagaggcagaggcagaggcgccggcagattcagcacccagggcatgggcaccttcaaccccgccgactacagcgacagcaccagcaccgacgtgtgcggcaccaagctggtggtgtgggaggccgcccagaacggcgccgacgagggcaccgagctggccagcaacacccacaacatcgcccaggacctgagcaacaagagcagctacggcctgaagggcgcctggaagaacagcgtggaggagtggaccaccgaggactggaccgaggacctgagcgagaccaaggtgttcaccgccagcagcgcccccgccgagaaccacatcctgcccggccagagcatcgacctggtggccctgctgcagaagcccgtgccccacagccaggccagcgaggccaacagcttcgagaccagccagcagcagggcttcggccaggccctggtgttcaccaacagccagcacaacaaccagatggcccccggcaccggcagcagcaccgccgtgaacagctgcagcccccagagcctgagcagcgtgctgggcagcggcttcggcgagctggccccccccaagatggccaacatcaccagcagccagatcctggaccagctgaaggcccccagcctgggccagttcaccaccacccccagcacccagcagaacagcaccagccaccccaccaccaccaccagctgggacctgaagccccccaccagccagagcagcgtgctgagccacctggacttcaagagccagcccgagcccagccccgtgctgagccagctgagccagagacagcagcaccagagccaggccgtgaccgtgcccccccccggcctggagagcttccccagccaggccaagctgagagagagcacccccggcgacagccccagcaccgtgaacaagctgctgcagctgcccagcaccaccatcgagaacatcagcgtgagcgtgcaccagccccagcccaagcacatcaagctggccaagagaagaatcccccccgccagcaagatccccgccagcgccgtggagatgcccggcagcgccgacgtgaccggcctgaacgtgcagttcggcgccctggagttcggcagcgagcccagcctgagcgagttcggcagcgcccccagcagcgagaacagcaaccagatccccatcagcctgtacagcaagagcctgagcgagcccctgaacaccagcctgagcatgaccagcgccgtgcagaacagcacctacaccaccagcgtgatcaccagctgcagcctgaccagcagcagcctgaacagcgccagccccgtggccatgagcagcagctacgaccagagcagcgtgcacaacagaatcccctaccagagccccgtgagcagcagcgagagcgcccccggcaccatcatgaacggccacggcggcggcagaagccagcagaccctggacacccccaagaccaccggcccccccagcgccctgcccagcgtgagcagcctgcccagcaccaccagctgcaccgccctgctgcccagcaccagccagcacaccggcgacctgaccagcagccccctgagccagctgagcagcagcctgagcagccaccagagcagcctgagcgcccacgccgccctgagcagcagcaccagccacacccacgccagcgtggagagcgccagcagccaccagagcagcgccaccttcagcaccgccgccaccagcgtgagcagcagcgccagcagcggcgccagcctgagcagcagcatgaacaccgccaacagcctgtgcctgggcggcacccccgccagcgccagcagcagcagcagcagagccgcccccctggtgaccagcggcaaggccccccccaacctgccccagggcgtgccccccctgctgcacaaccagtacctggtgggccccggcggcctgctgcccgcctaccccatctacggctacgacgagctgcagatgctgcagagcagactgcccgtggactactacggcatccccttcgccgcccccaccgccctggccagcagagacggcagcctggccaacaacccctaccccggcgacgtgaccaagttcggcagaggcgacagcgccagccccgcccccgccaccacccccgcccagccccagcagagccagagccagacccaccacaccgcccagcagcccttcgtgaaccccgccctgccccccggctacagctacaccggcctgccctactacaccggcatgcccagcgccttccagtacggccccaccatgttcgtgccccccgccagcgccaagcagcacggcgtgaacctgagcacccccaccccccccttccagcaggccagcggctacggccagcacggctacagcaccggctacgacgacctgacccagggcaccgccgccggcgactacagcaagggcggctacgccggcagcagccaggcccccaacaagagcgccggcagcggccccggcaagggcgtgagcgtgagcagcagcaccaccggcctgcccgacatgaccggcagcgtgtacaacaagacccagaccttcgacaagcagggcttccacgccggcacccccccccccttcagcctgcccagcgtgctgggcagcaccggccccctggccagcggcgccgcccccggctacgcccccccccccttcctgcacatcctgcccgcccaccagcagccccacagccagctgctgcaccaccacctgccccaggacgcccagagcggcagcggccagagaagccagcccagcagcctgcagcccaagagccaggccagcaagcccgcctacggcaacagcccctactggaccaactag

SEQ ID NO: 198644 - DNA, 1023 bp, Artificial Sequence
  derived and/or modified sequence
atggaggtgaccggcaagaaccaggacgagtgcatcgtggccctgcacgactgcaacggcgacgtgaacaaggccatcaacatcctgctggagggcaacagcgacaccaccagctgggagaccgtgggctgcaagaagaagaacttcgccaaggagaacagcgagaacaaggagaacagagagaagaagagcgagaaggagagcagcagaggcagaggcaacaacaacagaaagggcagaggcggcaacagaggcagagagttcagaggcgaggagaacggcatcgactgcaaccaggtggacaagcccagcgacagaggcaagagagccagaggcagaggcttcggcagaggcagaggcagaggcgccggcagattcagcacccagggcatgggcaccttcaaccccgccgactacagcgacagcaccagcaccgacgtgtgcggcaccaagctggtggtgtgggaggccgcccagaacggcgccgacgagggcaccggcgcctggaagaacagcgtggaggagtggaccaccgaggactggaccgaggacctgagcgagaccaaggtgttcaccgccagcagcgcccccgccgagaaccacatcctgcccggccagagcatcgacctggtggccctgctgcagaagcccgtgccccacagccaggccagcgaggccaacagcttcgagaccagccagcagcagggcttcggccaggccctggtgttcaccaacagccagcacaacaaccagatggcccccggcaccggcagcagcaccgccgtgaacagctgcagcccccagagcctgagcagcgtgctgggcagcggcttcggcgagctggccccccccaagatggccaacatcaccagcagccagatcctggaccagctgaaggcccccagcctgggccagttcaccaccacccccagcacccagcagaacagcaccagccaccccaccaccaccaccagctgggacctgaagccccccaccagccagagcagcgtgctgagccactag

SEQ ID NO: 198645 - DNA, 1239 bp, Artificial Sequence
  derived and/or modified sequence
atgatgaccagcgtgagcagcgaccactgcagaggcgccagagagaagccccagatcagcgccgcccagagcacccagccccagaagcaggtggtgcaggccaccgccgagcagatgagactggcccaggtgatcttcgacaagaacgacagcgacttcgaggccaaggtgaagcagctgatggaggtgaccggcaagaaccaggacgagtgcatcgtggccctgcacgactgcaacggcgacgtgaacaaggccatcaacatcctgctggagggcaacagcgacaccaccagctgggagaccgtgggctgcaagaagaagaacttcgccaaggagaacagcgagaacaaggagaacagagagaagaagagcgagaaggagagcagcagaggcagaggcaacaacaacagaaagggcagaggcggcaacagaggcagagagttcagaggcgaggagaacggcatcgactgcaaccaggtggacaagcccagcgacagaggcaagagagccagaggcagagagctggccagcaacacccacaacatcgcccaggacctgagcaacaagagcagctacggcctgaagggcgcctggaagaacagcgtggaggagtggaccaccgaggactggaccgaggacctgagcgagaccaaggtgttcaccgccagcagcgcccccgccgagaaccacatcctgcccggccagagcatcgacctggtggccctgctgcagaagcccgtgccccacagccaggccagcgaggccaacagcttcgagaccagccagcagcagggcttcggccaggccctggtgttcaccaacagccagcacaacaaccagatggcccccggcaccggcagcagcaccgccgtgaacagctgcagcccccagagcctgagcagcgtgctgggcagcggcttcggcgagctggccccccccaagatggccaacatcaccagcagccagatcctggaccagctgaaggcccccagcctgggccagttcaccaccacccccagcacccagcagaacagcaccagccaccccaccaccaccaccagctgggacctgaagccccccaccagccagagcagcgtgctgagccacctggacttcaagagccagcccgagcccagccccgtgctgagccagctgagccagagacagcagcaccagagccaggccgtgaccgtgcccccccccggcctggagagcttccccagccaggccaagctgtag

SEQ ID NO: 198646 - DNA, 2061 bp, Artificial Sequence
  derived and/or modified sequence
atgatgaccagcgtgagcagcgaccactgcagaggcgccagagagaagccccagatcagcgccgcccagagcacccagccccagaagcaggtggtgcaggccaccgccgagcagatgagactggcccaggtgatcttcgacaagaacgacagcgacttcgaggccaaggtgaagcagctgatggaggtgaccggcaagaaccaggacgagtgcatcgtggccctgcacgactgcaacggcgacgtgaacaaggccatcaacatcctgctggagggcaacagcgacaccaccagctgggagaccgtgggctgcaagaagaagaacttcgccaaggagaacagcgagaacaaggagaacagagagaagaagagcgagaaggagagcagcagaggcagaggcaacaacaacagaaagggcagaggcggcaacagaggcagagagttcagaggcgaggagaacggcatcgactgcaaccaggtggacaagcccagcgacagaggcaagagagccagaggcagagagctggccagcaacacccacaacatcgcccaggacctgagcaacaagagcagctacggcctgaagggcgcctggaagaacagcgtggaggagtggaccaccgaggactggaccgaggacctgagcgagaccaaggtgttcaccgccagcagcgcccccgccgagaaccacatcctgcccggccagagcatcgacctggtggccctgctgcagaagcccgtgccccacagccaggccagcgaggccaacagcttcgagaccagccagcagcagggcttcggccaggccctggtgttcaccaacagccagcacaacaaccagatggcccccggcaccggcagcagcaccgccgtgaacagctgcagcccccagagcctgagcagcgtgctgggcagcggcttcggcgagctggccccccccaagatggccaacatcaccagcagccagatcctggaccagctgaaggcccccagcctgggccagttcaccaccacccccagcacccagcagaacagcaccagccaccccaccaccaccaccagctgggacctgaagccccccaccagccagagcagcgtgctgagccacctggacttcaagagccagcccgagcccagccccgtgctgagccagctgagccagagacagcagcaccagagccaggccgtgaccgtgcccccccccggcctggagagcttccccagccaggccaagctgagagagagcacccccggcgacagccccagcaccgtgaacaagctgctgcagctgcccagcaccaccatcgagaacatcagcgtgagcgtgcaccagccccagcccaagcacatcaagctggccaagagaagaatcccccccgccagcaagatccccgccagcgccgtggagatgcccggcagcgccgacgtgaccggcctgaacgtgcagttcggcgccctggagttcggcagcgagcccagcctgagcgagttcggcagcgcccccagcagcgagaacagcaaccagatccccatcagcctgtacagcaagagcctgagcgagcccctgaacaccagcctgagcatgaccagcgccgtgcagaacagcacctacaccaccagcgtgatcaccagctgcagcctgaccagcagcagcctgaacagcgccagccccgtggccatgagcagcagctacgaccagagcagcgtgcacaacagaatcccctaccagagccccgtgagcagcagcgagagcgcccccggcaccatcatgaacggccacggcggcggcagaagccagcagaccctggacacccccaagaccaccggcccccccagcgccctgcccagcgtgagcagcctgcccagcaccaccagctgcaccgccctgctgcccagcaccagccagcacaccggcgacctgaccagcagccccctgagccagctgagcagcatgcccgtgtggagagcccccctgcccaccagcccccagccccccagccccagacagagaccccccagccaggtgccccacccccaggcccccgcctgccccgtggcctag

SEQ ID NO: 198647 - DNA, 831 bp, Artificial Sequence
  derived and/or modified sequence
gagaaggagagcagcagaggcagaggcaacaacaacagaaagggcagaggcggcaacagaggcagagagttcagaggcgaggagaacggcatcgactgcaaccaggtggacaagcccagcgacagaggcaagagagccagaggcagaggcttcggcagaggcagaggcagaggcgccggcagattcagcacccagggcatgggcaccttcaaccccgccgactacagcgacagcaccagcaccgacgtgtgcggcaccaagctggtggtgtgggaggccgcccagaacggcgccgacgagggcaccggcgcctggaagaacagcgtggaggagtggaccaccgaggactggaccgaggacctgagcgagaccaaggtgttcaccgccagcagcgcccccgccgagaaccacatcctgcccggccagagcatcgacctggtggccctgctgcagaagcccgtgccccacagccaggccagcgaggccaacagcttcgagaccagccagcagcagggcttcggccaggccctggtgttcaccaacagccagcacaacaaccagatggcccccggcaccggcagcagcaccgccgtgaacagctgcagcccccagagcctgagcagcgtgctgggcagcggcttcggcgagctggccccccccaagatggccaacatcaccagcagccagatcctggaccagctgaaggcccccagcctgggccagttcaccaccacccccagcacccagcagaacagcaccagccaccccaccaccaccaccagctgggacctgaagccccccaccagccagagcagcgtgctgagccactag

SEQ ID NO: 198648 - DNA, 3087 bp, Artificial Sequence
  derived and/or modified sequence
atgagactggcccaggtgatcttcgacaagaacgacagcgacttcgaggccaaggtgaagcagctgatggaggtgaccggcaagaaccaggacgagtgcatcgtggccctgcacgactgcaacggcgacgtgaacaaggccatcaacatcctgctggagggcaacagcgacaccaccagctgggagaccgtgggctgcaagaagaagaacttcgccaaggagaacagcgagaacaaggagaacagagagaagaagagcgagaaggagagcagcagaggcagaggcaacaacaacagaaagggcagaggcggcaacagaggcagagagttcagaggcgaggagaacggcatcgactgcaaccaggtggacaagcccagcgacagaggcaagagagccagaggcagagagctggccagcaacacccacaacatcgcccaggacctgagcaacaagagcagctacggcctgaagggcgcctggaagaacagcgtggaggagtggaccaccgaggactggaccgaggacctgagcgagaccaaggtgttcaccgccagcagcgcccccgccgagaaccacatcctgcccggccagagcatcgacctggtggccctgctgcagaagcccgtgccccacagccaggccagcgaggccaacagcttcgagaccagccagcagcagggcttcggccaggccctggtgttcaccaacagccagcacaacaaccagatggcccccggcaccggcagcagcaccgccgtgaacagctgcagcccccagagcctgagcagcgtgctgggcagcggcttcggcgagctggccccccccaagatggccaacatcaccagcagccagatcctggaccagctgaaggcccccagcctgggccagttcaccaccacccccagcacccagcagaacagcaccagccaccccaccaccaccaccagctgggacctgaagccccccaccagccagagcagcgtgctgagccacctggacttcaagagccagcccgagcccagccccgtgctgagccagctgagccagagacagcagcaccagagccaggccgtgaccgtgcccccccccggcctggagagcttccccagccaggccaagctgagagagagcacccccggcgacagccccagcaccgtgaacaagctgctgcagctgcccagcaccaccatcgagaacatcagcgtgagcgtgcaccagccccagcccaagcacatcaagctggccaagagaagaatcccccccgccagcaagatccccgccagcgccgtggagatgcccggcagcgccgacgtgaccggcctgaacgtgcagttcggcgccctggagttcggcagcgagcccagcctgagcgagttcggcagcgcccccagcagcgagaacagcaaccagatccccatcagcctgtacagcaagagcctgagcgagcccctgaacaccagcctgagcatgaccagcgccgtgcagaacagcacctacaccaccagcgtgatcaccagctgcagcctgaccagcagcagcctgaacagcgccagccccgtggccatgagcagcagctacgaccagagcagcgtgcacaacagaatcccctaccagagccccgtgagcagcagcgagagcgcccccggcaccatcatgaacggccacggcggcggcagaagccagcagaccctggacacccccaagaccaccggcccccccagcgccctgcccagcgtgagcagcctgcccagcaccaccagctgcaccgccctgctgcccagcaccagccagcacaccggcgacctgaccagcagccccctgagccagctgagcagcagcctgagcagccaccagagcagcctgagcgcccacgccgccctgagcagcagcaccagccacacccacgccagcgtggagagcgccagcagccaccagagcagcgccaccttcagcaccgccgccaccagcgtgagcagcagcgccagcagcggcgccagcctgagcagcagcatgaacaccgccaacagcctgtgcctgggcggcacccccgccagcgccagcagcagcagcagcagagccgcccccctggtgaccagcggcaaggccccccccaacctgccccagggcgtgccccccctgctgcacaaccagtacctggtgggccccggcggcctgctgcccgcctaccccatctacggctacgacgagctgcagatgctgcagagcagactgcccgtggactactacggcatccccttcgccgcccccaccgccctggccagcagagacggcagcctggccaacaacccctaccccggcgacgtgaccaagttcggcagaggcgacagcgccagccccgcccccgccaccacccccgcccagccccagcagagccagagccagacccaccacaccgcccagcagcccttcgtgaaccccgccctgccccccggctacagctacaccggcctgccctactacaccggcatgcccagcgccttccagtacggccccaccatgttcgtgccccccgccagcgccaagcagcacggcgtgaacctgagcacccccaccccccccttccagcaggccagcggctacggccagcacggctacagcaccggctacgacgacctgacccagggcaccgccgccggcgactacagcaagggcggctacgccggcagcagccaggcccccaacaagagcgccggcagcggccccggcaagggcgtgagcgtgagcagcagcaccaccggcctgcccgacatgaccggcagcgtgtacaacaagacccagaccttcgacaagcagggcttccacgccggcacccccccccccttcagcctgcccagcgtgctgggcagcaccggccccctggccagcggcgccgcccccggctacgcccccccccccttcctgcacatcctgcccgcccaccagcagccccacagccagctgctgcaccaccacctgccccaggacgcccagagcggcagcggccagagaagccagcccagcagcctgcagcccaagagccaggccagcaagcccgcctacggcaacagcccctactggaccaactag

SEQ ID NO: 198649 - DNA, 2625 bp, Artificial Sequence
  derived and/or modified sequence
atgagactggcccaggtgatcttcgacaagaacgacagcgacttcgaggccaaggtgaagcagctgagcgagaccaaggtgttcaccgccagcagcgcccccgccgagaaccacatcctgcccggccagagcatcgacctggtggccctgctgcagaagcccgtgccccacagccaggccagcgaggccaacagcttcgagaccagccagcagcagggcttcggccaggccctggtgttcaccaacagccagcacaacaaccagatggcccccggcaccggcagcagcaccgccgtgaacagctgcagcccccagagcctgagcagcgtgctgggcagcggcttcggcgagctggccccccccaagatggccaacatcaccagcagccagatcctggaccagctgaaggcccccagcctgggccagttcaccaccacccccagcacccagcagaacagcaccagccaccccaccaccaccaccagctgggacctgaagccccccaccagccagagcagcgtgctgagccacctggacttcaagagccagcccgagcccagccccgtgctgagccagctgagccagagacagcagcaccagagccaggccgtgaccgtgcccccccccggcctggagagcttccccagccaggccaagctgagagagagcacccccggcgacagccccagcaccgtgaacaagctgctgcagctgcccagcaccaccatcgagaacatcagcgtgagcgtgcaccagccccagcccaagcacatcaagctggccaagagaagaatcccccccgccagcaagatccccgccagcgccgtggagatgcccggcagcgccgacgtgaccggcctgaacgtgcagttcggcgccctggagttcggcagcgagcccagcctgagcgagttcggcagcgcccccagcagcgagaacagcaaccagatccccatcagcctgtacagcaagagcctgagcgagcccctgaacaccagcctgagcatgaccagcgccgtgcagaacagcacctacaccaccagcgtgatcaccagctgcagcctgaccagcagcagcctgaacagcgccagccccgtggccatgagcagcagctacgaccagagcagcgtgcacaacagaatcccctaccagagccccgtgagcagcagcgagagcgcccccggcaccatcatgaacggccacggcggcggcagaagccagcagaccctggacacccccaagaccaccggcccccccagcgccctgcccagcgtgagcagcctgcccagcaccaccagctgcaccgccctgctgcccagcaccagccagcacaccggcgacctgaccagcagccccctgagccagctgagcagcagcctgagcagccaccagagcagcctgagcgcccacgccgccctgagcagcagcaccagccacacccacgccagcgtggagagcgccagcagccaccagagcagcgccaccttcagcaccgccgccaccagcgtgagcagcagcgccagcagcggcgccagcctgagcagcagcatgaacaccgccaacagcctgtgcctgggcggcacccccgccagcgccagcagcagcagcagcagagccgcccccctggtgaccagcggcaaggccccccccaacctgccccagggcgtgccccccctgctgcacaaccagtacctggtgggccccggcggcctgctgcccgcctaccccatctacggctacgacgagctgcagatgctgcagagcagactgcccgtggactactacggcatccccttcgccgcccccaccgccctggccagcagagacggcagcctggccaacaacccctaccccggcgacgtgaccaagttcggcagaggcgacagcgccagccccgcccccgccaccacccccgcccagccccagcagagccagagccagacccaccacaccgcccagcagcccttcgtgaaccccgccctgccccccggctacagctacaccggcctgccctactacaccggcatgcccagcgccttccagtacggccccaccatgttcgtgccccccgccagcgccaagcagcacggcgtgaacctgagcacccccaccccccccttccagcaggccagcggctacggccagcacggctacagcaccggctacgacgacctgacccagggcaccgccgccggcgactacagcaagggcggctacgccggcagcagccaggcccccaacaagagcgccggcagcggccccggcaagggcgtgagcgtgagcagcagcaccaccggcctgcccgacatgaccggcagcgtgtacaacaagacccagaccttcgacaagcagggcttccacgccggcacccccccccccttcagcctgcccagcgtgctgggcagcaccggccccctggccagcggcgccgcccccggctacgcccccccccccttcctgcacatcctgcccgcccaccagcagccccacagccagctgctgcaccaccacctgccccaggacgcccagagcggcagcggccagagaagccagcccagcagcctgcagcccaagagccaggccagcaagcccgcctacggcaacagcccctactggaccaactag

SEQ ID NO: 198650 - DNA, 3360 bp, Artificial Sequence
  derived and/or modified sequence
atgatgacctcggttagcagcgatcactgccggggcgccagggaaaaaccccagatttctgctgcgcagagtacccagccacaaaagcaggtggtgcaggccaccgccgagcagatgcgcctagctcaggtgatctttgataagaatgatagcgactttgaggccaaagttaagcagctgatggaggttacgggcaaaaaccaggacgagtgcattgtggctttacatgattgcaatggtgatgttaacaaggcaatcaacatcctcctggaaggtaatagtgacactacatcctgggagactgtgggctgtaagaaaaagaacttcgctaaggagaattcagagaacaaggaaaacagggaaaaaaaaagcgagaaggagagcagccgaggcagggggaacaacaaccgcaaaggaaggggcggaaaccgaggtcgcgaattccgtggggaggagaatggaatagactgtaatcaagtggataaaccaagcgaccgcggaaaacgcgcacgagggagagggttcggacgcggccggggaagaggtgccggtaggttcagcacacaggggatgggaacattcaacccagccgattactctgattctaccagtacagatgtctgcggaacaaaactcgtcgtctgggaagcagcccaaaatggtgccgacgaggggacagagttggctagcaatacccacaatattgcacaagatttgtctaacaaatcaagttacggactgaagggcgcctggaaaaatagtgtcgaagagtggactactgaggactggacagaagacctgtcagagaccaaggtcttcacggcttcctccgcgcccgcagaaaatcacattctgccaggtcagtcaatagacttggtggcccttctgcagaaacccgtgcctcatagccaggctagtgaagcaaactcttttgaaaccagccagcaacagggctttggccaggcactcgtgtttacaaacagccaacacaacaaccagatggctccagggactgggtctagcactgctgtaaatagctgcagccctcagtctttgagcagcgtgctcggatcaggcttcggagagcttgcacctcctaagatggccaatattacttccagccagattcttgatcagttgaaagcaccctcgctgggccagtttaccaccacaccctcgacacaacagaactcaacatcacatcctactacgaccacgagctgggacctgaaaccgcctacctcacaaagttccgtgctttctcatttggacttcaagtcacagcctgagcctagtccagtcctgtcacagttgtcacagagacaacaacaccagtcgcaggcagttactgtgcctcctcccggcctggagtccttccccagccaagcaaaattgagagaatctacaccgggtgactcgccatccacggtaaacaagctgctccagctgccttcgaccaccatcgagaacatttctgtgtctgtccaccagcctcagcctaagcatattaagctcgccaagcgtaggataccgcctgcctcgaagatcccagctagcgctgtggaaatgccaggctcagcagatgtgactggcctcaacgtacaattcggagccctggagttcggctcagaaccttcactgtctgaatttggctccgctccatcctcggagaactccaatcagatccccattagcctgtacagtaagtcactcagtgagccacttaatacatcgctgagtatgacttctgcggtgcagaatagtacatacacaactagtgtcatcacaagctgttctctgacctcgtccagtctgaactcagccagccccgtggctatgtcctctagttatgaccagagtagcgtacacaatcggataccttatcagagtccggtgtcttcctcagagtcggcgccggggactatcatgaatggtcatggtggaggcaggtctcaacagacattggacaccccaaagacaactggccccccaagtgctctcccttccgtgtcatctctcccaagcacgaccagttgtactgcactgttgccaagcacctcgcagcatacaggagacctcacctcatcgcctctctcacagctcagttcttccctcagttcacatcagagttctttgtcagcgcacgccgcactgtccagctccacttcacacactcacgcttccgtcgaatcagcatcaagccatcagtcttccgcaactttttccacggctgcaacctctgtttcttcttctgcttcttctggcgcctcactcagcagcagcatgaatactgccaatagtctgtgcctcggcggtacacccgcaagcgctagcagcagctcaagtcgtgcagcacctttagtcaccagcgggaaggccccaccaaacctgccccagggcgtcccccctctcctccacaaccagtatctggtggggccagggggcctcctgccggcctacccaatctatgggtatgacgaacttcagatgctgcagtctagactaccggtcgactactatgggatacccttcgcagcacctactgccctcgcgtctagagatggttctctcgccaacaatccttatcccggggatgttacgaaatttggccgcggggactctgcctcgcccgcacctgctaccacccctgctcagccgcagcagtcacagtctcagactcatcatacagcacaacagccttttgtaaatcctgccctgccccccggctatagctataccggattaccatattatacaggcatgccaagtgcgtttcagtatggccccacgatgtttgtgccgccggcctcggccaagcaacacggagtgaatctgtctactccaactcccccgttccagcaagcatccggatatggacagcacggatattcaaccgggtatgacgatctgacacagggaacagctgcaggcgattacagcaaaggggggtatgccgggagcagtcaggcccctaacaagagcgccggatccggaccagggaaaggcgtgtccgtgagttcctcaaccacaggcctccccgacatgacagggtctgtgtacaataaaacccagaccttcgacaaacaggggttccacgccggcacccctccacctttctcacttccctccgtcctcggaagcacggggcccctggccagcggagcagctcctggatacgcccctcccccatttctgcatatcctcccggcccaccagcagccacactcccagctgctccaccaccacttaccgcaggacgcccaaagcggtagcggtcagagatctcagccttcttcattacagcctaagtcccaggctagcaagccggcctatggaaactcaccatactggaccaactag

SEQ ID NO: 198651 - DNA, 3360 bp, Artificial Sequence
  derived and/or modified sequence
atgatgacttccgtgtccagtgatcactgtcgcggggcaagagagaaaccacagattagcgctgcacagagtacacaacctcagaagcaggtggtacaggcgactgctgagcaaatgcgccttgcgcaggtgatctttgacaagaacgattcagatttcgaagccaaagtcaaacagctgatggaggtcacaggaaaaaaccaagatgagtgcatcgtagcactgcacgattgcaacggtgatgtaaataaggcgatcaacattcttctcgagggcaatagcgatacaacctcctgggagacagttggctgtaagaaaaagaatttcgccaaagagaatagcgagaacaaagagaacagagagaaaaaaagcgaaaaggagtcctcccgcggtaggggtaataataatcgcaagggaaggggggggaatcgcggtcgggagtttagaggcgaagagaatggcatcgattgcaatcaggttgacaagccatcagatagaggcaaacgcgccaggggacgcggattcggccgcggacggggacgcggagctggaaggttcagcacccaaggcatgggaacatttaaccccgctgactactccgactccacctccacagacgtgtgcggcactaaactggtagtgtgggaagcagcccagaatggcgccgatgagggtaccgagttggcctctaacacacataacattgcacaggacctgagcaataagagttcttatggactcaaaggcgcctggaaaaattcagtggaggagtggaccacagaggactggacggaggacctcagcgagacaaaggtcttcaccgcttcctccgcccctgctgagaaccatatccttcccggtcaatcaattgacctagtggctctgctgcagaaaccggtgccccattcccaggcctcggaagctaattcttttgagacaagccagcagcaagggttcggacaagccttagtctttaccaatagtcagcacaataaccagatggccccaggcacggggtcaagtacagcggtcaattcttgctcccctcagtccttgtcatcggtgctcggatcagggttcggtgagctcgccccacccaagatggcaaacataacctctagtcagatcctagatcaactgaaggcccctagtttaggccagtttaccaccacaccttccacacaacagaattcaacatcacaccctacaaccacaacctcatgggacctcaagccgcccacctctcagtcctccgttctgagccatctggatttcaagtctcaacctgagccgtcacctgtgctctcccagttatcccaaaggcagcagcatcagagtcaggccgtgactgtgcccccacctgggctggaatctttcccttctcaggcgaaactgcgcgaatcaactccaggcgactcaccctctaccgtcaacaagctgctgcagctgccttcgaccacaattgaaaatatatccgtgagtgtccaccagccccaacctaagcacataaagctggcaaaacgtaggatcccccctgcaagcaaaatccccgccagcgccgtggaaatgccgggttctgccgacgtgactgggctcaacgtccaattcggcgcccttgagttcggcagcgaacccagtttatctgagttcggctccgcgccatcttccgagaactccaatcagattcctatcagcctttattctaaaagtttgagcgaaccccttaacactagcctgtcgatgacatcagccgtccaaaacagcacatatactacatccgtaatcaccagttgcagcttaacatcctctagcctcaattctgcgtctcctgtcgccatgagcagctcttatgaccagtccagcgtccataacaggattccctaccaatctcccgtgagctcctcggaatctgcccccggcactatcatgaacggtcatggaggaggccgctctcagcaaacactggacacccctaaaaccactggaccgcccagcgccctgccaagtgtgagcagtctgccttccaccacatcctgtacagcactcttgcccagcactagccagcacaccggcgacttgaccagttcgcctctgtcccaactctcatcctccctttcatctcaccagtccagcttgtctgcccacgcagccctcagctcttccacatcgcacacccacgcttcagtggagtcagcatccagccatcaatcctctgctacattcagtaccgccgcgacttccgtatcttcatccgcatctagcggcgccagtttgtcatcgagcatgaataccgccaactccctgtgtttgggtggcacgcctgcctctgctagctctagttcttctagagcagcgcccctggtgacttccggtaaagcacctcctaatcttccgcagggagttcctcccctgctccataatcagtatctggttggtcccggcgggctactacctgcttacccaatctatgggtacgacgaactgcaaatgctgcaatcgaggctgcctgtcgattactatgggattcccttcgccgcgcccaccgctttggcctctagagatggaagcttggccaataatccctaccctggggatgtgacaaagttcggaaggggggattcagctagtccagcaccagccaccacccccgcccaacctcagcagtctcaatctcaaacccatcatacagcccagcagccgttcgtgaatccagccctcccaccaggctactcatatactggcctgccctactacaccggcatgccctcagcctttcagtacggaccgactatgtttgtaccaccagcgagtgcgaaacagcatggtgttaatctgtccaccccaacgcctccatttcagcaggcttccggttacggtcagcatggctactccacaggatatgatgaccttacacagggcacagctgctggggattattctaaggggggctatgctgggtctagccaggctcccaacaagagtgcaggcagcggcccaggtaagggggtctccgtgtcaagttctactacaggcctcccggatatgacgggttccgtttacaacaaaactcagacatttgacaagcaaggcttccatgcagggactccccctccatttagcctgcccagcgtgctgggctcaacaggtcccttagcttcaggggcagctcctggttacgcacctcctccattcctgcacatactcccagcccaccagcaacctcacagccagctgctacaccaccacctgcctcaggacgcccagtctggctccggtcaacggagccaaccttctagcctacagccaaaatcccaagcctctaagcccgcctatggaaactcaccctattggactaattag

SEQ ID NO: 198652 - DNA, 1023 bp, Artificial Sequence
  derived and/or modified sequence
atggaggtgactggaaagaatcaggacgagtgcattgtagctctgcacgactgtaatggggacgtgaataaggcgattaacatcttgttggaaggtaatagcgacacaactagttgggaaaccgttggatgcaaaaagaaaaactttgctaaagagaatagcgagaataaggagaacagagagaagaaaagcgaaaaggagagctccaggggaagaggcaataataacagaaaaggcaggggcggaaaccgaggtagagaatttagaggcgaggagaacggaatcgactgtaatcaagtggataagccatctgatcgagggaaacgtgcaagaggtagagggtttggccgaggcaggggccgcggggctgggagatttagtactcaggggatgggcacatttaacccagcggactattcagattctacatccaccgatgtgtgcgggactaagctggttgtgtgggaagccgcccaaaatggcgctgatgaagggacaggcgcatggaagaacagcgtggaagagtggaccacagaggactggacggaggacctgagcgagaccaaagtctttacagcttctagcgccccggcagaaaatcacattctgcccggccagtctatcgacctggtagcactgctccagaagccagtgccccacagccaggcctctgaggccaactctttcgagacttcccagcaacagggatttgggcaggcgcttgtctttactaacagccagcataacaatcagatggcccctgggaccggaagttctaccgcagttaattcttgttccccacagtccctcagctcagtcctgggctctggattcggagagctggcgccccccaagatggccaatattacctcttcacagatcctggaccagctcaaagcgcctagcttgggccagtttaccactactccttccacccagcagaatagcaccagccatcccacaacaacaacttcgtgggatctgaagcccccaacgagccagagttccgtgctgtcccactag

SEQ ID NO: 198653 - DNA, 1239 bp, Artificial Sequence
  derived and/or modified sequence
atgatgacctccgtttcaagtgaccattgtaggggcgctagggagaaaccacaaatctcagccgcccagtccacacagccccagaaacaggtggtgcaggcaaccgccgagcagatgcggctggcccaggtgatcttcgacaagaatgatagtgactttgaagccaaagtaaaacagcttatggaggtgactggaaagaaccaggacgaatgtatagtggcacttcatgattgtaacggcgatgttaataaggcgattaacatcctgctggaaggaaactctgacacaacctcttgggagacggtgggctgcaagaagaagaatttcgctaaggagaacagcgagaataaggaaaatagggaaaaaaaatccgaaaaggagtcttcaagagggaggggaaataacaacaggaaagggcggggcggtaatcgaggacgcgagttcaggggagaggaaaatggcatcgactgtaaccaggttgataagccatccgaccgcggtaagagggcacggggcagggaactagcctccaacactcacaacatagctcaggatctttccaacaagtcttcatacggcctgaaaggcgcgtggaaaaacagcgtagaggaatggacgacagaagactggactgaggatttatccgagaccaaggtctttacagcatcaagcgctcctgctgaaaatcatatcctcccaggccagagtattgacctcgtggcccttcttcagaaacctgtccctcactcacaggctagtgaagcaaacagttttgagacatcacagcagcaggggttcggccaagcactcgtgttcacaaatagccagcataacaatcagatggcaccaggcacaggtagctcaacagccgtgaacagttgctcaccacaatcgttatcttctgtgcttggctcaggattcggagagctggccccgccaaagatggctaacatcacctcctctcagattttggatcagcttaaagctccttccctcggacaattcaccacgactccctccacgcagcaaaacagtacatcacatcccaccacaaccacgagttgggatctgaagccccccacatcacaatcttccgtgctatcacacctggattttaagtctcagcctgagccctcacctgtcctgagtcagctatctcagagacaacaacatcagtctcaggcagtgaccgtgcctcctccgggcctggagtcattcccttctcaggcaaaactatag

SEQ ID NO: 198654 - DNA, 2061 bp, Artificial Sequence
  derived and/or modified sequence
atgatgaccagtgtaagcagcgaccattgccggggggctcgcgaaaagccccaaatcagcgctgcacagagtacacagccacaaaaacaggtggtccaggcgactgcagaacaaatgcggctggcacaggttatttttgataagaatgactccgactttgaagccaaagtgaaacaactcatggaggtgactggcaaaaaccaggacgaatgtattgtggccctccatgactgcaatggcgacgtcaataaagccatcaatatcttgttggagggcaactcagacactacttcttgggagaccgtaggttgtaagaagaagaattttgctaaggaaaactcagagaacaaggaaaatcgcgagaagaaatcagagaaggaatccagccgtggcaggggaaataacaataggaagggaagaggcgggaacagggggcgggagttccgcggcgaagaaaacggcatagattgtaatcaggtggacaaaccttctgacaggggcaagagggcccgcggccgagaattagcttcaaatacacataacattgcccaagacctgagtaacaagagttcttacgggctgaaaggggcttggaagaatagcgttgaagagtggactactgaggactggacagaggatctcagcgaaaccaaggttttcaccgcgagctccgcccccgcagagaatcacatattacctgggcagtctatcgacctcgtcgcgttgcttcaaaagcctgtgccgcatagccaagcctcagaagctaattccttcgagacctcacagcaacaaggattcgggcaagcacttgtctttactaacagtcagcacaataatcagatggcaccaggaacaggatcatccaccgctgtgaattcctgcagcccacagagcttatcctccgtgctcggatcggggtttggcgaattagcccccccaaaaatggcaaacatcacgagctcacagatcttggaccagttaaaggcgccttcactcggccagttcactacaacaccaagcacccagcagaacagtaccagtcaccccacgaccacaactagttgggatcttaagccaccaacgtctcagagcagtgtgctctctcatttggacttcaagtcgcaacccgaaccgtccccagtcctgagtcaactctcccagagacaacagcatcagtcgcaggccgtgacagtgcccccgccagggctggaatcgtttcccagtcaggccaaactgagggagagcacacctggagatagcccctcaactgtgaataagttgctccagctgcccagtacaactattgaaaatattagcgtgtcggttcatcagccccagccgaaacatatcaaactagctaaacgtcggattccccctgccagcaagatccctgcgagcgccgtcgagatgcctggatctgccgatgtaactggcttaaatgtccaattcggggcacttgaattcggctccgaacccagtctctcagagtttggcagcgcgccctcctccgaaaactctaaccagatcccaatctccctgtattcaaagtcactgtccgaaccgctaaacacttccctttcaatgacttctgcagttcagaattcaacctacactactagtgttattacttcgtgctctctgacttcttcatctttgaatagtgcatcaccagtggctatgagctcctcatacgaccaatcctcagtccacaaccgtattccttaccaaagcccagtgtccagctctgagtcagctcccggcacaattatgaacggtcacggcggtggcagatcccaacagacactcgatactccaaagactacgggaccaccatcagctttgccatcggtttctagtctgccatcaacgacgagttgcacagccctattgccttcgacatcacagcacactggcgacctcacctcctcaccgctgtcacagctttcttctatgcccgtgtggagagcaccactgccgacctcccctcagccaccctcccccagacagaggcctccttcacaggtgccccacccacaagccccagcctgccctgtcgcttag

SEQ ID NO: 198655 - DNA, 831 bp, Artificial Sequence
  derived and/or modified sequence
gaaaaagaaagttcgcgagggcgcgggaataacaatagaaaaggacgaggcggtaataggggacgcgagttccgcggcgaagaaaacggaatcgactgcaatcaggtcgacaagccctctgaccgagggaagcgggcccgcggccgcggctttgggcgagggaggggccgtggggctggaagatttagtactcaagggatgggaacatttaacccagctgattacagcgactccaccagcacagacgtttgcgggaccaagctggtcgtgtgggaggctgcccagaacggggctgacgagggaactggcgcttggaaaaactccgttgaagagtggactaccgaagactggaccgaggatctcagcgagactaaagtgtttacagcctcgagtgctcccgccgagaatcacatcctgccagggcagagcattgacctggtggcactgttacaaaagccagtccctcatagtcaagccagcgaggccaattcattcgagaccagccagcagcaggggttcggccaggccttagtgttcacaaatagccagcataataaccagatggctcctggcaccggctctagcaccgcagtaaacagctgctcaccacagagcctgagcagtgtactgggcagtggcttcggggaactagctccaccaaaaatggctaacatcacatcatcacaaatactggaccagttaaaggccccgtctctgggccagtttactaccaccccgagcacgcaacagaactccacatcacaccctacgacaacaaccagctgggatctcaaacccccaacttcccagtcaagcgttctgagtcattag

SEQ ID NO: 198656 - DNA, 3087 bp, Artificial Sequence
  derived and/or modified sequence
atgcgactcgctcaggtaatctttgacaaaaacgattctgacttcgaagccaaggtgaaacagctcatggaagtgacagggaaaaatcaagacgaatgtattgtggcactgcacgactgcaacggcgatgtaaacaaagccataaacatccttctggaaggcaattccgatacgaccagctgggagacggtgggctgcaaaaagaagaatttcgccaaggaaaacagcgagaacaaggaaaaccgcgagaagaagtccgaaaaggaatccagccgcggccgtggcaacaacaatcgaaagggacgcggtgggaatcgaggacgagagtttaggggagaagaaaacgggattgactgtaaccaggtagataaaccatccgaccgcggtaagagggctcgcggtcgggagcttgcttcaaatacccataatattgctcaggacttgtctaacaagagcagctatggcctgaagggcgcatggaaaaatagtgtcgaagaatggactacagaggactggacggaagatttgagcgagactaaggtgtttaccgcttcctcagcacctgcagagaaccacattctgccgggtcaaagcattgacctcgtagcactgctgcagaaaccggtgccgcactctcaggcctctgaagcaaattccttcgaaactagccagcagcaaggatttggccaggctctggttttcacgaacagccaacacaataaccaaatggcccctggtacgggttcttcaactgctgtgaattcctgtagccctcaatctctcagtagtgtgctgggctcagggttcggtgaactggcaccccccaagatggctaacatcacatcttcccagatcctggatcagctaaaagcaccctctctaggtcagttcaccacaaccccttctacgcaacagaatagcacatcccaccccactaccaccacctcttgggacctgaaacctcccacttcccagagcagcgtcctctcacacctggacttcaagtctcagccagaaccctcacctgtactcagccagctttctcaacggcagcagcaccagtctcaggccgtgacagtgcccccccctggtctggagtcttttccatcacaggcgaaattgcgcgaaagcacacccggcgatagtccatctaccgtgaacaagctgctccagctgccaagcactaccatcgaaaacattagtgtgtctgtgcatcagcctcagcccaagcatattaaactagccaagaggcgcataccacctgctagcaaaattccggcctccgccgtcgagatgccgggctcggctgacgtgaccggattaaacgtgcagtttggggccctggagttcggctcggagccatcactgagtgagttcgggagtgcgccttcttcggaaaacagtaaccagatacccatttccctgtactcaaagtctctctccgagccattgaacacgtccctcagtatgacttcagccgtccagaacagtacatataccaccagcgtgataaccagctgttccctgaccagtagctcgctcaattcagcttccccggttgccatgagctcaagttacgaccaatcctccgttcacaatcggattccataccagtcgcccgtctcctccagtgaatccgcacccggcaccatcatgaatgggcacggtggaggtcgctcacagcagacactagacacgcctaagacaacgggcccgccctctgctctgcctagcgtttcttccttgccgagcaccacgagctgcaccgcattgctcccaagcacctcacaacatactggcgacctcaccagctcacctctatctcaactcagttccagtctgagctcacatcagtcttccctttcagcccatgccgcactcagttctagcacatctcacacccatgcatctgtggaaagcgcaagtagtcaccagtcaagcgccacattcagtactgcagctacgtcggtgtcaagttctgcctcatccggagcttcgctgagtagcagcatgaacacagccaattcgttgtgtttaggcggaacaccagcgagtgccagttcctcctccagcagagccgcccctttggtaacaagcggaaaagctccgccaaacctgccccagggcgtgcccccccttctccacaatcaatatctcgtggggcctggagggctgctgcccgcctaccccatctatggctatgatgagttgcagatgttacagagtaggctgcccgttgattattacggaatcccattcgcagctcctactgcgctcgcctctcgggatggaagcctggctaataacccttacccgggggatgtgactaaatttggtcgcggcgatagcgcctccccggcccccgctacaacgcccgctcaaccacagcagtcccagtcacagactcatcacaccgcacagcagcccttcgttaaccccgcgctgccgcccgggtactcttataccggactgccttactataccggcatgccctccgcattccagtacggacccacaatgttcgtgcccccagccagcgcgaaacagcacggggtcaacttaagtactccgaccccaccatttcagcaagcctcggggtatggacagcacggctattctacgggatacgatgatctgacccaggggaccgccgccggtgactactctaaaggcggatatgccggcagcagccaggctcctaacaagagtgccggctctgggcccggcaagggcgtctcagtatccagctccacaaccggcctgcctgatatgaccggcagtgtgtacaataagacccaaaccttcgataagcaggggttccatgcaggtacacccccacccttctcactgccctccgtgctggggtctaccggccctctggctagtggagccgccccaggctatgcgccacctcctttcctgcacatcctgcctgcacatcagcagccacactctcaattgttacatcatcacctcccccaagacgcccagagtggctccgggcagagaagtcaaccatcgtccctccagccaaagtctcaggcaagcaaacccgcctacggaaactctccgtattggacaaactag

SEQ ID NO: 198657 - DNA, 3360 bp, Artificial Sequence
  derived and/or modified sequence
atgatgacctctgtaagtagcgaccattgccgcggcgcccgggaaaagcctcaaattagcgccgcccaatcaacccaacctcagaagcaggtggtccaggctaccgccgaacagatgaggttagcccaggtgatcttcgacaagaatgactccgactttgaggccaaagtgaagcagctcatggaagtgactggaaaaaaccaggacgaatgtatcgtggctctacatgactgtaatggagatgtgaataaggctatcaacatccttttagaaggaaattccgatacaacttcatgggaaaccgtggggtgtaagaaaaagaactttgctaaagaaaacagtgaaaataaggagaatagagaaaaaaagagcgagaaggagtcctcacgtggaagaggaaataataaccgtaaaggacgcggcggtaatcgaggtagagagtttcggggcgaggagaatgggatagactgtaaccaggtggataaaccaagtgacagaggcaaaagggctagaggtcgagggttcgggagaggtaggggaagaggcgctgggcgcttctcaacacagggcatgggaactttcaatcctgccgattatagtgattctacgtccactgatgtctgcggcactaagcttgtggtctgggaagctgcccagaatggggctgatgaaggtacagagctcgctagcaatacgcacaacatagctcaggatctctctaacaagtcttcatatggcctgaagggggcttggaaaaatagcgttgaagaatggaccactgaagattggacagaggatctcagcgagactaaggtctttactgcctcttccgctccggcagagaaccacattctgccggggcagtccatagacctggtggcactacttcagaagcctgtgccccactctcaggcctccgaagccaacagctttgagacatcacagcaacaggggtttggccaagctttagtattcactaactctcagcacaataaccaaatggcgcccgggacaggcagttccaccgccgtcaactcttgtagtccccaaagcctgagtagcgtcctgggctcaggctttggcgagctagctccccccaaaatggccaacatcacctccagccagattctcgaccagttgaaagccccatccctcggacaattcacaacaacaccatctacccagcagaacagcacctcccatccaacgaccaccacatcatgggatctgaaaccccccacttcccagtcctccgtgctcagccatctggattttaagagccagcccgaacctagccccgtgctttcccagctgtctcaaaggcagcagcatcagtcacaggctgttactgtgccccctcctggcttagagagttttccgtctcaagccaaactgagggagtctactccaggtgatagtccaagcaccgtgaacaagctgctccagctgcctagtacgaccattgaaaacatttccgttagtgtgcatcagccacagcccaagcacatcaaacttgccaagcggcgaattccccctgcctccaagatccctgccagcgccgttgaaatgcctggatccgcagacgttactgggttgaacgttcagtttggggccctcgagttcggctctgagccttccctgtccgaattcgggtcagcacctagctctgagaattctaaccaaattcccatctcgttgtatagcaaaagtctgtccgagcctctaaatacttcactcagtatgacctccgcagtgcagaattccacatatactacatctgttatcacctcatgttctttgacttcttcaagcctgaactccgccagccccgtggcaatgtcgtctagttacgatcagtcctctgtccataacagaattccttaccagtccccggtctcttcctcggagagcgcacctggcaccataatgaacggccacggtgggggacgctctcagcagacgctggatacaccaaaaactaccggccccccctctgcactcccatcagtatcttccctgcctagcacaacttcatgcaccgcactgctcccgtcaacatcacagcacactggagacttgacatcgtcccctctctcgcagttgtcttcaagtctgtcttcccatcaatcttctttaagcgcacatgccgcactcagttcttccacaagccatactcatgcctccgtggagagtgcttcatctcaccagtcatcagcaaccttctctaccgcagcaaccagtgtcagctccagcgcctcctctggtgcttcactctcttccagtatgaatacagccaatagcttatgccttggggggacccccgcgagcgcctcgagctcctcttctcgtgccgctcccctggtgacatccgggaaggctcccccaaacttaccccagggggtgcccccgctcttgcataatcagtacctcgtcggaccaggagggctcttacccgcctatcccatatacggctacgacgaattacaaatgctccaaagcaggctcccggttgattattatggaatccccttcgcagctcccaccgcattggcatcacgggatggttctctcgccaacaacccgtatcccggcgacgtaacaaagttcggaaggggggattctgcctctccagcgcccgctaccacgccagctcagcctcagcagagtcaatcccagacgcaccacactgcacagcaacccttcgttaatccagctttgccccctggttacagctacacaggactgccctattataccggtatgccctctgcatttcagtatggtccaaccatgtttgtaccacccgcgtcagccaagcagcacggcgtgaacctcagtacacctacaccccccttccagcaagccagcggttacgggcagcatggctactcaactggctacgacgaccttacacaaggcacggccgctggagactactccaagggcggctatgctgggagcagccaggctcccaacaaatccgccggtagtggccccgggaagggggtttcagtttcgtccagcacaaccgggcttcctgatatgacgggctcagtgtataataagactcagacatttgataagcagggctttcatgctggaaccccccccccgttttccctaccaagcgtcctgggcagtactggacccctggcttctggcgcggccccaggttacgcgccccctccattcctgcatatactgccagcccatcagcagccgcatagccagctgcttcaccaccacctgccgcaggatgcccaatcaggatcgggccaacgttctcaaccaagcagcctgcagcctaaatctcaggcgtccaagccagcttacggcaactcgccttactggaccaattag

SEQ ID NO: 198658 - DNA, 2625 bp, Artificial Sequence
  derived and/or modified sequence
atgaggctagcacaagttatctttgacaaaaacgattcggactttgaggccaaagtgaaacaattgagcgaaaccaaagtctttacggccagcagcgccccagctgagaatcacatcttgccggggcagtccattgatttggtagccctcctgcaaaagcctgtgccacattcgcaggcatccgaggccaactccttcgagacctcccagcagcagggattcgggcaggccctggtgtttacgaacagccagcataacaaccaaatggcgcctggcactggtagttctaccgccgtgaatagctgctcgccacaatccttatcgagtgttcttggatctggcttcggggaactggcccctcccaaaatggctaacattacatcaagccagattctagatcagctcaaagctccttcgctggggcagtttacaacaacgccctcaactcagcagaattccacttcccatcccacaacaaccacttcttgggacctcaagccacctacaagtcaatccagcgtgctgagtcacctggattttaaatcccaaccggaaccgagtccagtcctgtcacagctcagccagagacagcaacaccagtcgcaggccgtgaccgtcccccctccagggctggagtcatttcccagccaggccaaattgcgagagagtacccctggcgactcgccttctacagtaaataaactgcttcaactcccttcaacgaccatcgaaaacatttcggtaagcgtccatcagcctcagcccaagcatattaagctggccaaacgccgtataccacctgcaagtaagatccccgcgagcgccgtagagatgcccgggagcgcagatgtcacagggctgaatgtgcagtttggggccttggagttcgggagtgagccctctctctccgagtttggatctgccccatccagcgagaacagcaaccagattccaatctccctgtattccaagtctctttctgagcccctgaacacaagcctctcaatgactagcgccgtgcagaacagcacttataccacctccgtgataacaagctgctcacttacatcatcctcattgaacagtgcttcccctgtagctatgtcttccagctacgaccagagctccgtccacaaccgtatcccatatcagtcccccgtgtcatctagtgagagtgccccggggacaataatgaatggccatgggggcggcagatcacaacagacactcgacacaccgaaaaccacaggaccccctagtgctttgccttctgtgtcttccctgccgagtactacatcatgtacagccttactgccatcaacttctcagcacactggcgacctcacaagctccccgcttagccaacttagctccagtctgagttctcatcagagctcattgtctgcgcacgccgccctgtcctcctcgacgtcacacactcacgcatcagtggagtccgcctcctctcaccagtcaagcgcaacctttagcaccgccgcgacctcagtaagcagctccgcctcctcaggagcttcactatccagcagcatgaacaccgcaaactccctttgcttgggcgggacaccggccagcgcttcctcctctagctcaagagctgcccctctggttacttcagggaaggccccaccaaacttgcctcagggagtccctcctctgctgcataaccagtacctggtaggccccggagggctgctgccagcttacccaatctatggttatgacgaactgcaaatgctacaatccagactgcccgtcgactattacggaataccgttcgccgctccaacagcgctcgccagtcgtgatgggtccctcgcaaacaatccatatccaggggatgttactaagtttggacgcggagacagcgcttcaccagctccagccaccactcccgcgcagccacagcagtctcagtcacagactcaccacacagcccagcagcctttcgtgaaccctgcactccccccagggtactcctatacgggtctaccatactacacaggcatgccaagtgcttttcaatatggccctacaatgttcgtgccccctgcgagcgcaaaacagcacggggtgaatctcagtacccccaccccaccattccaacaagcgtctgggtacggccaacacgggtattctacaggttacgatgaccttactcagggcactgcggcaggagactatagtaaagggggctacgccggcagtagccaggccccaaacaagtctgccggcagcggtccagggaaaggcgtgtctgtttcctcatcaacaaccggcttgcccgatatgaccgggtcagtgtataataagactcaaacctttgacaaacaaggcttccatgctgggacacccccaccattcagtctgccatcagtgcttggctcgacagggccactggcttccggggcagctcctggttatgctccacctccctttctgcacattttgcctgctcatcagcagccacactcccagttgctccatcatcatcttcctcaggacgcacaatcaggatctggccagcgctcacagccaagcagcctgcagccgaaatcccaagcaagcaaaccagcttacgggaattccccatactggaccaattag

SEQ ID NO: 198659 - DNA, 3360 bp, Artificial Sequence
  derived and/or modified sequence
atgatgacctctgtgtccagtgaccactgccgcggggcccgggagaagccccagatctctgctgcccagagcacccagccccagaagcaggtggtgcaggccacagctgagcagatgaggctggcccaggtgatctttgacaagaatgacagcgactttgaggccaaggtgaagcagctgatggaggtgacaggcaagaaccaggatgagtgcatcgtggccctgcatgactgcaatggagatgtgaacaaggccatcaacatcctgctggagggcaacagcgacaccacctcctgggagaccgtgggctgcaagaagaagaactttgccaaggagaacagcgagaacaaggagaaccgggagaagaagtctgagaaggagagcagccggggccggggcaacaacaacaggaagggccggggcggcaacagaggccgggagttccggggggaggagaatggaattgactgcaaccaggtggacaagcccagcgaccggggcaagagggcccggggccggggcttcggccggggccggggcagaggagctggccgcttcagcacccagggcatgggcaccttcaacccagctgactacagcgacagcaccagcacagatgtgtgtggcaccaagctggtggtgtgggaggccgcccagaatggagcagatgagggcacagagctggccagcaacacccacaacatcgcccaggacctgagcaacaagagcagctatggcctgaagggggcctggaagaacagcgtggaggagtggaccacagaggactggacagaggacctgtctgagaccaaggtgttcaccgccagcagcgccccagctgagaaccacatcctgcccggccagagcattgacctggtggccctgctgcagaagcctgtgccccacagccaggccagcgaggccaacagctttgagaccagccagcagcagggcttcggccaggccctggtgttcaccaacagccagcacaacaaccagatggcccctggcaccggcagcagcacagctgtgaacagctgcagcccccagagcctgagctctgtgctgggcagcggctttggagagctggccccacccaagatggccaacatcaccagcagccagatcctggaccagctgaaggcccccagcctgggccagttcaccaccacccccagcacccagcagaacagcaccagccaccccaccaccaccacctcctgggacctgaagccacccaccagccagagctctgtgctgagccacctggacttcaagagccagcctgagcccagccctgtgctgagccagctgagccagaggcagcagcaccagagccaggccgtgacagtgcccccacctggcctggagagcttccccagccaggccaagctgcgggagagcacccctggggacagccccagcacagtgaacaagctgctgcagctgcccagcaccaccatcgagaacatctctgtgtctgtgcaccagccccagcccaagcacatcaagctggccaagaggcgcatccccccagccagcaagatcccagccagcgctgtggagatgcctggcagcgcagatgtgacaggcctgaatgtgcagtttggagccctggagtttggaagtgagcccagcctgtctgaatttggcagcgcccccagcagcgagaacagcaaccagatccccatcagcctgtacagcaagagcctgtctgagcccctgaacaccagcctgtccatgaccagcgctgtgcagaacagcacctacaccaccagcgtcatcaccagctgcagcctgaccagcagcagcctgaacagcgccagccctgtggccatgagcagcagctatgaccagagctctgtgcacaaccgcatcccctaccagagccctgtgagcagcagcgagagcgcccctggcaccatcatgaatggccacggcggcggccgcagccagcagaccctggacacccccaagaccactggacctccttctgccctgcccagcgtgagcagcctgcccagcaccaccagctgcacagccctgctgcccagcaccagccagcacactggagacctgaccagcagccccctgagccagctgagcagcagcctgagcagccaccagagcagcctgagcgcccacgccgccctgagcagcagcaccagccacacccacgcctctgtggagagcgccagcagccaccagagcagcgccaccttcagcacagctgccacctctgtgagcagcagcgccagcagcggggccagcctgagcagctccatgaacacagccaacagcctgtgcctgggcggcaccccagccagcgccagcagcagcagcagccgggccgcccccctggtgaccagcggcaaggccccacccaacctgccccagggcgtgccccccctgctgcacaaccagtacctggtgggccctgggggcctgctgcctgcctaccccatctacggctatgatgagctgcagatgctgcagagccggctgcctgtggactactacggcatcccctttgctgcccccacagccctggccagcagagatggcagcctggccaacaacccctacccaggagatgtgaccaagtttggccgcggggacagcgccagccctgccccagccaccaccccagcccagccccagcagagccagagccagacccaccacacagcccagcagccctttgtgaacccagccctgcccccaggctacagctacacaggcctgccctactacacaggcatgcccagcgccttccagtatggccccaccatgtttgtgcccccagccagcgccaagcagcacggcgtgaacctgagcacccccaccccacccttccagcaggccagcggctacggccagcacggctacagcacaggctatgatgacctgacccagggcacagctgctggggactacagcaaaggaggctacgccggcagcagccaggcccccaacaagtctgctggcagcggccctggaaaaggagtgtctgtgagcagcagcaccaccggcctgcctgacatgacaggctctgtgtacaacaagacccagacctttgacaagcagggcttccacgccggcaccccaccacccttcagcctgcccagcgtgctgggcagcacaggccccctggccagcggggccgcccctggctacgcccccccacccttcctgcacatcctgcctgcccaccagcagccccacagccagctgctgcaccaccacctgccccaggatgcccagagcggcagcggccagaggagccagcccagcagcctgcagcccaagagccaggccagcaagccagcctacggcaacagcccctactggaccaactag

SEQ ID NO: 198660 - DNA, 1023 bp, Artificial Sequence
  derived and/or modified sequence
atggaggtgacaggcaagaaccaggatgagtgcatcgtggccctgcatgactgcaatggagatgtgaacaaggccatcaacatcctgctggagggcaacagcgacaccacctcctgggagaccgtgggctgcaagaagaagaactttgccaaggagaacagcgagaacaaggagaaccgggagaagaagtctgagaaggagagcagccggggccggggcaacaacaacaggaagggccggggcggcaacagaggccgggagttccggggggaggagaatggaattgactgcaaccaggtggacaagcccagcgaccggggcaagagggcccggggccggggcttcggccggggccggggcagaggagctggccgcttcagcacccagggcatgggcaccttcaacccagctgactacagcgacagcaccagcacagatgtgtgtggcaccaagctggtggtgtgggaggccgcccagaatggagcagatgagggcaccggggcctggaagaacagcgtggaggagtggaccacagaggactggacagaggacctgtctgagaccaaggtgttcaccgccagcagcgccccagctgagaaccacatcctgcccggccagagcattgacctggtggccctgctgcagaagcctgtgccccacagccaggccagcgaggccaacagctttgagaccagccagcagcagggcttcggccaggccctggtgttcaccaacagccagcacaacaaccagatggcccctggcaccggcagcagcacagctgtgaacagctgcagcccccagagcctgagctctgtgctgggcagcggctttggagagctggccccacccaagatggccaacatcaccagcagccagatcctggaccagctgaaggcccccagcctgggccagttcaccaccacccccagcacccagcagaacagcaccagccaccccaccaccaccacctcctgggacctgaagccacccaccagccagagctctgtgctgagccactag

SEQ ID NO: 198661 - DNA, 1239 bp, Artificial Sequence
  derived and/or modified sequence
atgatgacctctgtgtccagtgaccactgccgcggggcccgggagaagccccagatctctgctgcccagagcacccagccccagaagcaggtggtgcaggccacagctgagcagatgaggctggcccaggtgatctttgacaagaatgacagcgactttgaggccaaggtgaagcagctgatggaggtgacaggcaagaaccaggatgagtgcatcgtggccctgcatgactgcaatggagatgtgaacaaggccatcaacatcctgctggagggcaacagcgacaccacctcctgggagaccgtgggctgcaagaagaagaactttgccaaggagaacagcgagaacaaggagaaccgggagaagaagtctgagaaggagagcagccggggccggggcaacaacaacaggaagggccggggcggcaacagaggccgggagttccggggggaggagaatggaattgactgcaaccaggtggacaagcccagcgaccggggcaagagggcccggggccgggagctggccagcaacacccacaacatcgcccaggacctgagcaacaagagcagctatggcctgaagggggcctggaagaacagcgtggaggagtggaccacagaggactggacagaggacctgtctgagaccaaggtgttcaccgccagcagcgccccagctgagaaccacatcctgcccggccagagcattgacctggtggccctgctgcagaagcctgtgccccacagccaggccagcgaggccaacagctttgagaccagccagcagcagggcttcggccaggccctggtgttcaccaacagccagcacaacaaccagatggcccctggcaccggcagcagcacagctgtgaacagctgcagcccccagagcctgagctctgtgctgggcagcggctttggagagctggccccacccaagatggccaacatcaccagcagccagatcctggaccagctgaaggcccccagcctgggccagttcaccaccacccccagcacccagcagaacagcaccagccaccccaccaccaccacctcctgggacctgaagccacccaccagccagagctctgtgctgagccacctggacttcaagagccagcctgagcccagccctgtgctgagccagctgagccagaggcagcagcaccagagccaggccgtgacagtgcccccacctggcctggagagcttccccagccaggccaagctgtag

SEQ ID NO: 198662 - DNA, 2061 bp, Artificial Sequence
  derived and/or modified sequence
atgatgacctctgtgtccagtgaccactgccgcggggcccgggagaagccccagatctctgctgcccagagcacccagccccagaagcaggtggtgcaggccacagctgagcagatgaggctggcccaggtgatctttgacaagaatgacagcgactttgaggccaaggtgaagcagctgatggaggtgacaggcaagaaccaggatgagtgcatcgtggccctgcatgactgcaatggagatgtgaacaaggccatcaacatcctgctggagggcaacagcgacaccacctcctgggagaccgtgggctgcaagaagaagaactttgccaaggagaacagcgagaacaaggagaaccgggagaagaagtctgagaaggagagcagccggggccggggcaacaacaacaggaagggccggggcggcaacagaggccgggagttccggggggaggagaatggaattgactgcaaccaggtggacaagcccagcgaccggggcaagagggcccggggccgggagctggccagcaacacccacaacatcgcccaggacctgagcaacaagagcagctatggcctgaagggggcctggaagaacagcgtggaggagtggaccacagaggactggacagaggacctgtctgagaccaaggtgttcaccgccagcagcgccccagctgagaaccacatcctgcccggccagagcattgacctggtggccctgctgcagaagcctgtgccccacagccaggccagcgaggccaacagctttgagaccagccagcagcagggcttcggccaggccctggtgttcaccaacagccagcacaacaaccagatggcccctggcaccggcagcagcacagctgtgaacagctgcagcccccagagcctgagctctgtgctgggcagcggctttggagagctggccccacccaagatggccaacatcaccagcagccagatcctggaccagctgaaggcccccagcctgggccagttcaccaccacccccagcacccagcagaacagcaccagccaccccaccaccaccacctcctgggacctgaagccacccaccagccagagctctgtgctgagccacctggacttcaagagccagcctgagcccagccctgtgctgagccagctgagccagaggcagcagcaccagagccaggccgtgacagtgcccccacctggcctggagagcttccccagccaggccaagctgcgggagagcacccctggggacagccccagcacagtgaacaagctgctgcagctgcccagcaccaccatcgagaacatctctgtgtctgtgcaccagccccagcccaagcacatcaagctggccaagaggcgcatccccccagccagcaagatcccagccagcgctgtggagatgcctggcagcgcagatgtgacaggcctgaatgtgcagtttggagccctggagtttggcagcgagcccagcctgtctgaatttggaagtgcccccagcagcgagaacagcaaccagatccccatcagcctgtacagcaagagcctgtctgagcccctgaacaccagcctgtccatgaccagcgctgtgcagaacagcacctacaccaccagcgtcatcaccagctgcagcctgaccagcagcagcctgaacagcgccagccctgtggccatgagcagcagctatgaccagagctctgtgcacaaccgcatcccctaccagagccctgtgagcagcagcgagagcgcccctggcaccatcatgaatggacatggaggcggccgcagccagcagaccctggacacccccaagaccaccggcccccccagcgccctgcccagcgtgagcagcctgcccagcaccaccagctgcacagccctgctgcccagcaccagccagcacactggagacctgaccagcagccccctgagccagctgagctccatgcctgtgtggagggcccccctgcccaccagcccccagccccccagcccccggcagaggcctcccagccaggtgccccacccccaggccccagcctgccctgtggcctag

SEQ ID NO: 198663 - DNA, 831 bp, Artificial Sequence
  derived and/or modified sequence
gagaaggagagcagccggggccggggcaacaacaacaggaagggccggggcggcaacagaggccgggagttccggggggaggagaatggaattgactgcaaccaggtggacaagcccagcgaccggggcaagagggcccggggccggggcttcggccggggccggggcagaggagctggccgcttcagcacccagggcatgggcaccttcaacccagctgactacagcgacagcaccagcacagatgtgtgtggcaccaagctggtggtgtgggaggccgcccagaatggagcagatgagggcaccggggcctggaagaacagcgtggaggagtggaccacagaggactggacagaggacctgtctgagaccaaggtgttcaccgccagcagcgccccagctgagaaccacatcctgcccggccagagcattgacctggtggccctgctgcagaagcctgtgccccacagccaggccagcgaggccaacagctttgagaccagccagcagcagggcttcggccaggccctggtgttcaccaacagccagcacaacaaccagatggcccctggcaccggcagcagcacagctgtgaacagctgcagcccccagagcctgagctctgtgctgggcagcggctttggagagctggccccacccaagatggccaacatcaccagcagccagatcctggaccagctgaaggcccccagcctgggccagttcaccaccacccccagcacccagcagaacagcaccagccaccccaccaccaccacctcctgggacctgaagccacccaccagccagagctctgtgctgagccactag

SEQ ID NO: 198664 - DNA, 3087 bp, Artificial Sequence
  derived and/or modified sequence
atgaggctggcccaggtgatctttgacaagaatgacagcgactttgaggccaaggtgaagcagctgatggaggtgacaggcaagaaccaggatgagtgcatcgtggccctgcatgactgcaatggagatgtgaacaaggccatcaacatcctgctggagggcaacagcgacaccacctcctgggagaccgtgggctgcaagaagaagaactttgccaaggagaacagcgagaacaaggagaaccgggagaagaagtctgagaaggagagcagccggggccggggcaacaacaacaggaagggccggggcggcaacagaggccgggagttccggggggaggagaatggaattgactgcaaccaggtggacaagcccagcgaccggggcaagagggcccggggccgggagctggccagcaacacccacaacatcgcccaggacctgagcaacaagagcagctatggcctgaagggggcctggaagaacagcgtggaggagtggaccacagaggactggacagaggacctgtctgagaccaaggtgttcaccgccagcagcgccccagctgagaaccacatcctgcccggccagagcattgacctggtggccctgctgcagaagcctgtgccccacagccaggccagcgaggccaacagctttgagaccagccagcagcagggcttcggccaggccctggtgttcaccaacagccagcacaacaaccagatggcccctggcaccggcagcagcacagctgtgaacagctgcagcccccagagcctgagctctgtgctgggcagcggctttggagagctggccccacccaagatggccaacatcaccagcagccagatcctggaccagctgaaggcccccagcctgggccagttcaccaccacccccagcacccagcagaacagcaccagccaccccaccaccaccacctcctgggacctgaagccacccaccagccagagctctgtgctgagccacctggacttcaagagccagcctgagcccagccctgtgctgagccagctgagccagaggcagcagcaccagagccaggccgtgacagtgcccccacctggcctggagagcttccccagccaggccaagctgcgggagagcacccctggggacagccccagcacagtgaacaagctgctgcagctgcccagcaccaccatcgagaacatctctgtgtctgtgcaccagccccagcccaagcacatcaagctggccaagaggcgcatccccccagccagcaagatcccagccagcgctgtggagatgcctggcagcgcagatgtgacaggcctgaatgtgcagtttggagccctggagtttggcagcgagcccagcctgtctgaatttggaagtgcccccagcagcgagaacagcaaccagatccccatcagcctgtacagcaagagcctgtctgagcccctgaacaccagcctgtccatgaccagcgctgtgcagaacagcacctacaccaccagcgtcatcaccagctgcagcctgaccagcagcagcctgaacagcgccagccctgtggccatgagcagcagctatgaccagagctctgtgcacaaccgcatcccctaccagagccctgtgagcagcagcgagagcgcccctggcaccatcatgaatggacatggaggcggccgcagccagcagaccctggacacccccaagaccaccggcccccccagcgccctgcccagcgtgagcagcctgcccagcaccaccagctgcacagccctgctgcccagcaccagccagcacactggagacctgaccagcagccccctgagccagctgagcagcagcctgagcagccaccagagcagcctgagcgcccatgctgccctgagcagcagcaccagccacacccacgcctctgtggagagcgccagcagccaccagagcagcgccaccttcagcacagctgccacctctgtgagcagcagcgccagcagcggggccagcctgagcagctccatgaacacagccaacagcctgtgcctgggcggcaccccagccagcgccagcagcagcagcagcagagctgcccccctggtgaccagcggcaaggccccacccaacctgccccagggcgtgccccccctgctgcacaaccagtacctggtgggccctgggggcctgctgcctgcctaccccatctacggctatgatgagctgcagatgctgcagagccggctgcctgtggactactacggcatcccctttgctgcccccacagccctggccagcagagatggcagcctggccaacaacccctacccaggagatgtgaccaagtttggccgcggggacagcgccagccctgccccagccaccaccccagcccagccccagcagagccagagccagacccaccacacagcccagcagccctttgtgaacccagccctgcccccaggctacagctacacaggcctgccctactacacaggcatgcccagcgccttccagtatggccccaccatgtttgtgcccccagccagcgccaagcagcacggcgtgaacctgagcacccccaccccacccttccagcaggccagcggctacggccagcacggctacagcacaggctatgatgacctgacccagggcacagctgctggggactacagcaagggcggctacgccggcagcagccaggcccccaacaagtctgctggcagcggccctgggaagggcgtgtctgtgagcagcagcaccaccggcctgcctgacatgactggatctgtgtacaacaagacccagacctttgacaagcagggcttccacgccggcaccccaccacccttcagcctgcccagcgtgctgggcagcacaggccccctggccagcggggccgcccctggctacgcccccccacccttcctgcacatcctgcctgcccaccagcagccccacagccagctgctgcaccaccacctgccccaggatgcccagagcggcagcggccagaggagccagcccagcagcctgcagcccaagagccaggccagcaagccagcctacggcaacagcccctactggaccaactag

SEQ ID NO: 198665 - DNA, 2625 bp, Artificial Sequence
  derived and/or modified sequence
atgaggctggcccaggtgatctttgacaagaatgacagcgactttgaggccaaggtgaagcagctgtctgagaccaaggtgttcaccgccagcagcgccccagctgagaaccacatcctgcccggccagagcattgacctggtggccctgctgcagaagcctgtgccccacagccaggccagcgaggccaacagctttgagaccagccagcagcagggcttcggccaggccctggtgttcaccaacagccagcacaacaaccagatggcccctggcaccggcagcagcacagctgtgaacagctgcagcccccagagcctgagctctgtgctgggcagcggctttggagagctggccccacccaagatggccaacatcaccagcagccagatcctggaccagctgaaggcccccagcctgggccagttcaccaccacccccagcacccagcagaacagcaccagccaccccaccaccaccacctcctgggacctgaagccacccaccagccagagctctgtgctgagccacctggacttcaagagccagcctgagcccagccctgtgctgagccagctgagccagaggcagcagcaccagagccaggccgtgacagtgcccccacctggcctggagagcttccccagccaggccaagctgcgggagagcacccctggggacagccccagcacagtgaacaagctgctgcagctgcccagcaccaccatcgagaacatctctgtgtctgtgcaccagccccagcccaagcacatcaagctggccaagaggcgcatccccccagccagcaagatcccagccagcgctgtggagatgcctggcagcgcagatgtgacaggcctgaatgtgcagtttggagccctggagtttggcagcgagcccagcctgtctgaatttggaagtgcccccagcagcgagaacagcaaccagatccccatcagcctgtacagcaagagcctgtctgagcccctgaacaccagcctgtccatgaccagcgctgtgcagaacagcacctacaccaccagcgtcatcaccagctgcagcctgaccagcagcagcctgaacagcgccagccctgtggccatgagcagcagctatgaccagagctctgtgcacaaccgcatcccctaccagagccctgtgagcagcagcgagagcgcccctggcaccatcatgaatggacatggaggcggccgcagccagcagaccctggacacccccaagaccaccggcccccccagcgccctgcccagcgtgagcagcctgcccagcaccaccagctgcacagccctgctgcccagcaccagccagcacactggagacctgaccagcagccccctgagccagctgagcagcagcctgagcagccaccagagcagcctgagcgcccatgctgccctgagcagcagcaccagccacacccacgcctctgtggagagcgccagcagccaccagagcagcgccaccttcagcacagctgccacctctgtgagcagcagcgccagcagcggggccagcctgagcagctccatgaacacagccaacagcctgtgcctgggcggcaccccagccagcgccagcagcagcagcagcagagctgcccccctggtgaccagcggcaaggccccacccaacctgccccagggcgtgccccccctgctgcacaaccagtacctggtgggccctgggggcctgctgcctgcctaccccatctacggctatgatgagctgcagatgctgcagagccggctgcctgtggactactacggcatcccctttgctgcccccacagccctggccagcagagatggcagcctggccaacaacccctacccaggagatgtgaccaagtttggccgcggggacagcgccagccctgccccagccaccaccccagcccagccccagcagagccagagccagacccaccacacagcccagcagccctttgtgaacccagccctgcccccaggctacagctacacaggcctgccctactacacaggcatgcccagcgccttccagtatggccccaccatgtttgtgcccccagccagcgccaagcagcacggcgtgaacctgagcacccccaccccacccttccagcaggccagcggctacggccagcacggctacagcacaggctatgatgacctgacccagggcacagctgctggggactacagcaagggcggctacgccggcagcagccaggcccccaacaagtctgctggcagcggccctgggaagggcgtgtctgtgagcagcagcaccaccggcctgcctgacatgactggatctgtgtacaacaagacccagacctttgacaagcagggcttccacgccggcaccccaccacccttcagcctgcccagcgtgctgggcagcacaggccccctggccagcggggccgcccctggctacgcccccccacccttcctgcacatcctgcctgcccaccagcagccccacagccagctgctgcaccaccacctgccccaggatgcccagagcggcagcggccagaggagccagcccagcagcctgcagcccaagagccaggccagcaagccagcctacggcaacagcccctactggaccaactag

SEQ ID NO: 198666 - DNA, 3360 bp, Artificial Sequence
  derived and/or modified sequence
atgatgaccagcgtgagcagcgaccactgccggggcgcccgggagaagccacagatttctgctgcgcagagtacacagcctcagaagcaggtggtacaagcaacagccgagcaaatgcggctcgcgcaagtgattttcgacaaaaacgattctgatttcgaggccaaggtgaagcaactaatggaggtgacaggaaagaaccaggatgagtgcatcgtagcattgcacgactgtaacggggatgttaacaaggctatcaacattctgctcgaggggaacagcgatacaaccagttgggagacggtcgggtgcaaaaagaaaaatttcgccaaggagaactcagagaacaaggagaaccgcgaaaagaaatctgagaaggaatccagtaggggtcgtggcaataacaatagaaaagggagaggcggtaacaggggacgagagttccggggagaagagaatggaattgactgtaaccaggttgataagccaagcgaccgcgggaagcgagcgcgcggtagaggattcggcagggggagagggcggggcgctggtaggttctctactcagggtatgggaacgttcaaccccgccgactattccgattccaccagtacagatgtgtgtggtacaaaacttgttgtttgggaagcggcacagaacggggccgacgaagggaccgagctggcaagcaatacacataatatagcacaggatctctccaacaagagttcctatggactcaagggtgcatggaagaactccgtggaagaatggaccactgaggactggaccgaggatctgagcgagaccaaggtgttcacagcctcctcggccccagccgaaaatcacatcctccctggccagagcatcgatctggtcgctttgctccagaagccggtaccccactcacaagccagtgaggctaatagctttgaaacgtcgcaacagcaaggtttcggacaggctctcgtcttcaccaattcacaacacaacaatcagatggccccagggactgggtcaagtactgcggtcaatagctgtagcccacagtcactgagttctgtcctcgggagcggattcggggaactcgccccaccgaagatggccaatattactagtagccagattctggaccaactgaaggcccccagcttaggccagttcaccaccacaccatcgacccagcagaactccacctcccatccgacgacgactacgagttgggatctgaagcctcccacatcgcagagcagcgtcttgtcccacctcgattttaaaagtcaacccgagccttccccagtcctatctcagttgtcacagcgacagcagcaccaaagtcaagccgtgaccgttcctcctcctggcctggagagtttcccctctcaagctaaactacgcgagtccacccccggcgatagcccatctactgtgaacaaactgctgcagctgccctccaccaccattgaaaatatttctgtgagtgtccatcagccacagcccaaacacatcaaactcgcaaagaggcggatacctccagcatcaaagataccagcctccgccgtagagatgcccggtagcgctgacgtgactgggctaaacgtgcagtttggggccttggagttcgggtctgagcccagcctgtccgagttcggatccgctcccagttccgagaatagcaatcagatcccaatatcactttatagcaagtctctctcagaacctctaaacacgagcctttccatgacctcagctgtgcaaaatagtacatacactacctctgtgatcacctcttgctcattgacatccagttccttaaattcagcttcccctgtggccatgtcatcttcctatgaccagagtagcgtacacaaccgcatcccttatcagtctcctgtgagttcctctgagagcgctcccggcacaattatgaatggccacggtgggggccgctcacagcagacactggatactcctaaaaccactggcccccctagcgcactgccgagtgtgtcttctctgccctccacaacctcctgtacggccttgctgccgtctacctcacagcacacgggtgacctgacgagcagtcccttatcccagctgtcaagtagccttagttcacatcaaagctccttgagtgcccatgcagcgttgtcatctagcacttcacacactcatgcttcagtggagtcggccagcagtcaccagagctctgctaccttcagtacggctgccacctccgtttcatcttccgcctcttcaggggcatccttgagttccagcatgaacaccgctaattccttatgcctggggggcactccagcctcggctagttcttcgtcttcacgggccgcccctttggtaaccagtggaaaagcacccccaaacctccctcagggcgtgccccctctgctgcacaatcaatatcttgtcgggcccggaggccttctgcccgcctaccccatctatggctatgacgaacttcagatgctgcagtcccggctccccgtggattactatggcatccctttcgccgccccaactgcgttggcttctcgcgatggcagtctggcaaataacccctacccaggcgacgttaccaagttcgggcgcggtgacagcgccagccccgcccccgccactacaccagcccaaccccaacagtctcagtcccagacccaccatacagcccagcagcccttcgtgaatcccgcccttcctccgggctatagttacacaggcttaccctactataccggcatgccatccgccttccagtacggacccactatgtttgttcctcctgcgagcgccaaacagcacggtgtgaatctgtcaacccccacccccccgttccagcaggccagcgggtacggccaacacgggtacagcaccggatacgacgatttaacccagggcaccgccgccggcgactattcaaagggagggtacgctggctcttcccaagccccaaataagtctgcagggtccggccctggcaaaggagtgagcgtgtctagctctaccactggtctcccagatatgaccggttccgtgtacaataagactcagaccttcgataaacaggggttccatgccggcacccctccccctttctctctgcctagcgtgctgggaagcacaggacccctcgcaagcggggccgcccctgggtacgcaccacctccgttcttgcacatcctacctgcccatcagcagccgcatagtcagctgctgcaccaccacttaccccaggatgcccaatctggtagtggccagcggagccagccaagtagcctgcagcccaagagccaggcttctaaacctgcctatggcaacagcccttactggaccaactag

SEQ ID NO: 198667 - DNA, 3360 bp, Artificial Sequence
  derived and/or modified sequence
atgatgaccagcgtgagcagcgaccactgccggggcgcccgggagaagccccagattagtgcagcacagtctacacagccgcagaagcaagtcgtccaggctacagctgaacagatgcgtttggcccaggtgatcttcgataagaatgacagtgatttcgaagctaaagttaagcagttgatggaagtaacaggaaagaaccaggatgagtgtatcgtggcattgcacgattgcaacggagacgtgaataaagcgatcaacatacttctcgaaggaaattctgatactacatcatgggaaactgttggctgtaaaaaaaaaaactttgcaaaagagaacagcgagaataaagagaaccgagagaagaagtccgagaaggaatcatcccgcggacgcggcaataataaccggaaagggaggggcgggaaccggggccgggagttccgcggtgaggagaacgggattgactgcaaccaagtcgataagccgagtgacagagggaagcgggcccgcggaagaggctttggtcgcggccgcggtcggggtgctggtaggttctctactcaggggatggggaccttcaacccagctgactattccgatagtacatcaacggacgtatgcggtacaaaactggtggtgtgggaggccgcccagaacggcgctgatgaagggacagagcttgccagtaacacccacaacatagcgcaagatctgtcgaacaagtccagttatgggcttaaaggcgcttggaaaaactctgtcgaggagtggaccacggaagactggacagaggatttgagtgagacaaaggtgtttactgccagtagcgcacccgcagagaaccacatcttgcctggccagtccatagacctggtcgctctgctgcagaaacccgtgcctcactctcaagcatctgaggctaatagtttcgagacgtctcagcagcagggttttggccaggcattagtttttacgaattcacagcacaataaccagatggccccggggaccggcagtagtactgcagttaactcttgctcgcctcagagtctgagttccgtcctgggtagtggcttcggtgagctggcacctcccaaaatggccaacatcacaagctcccagattctcgatcaacttaaagcaccgagcttaggtcagtttaccactaccccgtcgactcagcaaaattctacatcgcatcccacgactacaaccagttgggatctgaaaccaccaacttcccagtctagcgtgctgtctcacttggacttcaaatcccagccagaaccctcccctgttcttagccagttatctcaacggcagcagcaccagagccaggccgtgaccgtacccccccccggcttggaaagtttcccctctcaagctaaacttcgggagtctacaccaggcgatagtccgtcaactgttaacaagctcctgcagctaccttcaaccaccattgagaacatatctgtgagtgtacatcagccccaacctaaacatatcaagctggcgaaaaggcgcattccgcctgccagcaagataccagcatcggccgtggaaatgcccgggtcagcggacgtaactggcctgaatgtgcagttcggcgcactcgagtttggcagcgaaccgagcctgtccgagtttggttctgccccatcctctgagaattctaatcagattcccatttcgttgtatagtaagtccctatccgagccactgaacacgagtctcagcatgacatccgctgtccagaattcgacatacaccacttcagtgattacaagctgtagcctgactagcagctcattaaactccgcgagccctgtggcgatgtcatcgtcttacgatcagagtagcgttcataaccggatcccatatcagtcacctgtctcctccagcgaatcggcacctggcacaatcatgaatggacacggtggggggcgatcacagcagacactggacacccctaaaaccactgggcccccttccgcccttccttccgtgagctcactgcctagcaccacgtcctgcactgctctacttcctagcacgagccagcataccggagacctgacttcatcccctctaagtcagctctcttcctctcttagctctcaccagagttcactgtcggcccatgctgcacttagttcttcaaccagccatacccatgcctccgtggaatccgctagttcacaccagtcatcagctacctttagtacagctgcaactagtgtttcaagcagtgcctcatcaggtgcttctctgtcatcctctatgaatacagcaaatagcttatgcttgggcggcactcctgcctccgcctcttcttcctcctcacgcgccgcccctctagttacgagtggcaaagcccctccaaacttgccacagggcgtgcctcccttactacataatcagtacctagtgggccccggaggccttcttccagcatatcccatatatggatatgacgagctgcagatgcttcagagcagattgccagtggattactatggcatcccctttgcagctcccacagcactggcctcccgcgacggatccctagcaaacaatccctaccctggcgatgtcacaaagtttggacggggtgatagtgccagcccagctcctgccaccaccccggcccagccccaacagagtcaaagccagactcaccacactgcacagcagccatttgtgaacccagccctgccacctggatattcatacaccgggctcccctattacacaggcatgcccagtgcttttcagtatgggcccacaatgtttgtgccgccggcctccgctaagcagcatggtgtcaaccttagcacccctacacctccctttcagcaggcaagcggatatggacagcatgggtattctacaggctacgatgacctgacacagggcaccgctgcaggcgactactctaaagggggctatgctgggtcaagtcaggccccaaacaagtctgcaggttccggccctgggaagggcgtgagtgtcagcagtagtaccacaggcttgcccgatatgaccggttcagtgtataacaagacccagacatttgataagcagggatttcatgcggggactcctcctccgttcagtctcccatccgtcctgggctctactgggcccttggccagtggcgcggctcccggctatgcacctccgccctttctgcacatcctgcccgcgcaccagcagcctcactcccagctcctgcatcaccaccttcctcaggacgcccaatccggctcgggtcagaggagtcagccgtctagcttacagccgaagagccaggcctccaaacccgcgtacggcaattctccctactggaccaactag

SEQ ID NO: 198668 - DNA, 1023 bp, Artificial Sequence
  derived and/or modified sequence
atggaggtgaccggcaagaaccaggacgagtgcatcgtggccctgcacgattgtaatggggacgttaacaaagctataaacatacttctggaggggaattctgacaccacttcgtgggaaacagtcgggtgcaaaaagaaaaactttgccaaggaaaatagtgagaataaagaaaatcgggagaagaaatccgagaaggagtcttcacggggcaggggaaacaataacaggaaaggacgtgggggaaacaggggtcgagagtttagaggagaggagaatggtatcgactgcaaccaggtggataagcccagtgatagaggcaaaagggcccggggccgcgggttcgggagagggagagggcggggagccgggagattctccacccagggaatgggcacctttaatccagccgactatagcgacagtacaagcacagacgtgtgcggcaccaagctggtcgtgtgggaggcggctcagaacggcgctgacgagggaacaggtgcctggaaaaactctgttgaggaatggacgaccgaagattggaccgaggatctgagcgaaaccaaagtatttacggcctccagcgctcctgccgagaatcacatcctgccagggcagagtattgatttggttgccttactgcagaagcccgtccctcattcacaggcctccgaagctaattcattcgagacatcacagcaacagggattcggccaggctctcgttttcactaactctcagcataacaaccaaatggcacctggcaccgggtccagcaccgcagtgaatagttgttctccccagtcactatcatcggtcctggggagcggctttggtgagcttgcccctcccaagatggccaacattacctcctctcaaatactcgaccaattgaaggcacctagtctagggcaatttactaccacacccagcacccagcaaaattccacaagtcaccccaccactactacctcctgggacctgaaaccccccacatcccagtctagcgtgctgagccactag

SEQ ID NO: 198669 - DNA, 1239 bp, Artificial Sequence
  derived and/or modified sequence
atgatgaccagcgtgagcagcgaccactgccggggcgcccgggagaaaccacagatatccgccgctcagagcactcagccccaaaagcaagttgtgcaagcgaccgcagagcaaatgaggctggcacaggtgatattcgacaagaacgattcggattttgaagccaaggtgaagcagctgatggaggttactgggaaaaaccaggacgaatgtatcgtggctttgcacgattgcaacggcgatgtgaataaggcgatcaacatacttctcgaggggaactccgatacgacgagctgggagactgtgggctgcaaaaagaagaactttgccaaggagaattctgagaacaaggagaatcgagagaagaaaagtgagaaggaaagctctcgaggacggggaaataacaaccgaaaagggaggggtgggaatagagggcgggaattccggggtgaggaaaacgggattgattgtaaccaggtggacaaaccctcggaccgcggcaaacgagccaggggccgggagctggcatcgaatacacacaatatagctcaggacctgagcaataagtcctcttatggtcttaagggagcctggaagaacagtgtggaggaatggacgaccgaggactggacagaagatttgtcggaaactaaagtgttcactgcttcaagtgcccccgcagagaatcacattctgcccggacagtccattgaccttgtggctttactccagaagcccgtgcctcattcacaggcatccgaagctaattcctttgagacaagccagcaacagggttttgggcaggctctggtgttcacaaattctcagcacaacaatcagatggcccccgggacgggcagttccaccgcagttaacagctgttccccacaaagtctctcctcagtactgggatcaggttttggtgagctggcccctcctaagatggccaatatcactagctcgcagatcctggatcaactaaaggccccatcactggggcaattcacaactactccctccacacagcagaattcaacatcacaccccactaccacaaccagttgggaccttaagcctccaacatcccagagtagtgttctatcccatctcgattttaaatcacagcccgaaccgtctccggttctatctcagttgtcccagcgccagcagcatcagtctcaggccgtcactgttcccccgcccggactggaatccttcccttcccaggcaaaactttag

SEQ ID NO: 198670 - DNA, 2061 bp, Artificial Sequence
  derived and/or modified sequence
atgatgaccagcgtgagcagcgaccactgccggggcgcccgggagaagccccagatcagtgcagcacagtcaacccagccacagaagcaggtggtgcaggcaactgctgagcagatgagactggctcaagtgatattcgacaaaaacgactctgacttcgaagccaaagtgaaacagcttatggaggtgacagggaagaatcaggacgagtgtatcgtggcacttcatgactgtaatggggatgtgaacaaggcaattaacatactcttagaagggaattcagacacaacgagctgggaaacggtcgggtgtaagaaaaagaattttgccaaggagaattccgagaacaaggagaatagggagaaaaaatccgaaaaggaaagctcccgggggagaggtaacaacaataggaaagggaggggcgggaatagggggagagagtttcgtggagaggaaaacggcatagattgtaaccaggttgacaagccgagtgaccgtggcaagagggcccgtgggcgcgaattggcgagtaacacccataacatcgcacaggatctcagtaacaaatcctcatatggccttaagggcgcatggaagaacagtgtcgaggaatggacaacagaggactggacagaagatctgagcgagaccaaggtttttactgcgtctagtgcacccgcggagaatcacattctgcctggacagtccattgatttggtggcgctgctgcagaagccagtcccacattctcaggcgagtgaagctaatagttttgagacttctcaacaacaagggtttggtcaggcattggtgtttacaaacagccagcacaataatcaaatggctcctggaacagggagttccaccgcggtcaatagctgtagtcctcagtctctgagtagcgtgttggggtccggctttggggagctcgcgccgccaaagatggcgaatatcacctcaagtcagattttagatcagctgaaagcaccatccttagggcagtttaccactacaccttctacacagcagaacagcacatcacaccccacaactaccacttcatgggacctgaaaccccccacctctcaatctagcgtgttatcccacctcgacttcaagagtcaacctgagccctctcccgtgctcagccaactatcacagcgtcagcagcaccagtctcaggcagtgaccgttccgccccctggtctagagagttttccaagtcaggccaaactgcgtgaatcaacccccggagactcacccagcactgttaacaaactgttgcagttaccttcaaccaccatagagaacatttctgtgagtgtgcatcagcctcagcccaagcatattaagttagctaagcggcggataccaccagcttctaagattcctgcaagtgccgtcgagatgcctgggtcagccgacgtgaccggcctcaatgtacaattcggagccctagagttcggatcagagccctccctcagcgaatttggcagcgctccatcctccgaaaactccaaccaaattcctatatccctgtactctaaatcgctctcggagcccctcaacacttccctctcaatgacatccgcagtccagaattccacgtataccacctccgtcattactagctgctcgctgacaagctccagcttgaacagcgcctcgcctgtggccatgtcatccagttatgatcagtccagtgtgcacaatagaatcccctaccaatccccagtttcctcttctgagagcgctcccggtactattatgaatggtcatggaggtggtcgcagccaacagaccttagatactccgaagacaacaggcccaccatccgcattgccctccgtcagcagtctcccaagcacaacctcctgcacagccctcctcccaagcaccagccagcacacgggcgacctgacctccagccctctgtcacagctctcatccatgcctgtgtggcgtgctcccctgccaacaagcccgcagcctccaagcccccggcaacggccgccctcacaggtcccccacccgcaggcccctgcctgccccgtcgcttag

SEQ ID NO: 198671 - DNA, 831 bp, Artificial Sequence
  derived and/or modified sequence
gagaaggagagcagccggggccggggcaacaacaaccggaagggccgaggcggaaacagaggcagagagttcagaggtgaagagaatggaatcgattgcaaccaggtagacaaaccgagcgaccgcggtaagcgtgcccgtggccgtgggttcgggcgtggaaggggacgaggcgctggcagattcagtacccaggggatgggtacctttaatcctgctgattattccgacagcacatcgaccgatgtctgtggtaccaaactcgtggtctgggaggcagctcagaacggggcggatgaaggtaccggcgcttggaaaaactcagtcgaagagtggaccaccgaagactggaccgaggacctcagcgaaaccaaagtcttcacggcctcctcagctccagccgagaaccacatcctgccgggccagtctatcgacctcgtggctttgctccaaaagcccgttccacacagccaggcctctgaagccaatagttttgagactagccagcagcaaggctttggacaggctctagtatttacaaacagccagcataataatcagatggcccccggaaccggttcttcaactgccgtgaacagctgcagtccacagtctcttagctccgtgcttggctctggattcggagaacttgcaccccctaagatggcaaatattacttccagccagatactggatcagcttaaagcaccctcgctggggcagtttaccacaacgccgagcacacagcaaaactcaacatcgcacccgacaaccaccacatcttgggatcttaaacctcctaccagccaatcaagcgtactttcccattag

SEQ ID NO: 198672 - DNA, 3087 bp, Artificial Sequence
  derived and/or modified sequence
atgcggctggcccaggtgatcttcgacaagaacgacagcgacttcgaagcaaaagtcaagcaactgatggaggtcacgggcaagaatcaagacgagtgcatcgtagcccttcacgattgcaacggagatgtgaataaggccatcaatatactgctagagggaaactccgatactacatcttgggaaacagtgggatgtaagaaaaagaacttcgctaaggaaaattctgagaacaaggagaaccgagagaaaaagagcgaaaaggaaagctccagaggccgagggaacaacaacagaaagggtagagggggtaaccgggggagagaattcaggggcgaagagaatggtatagattgcaaccaagtggataagccctcagacagagggaagagagcaagaggcagagagctcgcctcaaacactcacaacatcgcccaggatctcagtaataagtcttcatacggtctgaagggggcctggaaaaatagcgtggaagagtggactacggaggattggactgaagatctgtccgaaaccaaggtcttcacggcctcttctgcccctgccgagaatcacattttgccagggcaaagtatagatcttgtcgcacttctccagaagcctgtgccccactcccaggcttccgaggcaaattcatttgagacaagccaacaacagggcttcggacaggcactcgtgttcacaaacagccagcacaacaatcagatggcccccgggacaggaagctccaccgcagtgaatagctgctcaccccagtccctgtcttctgtccttggctctgggtttggggaacttgctcccccaaagatggccaatattacatcctcccagatcctcgatcagctgaaggcgccatctctaggacaattcacaacgactccatcaactcagcagaacagtacttcccaccccaccacgacgaccagctgggatcttaagccgcctacaagccagtcatccgtgctgtctcacctggactttaagtcccaaccagagcctagtcccgtacttagccaactgagccagaggcaacagcatcagtcccaagccgttactgtgcctccgcccggtctggagtcttttcccagccaggcaaaactgagggaatctacacccggagacagcccctctacggtcaacaagctgctccagcttccctccacaacgattgaaaacattagtgtgagtgtgcaccaaccacagcctaagcacattaagctcgctaagcggagaatacccccggcttctaagattcccgcctctgcagtggagatgccgggatcggctgatgtcacgggacttaacgtccagttcggcgcactcgagttcgggtcggagccatctctgagtgaattcggctctgccccttcgagcgagaattcaaatcaaatacctatatcattatactccaaaagcttgtcagagcccttaaacacatcgctatctatgacttctgccgttcagaactccacttatacgacctcagtgataacatcttgttccttgacgtcatccagcctaaactcggcctcaccggtggccatgtcatcatcctatgatcagtcttccgtccacaatagaattccctatcagtccccagtatcgtcctcggagagcgcccccggtacaatcatgaatggccatggcggcggcagaagccagcagacactcgatacacccaaaactaccggtcccccttccgccctgccctccgtgtcctccctaccaagcacaactagctgtactgctctccttccttccacttctcagcacaccggggatctgacatcatcaccattatctcagctgtccagctctctctcctcgcaccaatccagcctctccgcacacgctgccctgtcaagttctacctcccatactcacgccagcgtggagtctgcctcctctcaccaatctagcgcaacattctccacggctgccacctcggtgtctagctctgccagctctggggcttcacttagctcgtctatgaacactgccaacagcctctgtctgggaggcaccccagcttctgcaagcagtagttcaagccgggctgctccgctcgtcacttctggaaaggcgccaccaaacctcccccaaggcgtgccgcccttactccataatcagtatctggtcggccctggaggcttgcttcctgcctatccgatttacggttatgacgagctccagatgctccagtcacgcctcccagtagattattacgggatcccatttgcggctcctacagcccttgctagcagagacggctcccttgctaacaatccctacccaggggatgtgaccaagttcggtcggggggacagcgccagtccagcacccgcgacaacaccagcccagcctcagcagtcgcagtcccagacacatcataccgcccagcagccatttgtaaaccccgcattgcctcccggctactcctacaccggcctgccctattatacgggcatgccatctgcgttccagtatgggcccaccatgttcgtccctccagcaagcgcaaaacaacacggcgtcaatctctctacgcctactccgccattccagcaggccagcggatacggccaacacggatactccactggctatgatgatcttactcaagggaccgccgccggtgattatagcaaagggggttacgccgggtctagccaggccccaaataagtccgcaggcagcgggccaggaaaaggtgtaagtgtatcctcaagtacaaccggcttacccgacatgactggatcggtttacaataagacacaaacattcgacaagcagggctttcatgcaggcacaccaccccccttctctctccctagtgtgttaggatcaaccgggccactggccagcggtgccgccccgggctatgccccacctcctttcctgcatatcctgcctgcgcatcagcagccacattcccagctactacaccaccacttaccccaggatgctcaatctggtagcggacagcgttcgcagccttcttcactacagccaaagtcccaggcctccaaacccgcatatggtaactcaccatactggaccaactag

SEQ ID NO: 198673 - DNA, 3360 bp, Artificial Sequence
  derived and/or modified sequence
atgatgaccagcgtgagcagcgaccactgccggggcgcccgggagaagccacaaatctccgcagcccagagcacacagccccagaagcaggtggttcaggcaaccgccgagcagatgagactcgcccaggttatctttgataagaatgacagcgacttcgaggccaaagtgaaacaactgatggaagtcacaggtaaaaaccaggatgagtgcatagtggccctgcacgactgtaacggtgacgtgaacaaggcaataaacatactgttggaaggtaacagtgacacaactagctgggaaaccgtgggctgtaagaaaaaaaacttcgccaaggagaacagcgagaacaaagagaacagggagaaaaaatcagagaaggagagtagcaggggccggggcaataacaatcgtaagggtcggggcggtaacagaggaagagagtttcggggcgaagaaaacgggattgactgcaatcaggtggacaagcccagtgataggggcaaaagggccaggggcagaggattcggcagaggtcgcgggagaggcgctggtcgctttagtacccagggcatgggaacatttaatcccgccgactattcagacagcacatcaaccgatgtctgtgggacaaagctggtagtttgggaggccgcccagaatggcgccgacgagggcactgaactcgcatctaatactcacaatattgcacaggatctatcaaataagtcgtcttacggtttaaaaggggcctggaaaaatagcgtcgaagagtggaccactgaggattggactgaagacctgtccgagacaaaagtcttcacagccagcagtgcccctgctgaaaaccacatcttgcctggccagtctatcgaccttgtcgccctgctgcagaaaccagtgccccactcgcaagcctccgaagcaaacagctttgagacgagccagcagcagggattcggtcaggctctggtctttacaaactcccaacataacaaccagatggcaccagggaccggaagcagcaccgcagtgaatagctgctccccccagtccctgagttcagttctgggctctgggttcggggagttagcacccccgaagatggcgaatatcacctcttctcaaatattggatcagctgaaggcaccgagcctcggacaatttaccaccaccccctctacccagcagaattctacctctcatccaacaactacaacaagttgggatctgaaaccacctacatctcagtctagcgtgctatcacatctagatttcaagtcacagccagagccatctccggtccttagccagctctcacaaagacagcagcatcagagccaggccgtgacagtgccgccaccagggttggagtcatttccctcacaagccaagctccgcgagtccacccctggggattctccgagcactgtgaataaactcctgcaactgccatcaaccactatcgaaaacatcagcgtgtcagtccaccagcctcaacctaagcacatcaaactagccaagagacgaattcctccagcctcgaaaatacctgctagcgcagtggagatgcctgggagtgcagacgtgaccgggctaaatgtgcaattcggtgctctggagttcgggtccgaaccctccttgtcggaattcggatctgctccctccagtgaaaattccaaccagattccgataagtttgtactcaaaaagcctgagtgaacccctgaacacctcactctccatgacatccgctgtgcagaactctacatacactacatcggtgatcacctcctgttctctcacctccagctccctgaactctgcatcaccagtggcaatgagctcatcatatgaccagagcagcgtccacaaccggatcccttatcagagtcccgtcagttcgtccgagtcagcacccggaacaattatgaacggtcatggtggcggtaggtctcagcaaacactagatacccccaagaccactggccctccatcagctctgccgtcagtgagctcccttccttcaacaactagctgtaccgctctcctgccttccaccagccagcataccggagatctcacttctagccccctgagccagctatcctcttccctatccagccaccagtcaagcttgtctgctcacgctgcactctcctcttcaacatctcacactcacgctagtgtcgagtcggcgtcttcacaccagagttcagctactttctccactgcagccacatccgtgtcatcctcagcctctagcggggctagcttgtcttccagcatgaacactgcaaactctctgtgcctgggggggactcctgcgtccgcctcatcttcatcgagcagagccgcccctctggtgacaagcggcaaggcacctccaaacctgccacagggcgttcctcccttgttgcataatcagtacctggtgggtcccggcggactgctgcctgcataccctatatacggctatgatgagctccagatgttgcagtcaagactccctgtcgactattatggcatcccttttgctgcacctaccgccctcgcttctagggatggctcactggccaataacccttacccgggcgatgttacaaagtttggcagaggcgactccgcttcccccgcccccgctactaccccggcccaacctcagcagtctcagtcgcagacacaccatacagcccagcagccttttgtgaatcccgctctgccccctggatactcgtataccggcttgccttactacaccgggatgcctagtgctttccagtatgggccgaccatgtttgttccccctgcttccgccaaacagcacggggtcaacctgtcaacacctactcccccgtttcagcaggcgagcggatatggacagcatgggtatagcacgggatacgacgacttgacccagggaactgcagcgggcgactacagcaagggcgggtacgccggctctagtcaggcccctaacaagtctgccggttctggcccaggcaaaggagtctctgtatcctctagcaccactgggctgccggacatgaccggcagcgtctataataaaacgcagacttttgacaagcagggattccatgcaggcacccctccccccttctcgttgccatcagttctgggatccaccgggcctctcgctagtggagccgcccctggctatgctcccccaccttttttacatattctgcccgcacatcagcagccacacagccagctgctccatcaccatctgccacaagacgcccagtccgggtcagggcagcgctcccagccaagctctttacagccaaagtcccaggcgagtaagcccgcttacggcaattccccatactggaccaactag

SEQ ID NO: 198674 - DNA, 2625 bp, Artificial Sequence
  derived and/or modified sequence
atgcggctggcccaggtgatcttcgacaagaacgacagcgacttcgaggcaaaggtgaagcagctgtccgaaacaaaagtttttaccgcgtcttcagcccccgccgaaaatcatatcttacctggtcaaagcattgatctggtggccctgttgcagaaacccgtgcctcacagtcaggcctcagaggccaattctttcgagaccagtcagcaacaggggtttggtcaggccctcgtttttaccaattcacaacataataatcaaatggctccaggaacagggtccagtactgccgtgaattcatgctcaccccaatctttgtcctcggttctgggttccgggtttggagagctggctccaccaaagatggccaacattacatcctctcaaattctggaccaattgaaggcgccttcccttggtcaattcaccaccaccccgtctactcagcagaatagcacttcgcacccgactaccacaactagctgggacctcaagccacctacatcacagtcctcggtgctatcacaccttgactttaaatcacagcctgagccttcccctgtcctgtcccaactgagtcaaaggcagcagcatcaaagtcaagccgttaccgttccaccaccaggtctggaatcttttcccagtcaagcaaagctgagagagagcaccccaggggactctccatccactgttaataagttactgcagctgccctcaaccacaatcgagaatatttctgtgagcgtgcaccaacctcagcccaagcacattaagttagccaaacgtagaattccccccgcatctaaaattcccgcaagtgctgtcgagatgcctgggtctgcggatgtaaccggactgaacgtgcagttcggagcactggaattcggcagcgaacctagtttatctgagtttggctccgctccttcatctgaaaattcaaaccagatccctattagtttatactcaaagtcactgtcggaacctctcaacacctccctgtctatgacttccgcagtgcagaattccacctatacaactagcgttatcacgagctgcagtctcactagcagctccctgaactccgcttcgccagtagcaatgtcctcttcctacgaccagtcttccgttcacaaccgcatcccctaccaatcgcctgtttcaagctcggaaagtgcacccggtacgataatgaacgggcacggcggcggcagaagccagcagaccctggataccccaaaaacaaccggccctccgtccgctctgccttctgtcagctcgctcccaagtactaccagttgcactgccctgctcccgtcaacctcccagcacactggggatcttacctcaagtccacttagccagctatcctcctccctgtccagccaccagtcctcacttagcgcccacgccgccctgtcgtcatcaacttcacacactcatgccagtgtggagtccgccagtagccaccagtcctctgcgacttttagtactgctgccaccagcgtctcttcttcagcctcatcaggggcttccctgtccagctctatgaatacagcaaacagcctgtgcctgggagggacccctgcctcagcaagcagctcgtcgagcagagctgcccctctggttacatccggtaaggcgccgcccaacttaccccaaggtgtgccgcccctcttgcacaatcaatacttggttggccctggtggactcttaccggcgtaccctatctacggctatgacgagttgcaaatgctgcagtcccgtcttccagtggattactacggaatcccctttgcagcgccgaccgcgctcgcaagccgcgatggttctcttgccaacaatccataccccggggatgttactaaatttggccggggtgatagcgcttccccagcccctgctacgacaccagcccaaccccagcagtctcaaagccaaacacatcacaccgctcagcagccatttgtcaaccccgcactgcctcccggatacagttataccggacttccatattataccgggatgccgtccgccttccagtatggccccaccatgttcgtcccccctgctagcgccaaacagcatggagtcaatctctcaactccgacaccaccctttcaacaagccagcgggtatggacagcacggctatagtactggttacgacgatctgactcaggggaccgccgccggggattatagcaagggcgggtatgcggggtcttcacaagctcccaataagagtgccggatcaggaccgggaaagggcgtgtcggtgtccagctccaccaccggactccctgacatgaccggcagcgtgtataataagactcaaacgttcgataagcagggctttcacgctggcacccccccgcctttctccctcccctctgtgctgggcagcaccggacccctagccagcggcgctgcacctggctacgcaccccccccatttctgcatatcctgccagctcatcagcagccacatagccaactcttacaccaccatctgcctcaggacgcccaaagtggcagtgggcagcgatcccaacctagctcgttacagccgaagagccaagcaagcaagccagcgtatgggaactctccttactggactaattag

SEQ ID NO: 198675 - DNA, 3360 bp, Artificial Sequence
  derived and/or modified sequence
atgatgacatcggtaagcagtgatcactgtcgcggagccagagagaaaccccagatttccgctgctcagtcaacccaacctcagaaacaggtggtgcaagccacagcagagcagatgcggttggcgcaagtcattttcgataagaatgacagcgatttcgaggcaaaggtaaaacaactgatggaggtgacaggaaagaatcaagatgagtgtatcgtcgccctgcatgactgcaatggcgacgtgaataaagccataaacattctgctggagggaaactcggatactaccagctgggaaactgtgggctgcaagaagaagaattttgcaaaggagaattctgagaataaagaaaatcgggagaagaagagcgaaaaagagagctctcggggtcgtggaaacaataaccgcaagggtagaggaggcaatcgcggtagggagttccggggtgaggagaacggaatcgactgcaatcaggttgataagccaagcgatcggggtaagcgggctagaggtagagggttcggtcggggtcgaggccgaggagcaggccgattctctacccaggggatgggcacgttcaatcctgccgactatagtgacagcacaagtacagacgtgtgtggcaccaagctggtcgtgtgggaagcggcacagaatggtgccgacgaggggaccgagctcgcaagcaacactcacaatatcgctcaagatttgtccaacaaatcttcttatggtcttaaaggcgcttggaaaaatagtgttgaggaatggacaacggaagactggaccgaggatctgtccgaaacgaaggtgttcacagcttctagtgcacccgctgagaatcatatcctcccaggtcagagcatagacttagttgcactgctgcagaagcctgtaccacactctcaggcttctgaagcgaactcattcgagacctcccagcagcaagggtttggtcaggcgctcgtgttcactaacagccagcataataaccaaatggctcccggaaccggctcttcaacggccgttaacagctgtagcccccagtccctcagctcagtcctgggaagcggattcggagagctggctcctccaaaaatggctaacatcacttcatcccaaatcctggaccagctgaaggctccatccctcgggcagttcaccaccacacccagcacgcagcagaacagtacaagtcatcctacaactacaacaagctgggatttaaagccacctacctcacagagctccgttttatcccaccttgactttaaaagccagcccgaaccttcccctgtgctgtcacagctgtcacagcgtcagcagcaccaatcacaggccgtaacagtgccacccccagggctcgagagtttccccagccaagcaaaactgagggagagtactcctggcgacagccccagcactgtgaataaactgctccaactgccctctacaacaatagagaatatctcagtctccgttcaccagccacagcccaagcacatcaagctggccaaacgtcgtatacccccagcctcaaagatcccagccagtgccgtggagatgcctgggtcggcagacgtgaccggcttgaacgtgcaattcggtgctcttgaattcggcagcgagcccagccttagcgaattcgggtccgcgccttctagcgaaaacagcaaccagataccaatcagcctgtatagcaagtctctgtccgaacctctcaataccagcctcagcatgactagcgctgtccagaactcaacatacaccacttctgtcattacttcgtgctccctgaccagttcgtcactgaactcggcatcccccgtcgctatgagttcatcatatgaccagagctccgtccataatcggatcccctatcaaagcccggtttcgagcagtgaaagtgcgcctggaactattatgaacggccatggcggaggccgttctcaacagacattagatacacccaaaactaccggtcccccttccgcactgccgtcggtcagctcactgcctagtaccaccagctgcaccgccttgctgccatctacgtcccaacatacaggcgacctgacttcaagtcctctgtcacagttgtcctcctccctatccagccatcagtcttcattgtctgcacatgcagccctcagctcatccacctctcacacacatgcctcagtagagagcgcttcctcacatcagtcctccgctaccttctcaacagctgccacatccgtctcctcgagcgcgtcctccggggcttctttgtctagctctatgaatacggctaattccctgtgcttgggcggtacccccgcttcggcctctagctccagctcaagagcggctcctctcgtgacctctggtaaagcccctccaaatttaccacagggagtcccccctctgttgcacaatcaatatctcgtcgggcctggaggcctgctcccagcttacccaatttatgggtacgacgaactgcagatgttgcagagcaggctgcctgttgactactatgggatccccttcgccgctcccaccgctctggcctctcgggacggcagcctggctaacaatccctacccaggggacgttaccaaattcggccgaggagattctgcctcccctgccccagccaccactcccgcacagcctcagcaaagtcagagccagacgcaccacaccgcacagcaaccattcgtgaacccagcactgccacctggctactcgtacaccggtttaccgtactataccgggatgccttctgccttccagtatggccctacaatgttcgtgccacccgcttctgctaagcaacatggcgtgaatcttagcaccccaacacctccattccagcaggcctcagggtacgggcagcatggatacagcactggctatgacgatctcactcagggcaccgcggcaggcgactactctaaggggggatatgccggttccagtcaggcccctaacaagtctgccggtagcgggcctggcaagggcgttagcgtatcttcctcaacgacgggcctgcccgatatgacaggcagcgtctacaacaaaacgcagacttttgacaagcaaggcttccacgcaggcacccctccacccttttctctgcctagcgtactgggctctacgggcccactagcctcaggcgcagctccgggttatgctcctcccccatttctacacatcctacccgcacaccagcaacctcactcacaacttcttcaccaccacctgccccaggacgcacagagtggatccgggcagagaagccagccttcaagcctccaacctaagagccaggcatcgaaacccgcatacggaaacagtccttactggaccaactag

SEQ ID NO: 198676 - DNA, 3360 bp, Artificial Sequence
  derived and/or modified sequence
atgatgacaagcgtgtcctctgaccactgccgcggagccagagaaaagccccagatttccgcagcccagagcacccaaccacagaaacaagtggtgcaggccactgccgaacagatgagactcgcccaggtgattttcgacaaaaacgattctgacttcgaggcaaaggtgaagcagctcatggaggtgaccggcaaaaaccaagacgagtgtattgtcgctctgcacgattgcaacggggacgtcaataaggccatcaatatacttctcgaggggaactcggacactacctcatgggagaccgtgggctgtaaaaaaaagaacttcgctaaggaaaattcagagaacaaagagaaccgggaaaaaaagtctgagaaagagtcctccagaggaagaggcaacaataaccgaaaaggcagagggggaaatcggggtcgtgagtttaggggcgaggagaacggcatagattgtaaccaggtcgacaagcccagtgaccgtggcaaacgggcacgcggacgcggatttggcaggggcagaggacggggtgccggaagattctctacccaggggatgggcaccttcaacccagcagattacagcgatagcacatctactgatgtgtgtgggaccaagttagttgtgtgggaggcggctcagaacggggctgacgaaggcacagaactagctagcaacactcacaatatcgcccaagatctgagtaacaaatcctcatatgggctgaagggcgcttggaagaactctgttgaggagtggaccaccgaggattggacggaggatctaagcgagaccaaggtttttaccgcaagttctgcccctgccgaaaatcacatcctgcctggccagagtatcgacctagtcgctctgctgcagaagccagttccccactctcaggctagcgaagccaattcctttgagacctcacagcagcaaggctttggccaggccctggtttttaccaactcgcagcacaacaatcaaatggcaccagggacagggtcctccacagccgttaatagctgtagtcctcagtcactgagcagtgtcctgggctccggatttggagaactcgccccacccaaaatggctaacatcacctcttcccagattctagaccagttgaaagcaccctccctgggacaatttaccacgacacctagcacacagcaaaatagcacgtcgcatccgacaaccactacatcatgggacctgaagcctcctaccagccagagctctgtgctgagccatcttgatttcaagagccagccggaaccatctcccgttttatcacagctgagccagagacagcagcatcagtcccaggctgtgactgtgcctccacccggactggagtcctttccctcccaggctaagctgcgggagagcactccgggtgattccccctccactgtgaataaactgctgcaattaccatcgacgacaattgagaacatctctgtatccgtgcaccaaccacagcccaaacacatcaagttggccaaacgccgtataccccctgcttctaagattcccgcatccgctgtggaaatgcctggaagcgccgacgtcactggcctgaatgtgcaatttggggctcttgaattcggtagcgaacccagcctgagtgaattcggatcagcaccgtcaagcgagaacagtaaccagatcccaatctctctatattcaaagtcactttccgaaccacttaatacaagcttaagtatgacgagtgccgtgcagaatagcacgtataccacgtccgtgattacttcctgcagtctgacctcctcgtccctgaacagcgccagtccagtcgccatgtcttctagttacgaccagtcttcggtgcataacagaattccttaccaatcacccgttagctcgagtgagtccgccccagggactataatgaatggtcacgggggaggccgtagccagcagactctcgataccccaaaaaccactggccctccctctgctctaccctctgtgtcctccttgccctcgactaccagttgtaccgccttgctcccgtcaaccagtcagcatacgggggaccttacgtccagcccgctgagccagttgtccagctcgctgagcagccaccagtcctcactgagcgctcacgcagcactgtcgtcatccacctctcacacacacgccagcgtagaaagtgcaagctcacaccaatcatcagccaccttctcaacagccgcaacatctgtgtcctcctctgcttcttctggcgcttcactctctagtagtatgaatactgcaaactccctctgcctcggaggcacaccagcctccgcctccagttcctcttcaagagcagcacctctggtcacctcgggaaaggccccacccaacctgcctcagggggttcccccactcttgcataaccagtatctcgtcggccctggcggacttctgcccgcatacccaatttacgggtacgatgaacttcaaatgctccagtctcggctaccggtcgactactacggcataccattcgccgctccaaccgccttggcaagccgggacgggtctctggccaataatccatatccaggcgacgttactaagtttggacggggagatagcgcttcgccggctccagccacgacgcccgctcagccccaacagagccaatctcagacccaccacaccgcacagcaaccctttgtcaacccagcgctgcctcccggatacagctatacgggcttaccctattatacagggatgccttccgcattccagtatggacccacaatgttcgtcccacccgctagtgccaaacagcacggagtcaacctgtcgacccccacacctccattccaacaggccagcggttacggccagcatgggtattctacaggatatgatgacctgacccagggcactgctgccggagactactcaaagggaggctatgctggctcctctcaagcccctaataagtctgccggaagtggccctgggaagggggtgagtgtgagttcgagtaccactggcctacccgacatgaccggatctgtgtataataaaacccagacctttgataaacagggatttcacgctggcacacctcctcccttcagtcttccttcagtcctgggcagtaccggtccattagcttccggcgctgcccctggctacgcccctccaccgttcctgcacatcctgccagcgcaccaacagcctcatagccagcttctacaccaccatctgccccaggacgcacagagtggatcaggccaacgctcccaacccagcagcctccagccgaagagtcaggcgtcgaaacctgcctacgggaacagtccttactggactaattag

SEQ ID NO: 198677 - DNA, 1023 bp, Artificial Sequence
  derived and/or modified sequence
atggaagtgacaggtaagaatcaggacgagtgtattgtagccctgcacgattgcaatggcgacgtcaataaggccataaacatcctgctcgagggtaattctgacacaaccagctgggaaaccgtcggttgcaagaaaaagaattttgctaaagagaatagtgagaacaaagagaacagagaaaagaagagcgagaaagagagtagccgtgggagaggcaacaacaatcggaaaggcaggggcggtaaccggggtcgcgagttcaggggcgaagaaaatggcattgactgcaatcaagtcgataaaccaagtgatcggggaaagcgggcacgtggaagaggcttcggcagaggcagaggtcgcggagccggacgcttctccactcagggcatgggcacatttaaccccgcagattactctgactcaacttccactgacgtgtgcggaaccaagctcgttgtctgggaggccgctcagaacggggcagacgaaggaaccggggcatggaagaatagcgtggaagagtggaccaccgaggactggactgaggatctgagcgaaacaaaagtctttaccgcttccagcgctcctgccgaaaaccatatcctacctggccagagtattgacctggtcgctttgctacaaaagcctgtaccccactcgcaggcctctgaagccaacagctttgagaccagtcaacagcagggctttggccaggctctggtctttaccaatagccagcacaataatcagatggcacccggaacaggctcaagcactgctgttaacagttgttcaccccagagtctgagttccgtcttaggatcaggctttggggagcttgctcctcccaaaatggcgaatataactagttcccagattctggatcagctgaaggctccctcgctgggacaattcactaccaccccaagtacacaacagaactccaccagccatccaacaaccacaacaagttgggatctcaagccccctactagtcaaagctccgtccttagccattag

SEQ ID NO: 198678 - DNA, 1239 bp, Artificial Sequence
  derived and/or modified sequence
atgatgacatcagtcagttccgatcactgcagaggagcccgtgaaaaaccccagatcagtgctgcccagtcaactcaaccccaaaagcaggtcgttcaggccactgcggaacaaatgaggctggcacaagtgattttcgacaagaacgatagcgacttcgaggccaaggttaaacagcttatggaggtgacaggaaagaaccaggatgagtgcatagtggccctccacgattgcaatggagacgtgaataaggcaattaacatcctgctcgaggggaatagtgatactacttcgtgggagaccgtgggctgcaagaagaagaacttcgctaaagagaatagtgagaataaagagaacagagagaagaagtctgaaaaagagtcctctcgtggacgcggtaacaataacagaaaaggacgagggggtaacagaggccgagaattcaggggagaagaaaacggcattgactgcaatcaggtggataaaccttctgacagaggtaaaagggccaggggtcgcgaactcgcctcaaatactcacaacatcgcccaagatctaagtaataagtcatcctacgggctcaaaggcgcttggaagaatagcgtcgaggagtggactactgaagattggaccgaggatctcagcgaaactaaggtctttactgcctcaagtgcccctgcggaaaatcacatactcccaggacagtctattgacctcgtcgctttgttgcagaagcctgttccacatagccaggcttccgaggccaactcatttgaaacctcccagcagcaagggttcgggcaggcactcgtgtttacgaacagtcagcataacaatcaaatggcccctggtactggaagcagtaccgccgttaactcgtgttcgcctcagagccttagcagcgtgctgggatctgggtttggagagttagccccaccaaaaatggccaatatcacttccagccagatcctggatcagctgaaggctcccagcctcggacaatttactacaacgcccagcacacagcagaactctaccagccatcccaccacaaccactagttgggatttaaaacctcccacttctcaaagctccgtcctttcccatctggattttaagagtcagcctgagccaagtccagtgctctcccagctttctcaaagacagcagcatcagtcacaggctgttacagtgcccccacccggtctcgaaagctttccctcacaagctaagctgtag

SEQ ID NO: 198679 - DNA, 2061 bp, Artificial Sequence
  derived and/or modified sequence
atgatgacatctgtatcttctgaccattgccgcggagccagagaaaaaccacagatctcagctgcacagtctactcagccgcaaaaacaggtcgttcaggccacagcagaacagatgcgcctggcccaagtcattttcgacaaaaacgattccgacttcgaggccaaggtgaagcagctgatggaagtgaccggcaagaaccaggacgagtgcatcgtggccttgcatgactgcaatggagatgtcaacaaggcaatcaacattctgttggagggcaatagcgacaccacttcttgggagactgtaggttgcaagaagaagaactttgcaaaagagaatagcgagaataaggaaaatagggaaaagaagagtgagaaggagtcttctagaggacgtgggaacaacaaccgcaaggggaggggcggaaacagagggcgtgagttccggggagaggagaacggtatcgattgcaatcaagtggataagccttccgatagaggtaaacgcgcaaggggcagggaactcgcgagcaatactcacaacatcgcgcaagacctgtccaacaaaagctcctacgggcttaagggcgcatggaagaacagtgtcgaagaatggactactgaagattggacggaagacttgtcggagacaaaagtattcactgcctcaagcgctcctgcagagaaccatattttgcccggacagagcattgacctggtagcactcctccagaagccagtacctcattcacaagcctctgaggccaactccttcgagacgagccagcagcagggatttggccaggcgttggtattcactaacagtcaacacaataaccaaatggcccctggaacgggctcgagcacagcagttaacagctgttcacctcagtccctcagttctgttctgggctcaggatttggggaacttgctccccctaaaatggcaaatatcaccagcagccagattcttgatcagctcaaagcgccatcgcttggccagttcacaactacaccatcaacccagcaaaattcaactagccaccctactacaacgaccagctgggacctgaagcccccaacaagtcagagctctgtactctctcacctcgatttcaaatcccagccagagcccagccctgtgctctctcagctttctcagcgacaacagcaccagtctcaagcagtcacggttcctccgccaggcctggagtctttccccagccaagcgaagctgcgggaaagtacacctggggactctccctctacagtcaataaactactccagctgccatctacgacaattgagaatatttccgttagcgtacaccagccacagcccaaacacattaagttggctaagcggaggatccctcctgcctccaaaattcctgcctcggccgtcgaaatgcctggaagcgcagatgtgacaggcttaaatgtgcagttcggagcgttggagttcggaagtgagccaagcttgtcagagtttgggagcgctcccagttccgagaacagtaaccagattccaatttcgctttactccaagtccctgtccgagccgctcaatacaagtcttagcatgacaagcgccgtgcaaaactcgacttataccaccagcgtgattacaagttgcagcctaacaagctcttcacttaactctgccagccccgttgcgatgagttcctcgtacgaccaatccagcgtccataataggatcccgtatcagtcaccagtgagctctagcgaatcggcacctgggacaatcatgaatgggcatggcggaggcaggtcccagcaaactctggataccccaaagacgacaggtcccccaagcgcgctgccctcagtaagtagcctgcctagtaccacctcctgtaccgctttgctgccctccacttctcagcacacgggggatctgacaagctcacctctgtcacaactgtcttccatgccagtgtggagagcaccacttcccaccagtccacagccaccgagcccaagacagaggcccccttcacaggtcccccatccacaggccccagcatgcccggttgcatag

SEQ ID NO: 198680 - DNA, 831 bp, Artificial Sequence
  derived and/or modified sequence
gagaaggagtcctcacgaggcaggggcaacaataatcggaaaggcaggggtggaaaccggggtcgggaattccggggagaggagaatggcattgactgtaaccaggtcgataagcccagcgatcgcggaaagagagctcgcggtcgtggcttcggcagggggagaggcagaggagccggacggttcagcactcagggaatggggacatttaatcctgccgactattccgactcaacctccacagatgtgtgcggtactaagctcgttgtctgggaagccgctcaaaatggcgctgatgagggcaccggcgcttggaagaattccgtcgaggagtggaccacggaagattggacggaagacctaagcgagacaaaggtgtttaccgcgagctccgcccctgcagagaatcatattctgcctgggcagagcattgacctcgtggccctactgcaaaagccagtgccccactcacaggcttccgaggctaattctttcgagaccagccagcagcagggcttcgggcaggcccttgtttttaccaattcacagcataacaaccaaatggctcctggtacaggctcaagcactgccgtaaatagctgttcgccacagtctctctcaagcgttctgggatctggattcggagagctggccccacccaagatggccaatatcacttccagccagatcctggatcagctgaaagcgcctagtctgggtcagtttacaactaccccctccacccaacagaacagcacctcccaccccacaacaacaacctcctgggacctcaaacctccaacctcacagtcaagcgtcctgagccactag

SEQ ID NO: 198681 - DNA, 3087 bp, Artificial Sequence
  derived and/or modified sequence
atgcgtctggcccaagtgattttcgacaaaaatgacagtgatttcgaagctaaagtcaagcagctcatggaggttaccggaaaaaaccaggatgaatgtattgtcgcccttcatgactgtaatggcgacgttaataaagctataaacatcctgctggagggaaattccgataccacgtcatgggaaactgtgggctgcaagaaaaaaaatttcgcaaaggagaattctgagaataaggaaaaccgggaaaagaaatctgagaaggaatcttcgagaggtcggggaaacaacaaccggaaggggcgaggaggcaatcgcggtagggagtttaggggagaggagaacggaatcgactgcaatcaagtagacaaaccatctgacaggggaaagagagcacgcggtagagagttggcctccaatactcacaatatagcacaggacctgtctaacaagtcatcatacggactcaaaggtgcctggaaaaactctgtggaagagtggacaaccgaggattggacagaggatttgagtgagactaaagtcttcacagcttcctctgcgcctgctgaaaaccatattctaccagggcagagcatcgatctggtggcactgcttcaaaaacctgtcccccactcacaggcatcagaggcaaactcctttgaaacctcacaacagcaaggttttggacaggccctggtcttcactaatagtcagcataataatcagatggcaccagggacaggctccagtaccgccgtgaactcgtgctcaccccagagcctgtccagtgtgctcggctccgggtttggggagctcgctcccccaaagatggccaatattacctccagtcagatacttgatcagttgaaagccccaagcctcgggcagtttacaacaacgccgagcactcaacagaatagcacttcccaccccaccaccactacctcctgggatctcaagcccccaacaagccagtcctccgttttaagccatttagattttaagtcgcagcccgaaccctcacccgtcctctcccagctgtcccagaggcagcaacaccagtctcaagcggttacggtcccgcctcccggattggaaagttttccctctcaggcaaaactgagggagtccactccaggagatagcccaagcacagtgaacaagctgctacaactgccaagtaccacaattgagaatattagcgtgtccgtccaccagccgcaaccaaaacatattaagttagccaagcgtaggattccccctgcttctaagatccctgccagtgccgtggagatgcccggatcagctgacgttactggcctaaacgtccagttcggcgctctggagtttggtagtgagccttccctaagcgaatttggaagcgctcctagctcggaaaattctaaccagatccctatcagcctctactctaagtctctcagcgagcctcttaatacctccttatcaatgacaagcgctgtacaaaactccacctacaccacctctgtaataacgtcatgctctttaacttcttcatcgttgaactctgctagtccggttgccatgtcttccagttatgatcagtcgagtgttcacaatagaatcccataccaatcgcctgtttcatcctccgagtctgccccaggcaccattatgaacggacacggtggcggaaggagccagcagaccctggacacccccaaaacgacaggccctcctagtgctctgccgtcagtgtcatctctgccgagcactactagctgcactgctctgttgccaagcacctctcagcacactggggaccttaccagtagcccactaagtcagttatcttccagcctgagctcccaccagagttcgctgagtgcccacgccgcactgagtagcagcacctcacatacgcacgcttccgtagaatctgccagttctcaccagtcttcagctactttcagcaccgcggctacaagtgtgtcttcttctgcctcaagtggtgcatcactttccagctccatgaacacagctaactcactgtgccttgggggaacacctgcatctgcgtcttcgtcctctagtcgcgcagctcccctggtcacatcgggaaaagccccaccaaacctgccacaaggggtacctcctcttcttcataatcagtacctcgtcggccctggtggcctcctcccagcttaccctatttacgggtacgacgaactgcagatgctccaatcacgactccccgtagattactatggcatcccctttgccgcaccaacagccctcgccagccgggatggctcactggcaaacaacccctatccaggggacgttacgaaattcgggcgtggggattccgccagcccagcaccggcaaccacacctgcacaacctcaacagtcacagagccaaacacatcacaccgctcagcaaccctttgtgaatcctgccttaccacctgggtactcttataccggtctgccatattacaccggtatgccctcggctttccagtatggcccaaccatgttcgtgccacccgcttctgccaagcagcatggagtcaacctgtcaactcccacacccccttttcaacaggcatccgggtatgggcaacatggctatagcaccggctacgatgacctgacacaggggacggctgctggggattatagcaaggggggttacgccggatcttctcaagcccctaacaaatctgccggatctggaccaggtaagggcgtcagtgtctcttcatctacaaccggcctacctgatatgacaggttccgtatataataagacgcagacctttgataaacagggatttcacgctggtaccccccctcctttctcactgccctccgtgttgggctcgaccggccctttggcgtctggggctgccccaggctacgcacctcctccatttcttcatatcctgccggcacaccaacagccacacagccagctgctgcaccaccatctgccccaggacgcacagagtgggagtggtcaacggagtcagccatcgagtctccagccgaaatcccaggcatccaagcctgcttacggcaactcaccctattggacgaattag

SEQ ID NO: 198682 - DNA, 3360 bp, Artificial Sequence
  derived and/or modified sequence
atgatgaccagcgtgagctccgaccactgccgcggtgctagggagaagccacagatttctgcagctcaatccacgcagccacagaagcaggtggtgcaagcgaccgccgagcagatgagactggctcaggtcatctttgataaaaatgattccgattttgaggccaaagtgaaacaactgatggaagtcacaggtaaaaaccaggatgagtgtatcgtggccctgcatgattgtaatggtgacgtaaataaggctatcaacatcttactggaaggcaacagcgatacaacctcgtgggaaaccgtcggctgcaaaaagaaaaattttgccaaggagaatagtgagaacaaagaaaatcgcgagaagaagtctgagaaggaatcatctcggggtcggggtaacaacaaccggaaggggagaggcggaaatagaggtcgtgaattccgaggagaagaaaatggcattgattgtaatcaggtggataagccatctgaccgtggcaagcgcgctcgaggcagagggtttggccgtggcaggggacgaggggcagggcgtttctctacccagggtatgggaacattcaacccagccgactattctgattcaacctctacagatgtctgtggcacaaaattagtggtttgggaggcagcccagaatggcgcagatgaaggcacagaactcgcaagcaacacacacaatatcgcccaggatctgagtaacaaatctagctacggccttaagggcgcatggaagaactcggttgaggagtggacaacggaggattggacagaagacttaagcgaaacgaaggtatttactgcttcctcagcacctgccgagaatcacattttgcctggacagtccattgacctcgtagcgcttctccaaaagcctgtcccgcattcccaagcaagtgaggctaacagctttgaaacttcgcagcagcagggctttggccaggccttagtctttaccaacagccaacataacaaccagatggccccaggaacgggtagctccactgccgttaattcatgcagccctcagtcattgagttccgtactgggatcaggctttggagagcttgctccccctaagatggccaacattacaagtagccagattctggaccagttgaaggccccatccttgggtcagttcaccacaactcctagtacccaacaaaacagtacatctcatcccacaaccacaacctcttgggatctgaagcccccaactagccagtccagcgtgttgtcacatttagattttaagagtcagcccgaaccatcaccagtgctcagtcagctgtctcagagacaacaacaccaatcacaggccgttaccgtgcccccaccgggacttgagtctttcccttcccaggccaagctgagggagtccacaccaggcgattcccccagcactgtgaataagctccttcaactccccagtacaacaatcgagaatattagcgtcagcgtgcatcagccacagcctaagcacatcaaactagcaaaacgcagaatccctccagcctccaagatccctgcgtctgccgtagagatgccaggtagtgctgacgtgactggcttgaatgtccaatttggagctctggagttcggatccgaaccctctctctccgagtttggtagcgcaccctcttccgaaaactccaaccaaatacctattagcttgtacagtaagagcctcagcgaacccctcaacacatctttgtctatgacatccgctgtccagaatagcacctataccacttccgtgatcaccagctgcagccttacctctagctctctcaactctgctagccccgtggcaatgtctagtagctacgaccagtcaagtgttcataacaggatcccctaccagagtccagtctctagctccgaatctgctcctggaaccatcatgaacggccacggaggaggtagatctcagcagaccttggatactccgaaaactactggtcccccttctgcccttccaagcgtgagctctctcccttcgacaacttcctgtacggctctgttgccgagcactagtcagcatactggggacctcacctcatcccccttatcacagctatctagttctctgagctcacaccaaagtagtttgagcgcccacgccgctctgagcagctccacctcccacacacacgcctcagtggaatctgcctcatctcatcaatccagtgccactttcagcaccgccgcaacctcagtgagtagctctgcgtcctccggcgcaagcctgtcctcctccatgaatacagctaatagtctgtgtctaggcggaacgcctgcctcagcctcttcaagcagctccagggctgcaccccttgtcactagcgggaaggcgccacctaatcttccacagggggttccccctctcttgcataatcagtacctcgtggggcctggcggattacttcccgcataccctatttacggctacgacgagcttcagatgttacagtcccgactgcccgtcgactactacgggattcccttcgctgccccaacagcacttgcttcccgcgacggaagtttggccaacaacccctatcctggcgacgtgacaaaatttgggaggggtgattccgcatcgcccgcacctgccaccactcccgcacagcctcagcagagccagtcacagacacatcatacagcccagcaaccctttgtgaatcctgccctcccccctgggtactcttacacagggctgccttattataccggcatgccatcagcttttcagtatggcccaacaatgttcgttccccctgcctccgccaagcagcacggagtcaacctgagtacacctactccacccttccagcaagcgagcggatatggccagcatggctattccactggctacgatgacttgacacaggggacggctgccggtgactatagcaaaggaggttacgccggaagctcccaggcacctaacaagagcgccggttccgggccagggaagggagtgtcagtgtcatccagcaccactggcctgcccgatatgacagggtccgtatataataaaactcagacgtttgacaaacagggcttccacgccggaacacccccaccgttctctctgccatcagtgctggggagcacagggccactcgcctccggagctgctccaggctatgcccctcctccgtttctgcatattcttcccgcacatcagcagccccattcccagttgctgcaccatcatttgccccaggatgcccagagcggttctgggcagaggtcccagccatcatccttgcagcccaagtcacaagcaagtaaacctgcatatgggaacagcccctactggaccaattag

SEQ ID NO: 198683 - DNA, 2625 bp, Artificial Sequence
  derived and/or modified sequence
atgaggcttgcgcaggtgatttttgataaaaatgacagcgacttcgaggccaaggtgaaacagcttagcgagaccaaggtgttcaccgcaagctctgcccctgctgaaaaccatatcttgcctggacagagtatcgatctcgtagcactcctgcagaagccggtaccacatagccaagcctctgaagccaactccttcgagacaagccagcagcagggcttcggccaagcactggtatttactaatagccagcataacaatcagatggcccctggaacaggcagttccacggccgtgaatagttgttcccctcaaagcttatcttccgtcctcggatcaggcttcggagagcttgcaccaccaaaaatggcaaacattacaagcagccaaatcctggaccagttaaaggctccatctttagggcagtttactaccaccccctctacccagcaaaattcgacaagccacccgactacgacaaccagttgggatctgaaaccgcctacatcgcagtcatccgtattatcccacttggattttaaaagccagccggaaccaagtcccgttctctcccagttgagccagagacagcagcaccagagccaggcagtcacagtgccgccacccggactcgagagctttccctcgcaggctaagttgagagagtccacgccaggggacagcccaagtaccgtgaataagctgttgcaactacctagcaccaccatcgagaatatcagcgtttctgtccatcagccgcaacctaaacatattaagttggccaaacgtagaatcccccctgcctctaaaatccctgccagcgcagttgaaatgcctggttccgcagacgtcaccgggctaaatgtgcaatttggggctctggagtttggaagtgaaccgtccctcagtgaatttgggtccgccccaagttctgaaaacagcaaccagatcccaataagcttgtactcgaagtccttgtctgagccattaaacacttcgttatctatgacctctgccgtccagaattctacctacacgacaagtgtcattaccagctgctctctgacaagttcctcactcaattctgcctcgcccgtggccatgtcctcttcctatgaccagtcttcagtgcacaatcgcatcccgtatcaaagcccagtctccagctctgagtctgccccaggaactattatgaatggtcatggcggaggtcgcagccaacaaactctggataccccaaagacaaccggccctcccagcgcgttgcctagtgtgtcctctctgccatcaacaacttcctgcacagctctgttaccttcgaccagtcagcataccggcgatcttacaagctctccgctctctcagttgagcagcagcctgagctcccaccagtctagcctgagtgcgcacgccgctctctcgagcagcacctcccatactcatgccagcgttgagagtgccagtagccaccagtccagtgccacattcagcaccgctgcaacttccgtttcatcctcagccagttcgggcgctagtctctctagtagtatgaacactgctaactccctgtgcttgggtgggaccccggcttccgcctcgtcgtcatcttcacgcgcagctccgctggtgacctctggcaaggccccacccaatctcccgcagggcgtgccacccctactgcacaaccagtatctcgttggccctgggggtctgctgcccgcatatcccatttacggctatgatgagctgcagatgttgcagtcccgcctgccagtcgattactacggcataccatttgccgctccaactgctctggccagtcgagacggcagcctcgctaataatccctacccaggtgatgttaccaagtttggaagaggcgatagtgcctcccccgcacccgctactactcctgcacaaccacagcagtcccaatcgcagactcaccatacggctcagcagccattcgtgaaccctgcacttccacctggctatagctataccggactaccctactataccggaatgccaagcgctttccagtatggccctaccatgtttgtcccacccgcttcagctaaacagcacggagtgaacctgagcaccccaaccccacccttccagcaggcctcgggttacggtcagcacggctacagtactggatacgacgacctcactcagggtacggccgcaggagattacagcaagggtggctatgccggaagctcgcaggcacccaacaagtctgcgggtagtggtcccggtaagggggtctccgtgagctcaagtacgacaggcctgccagatatgacaggcagtgtgtacaacaagacacagacttttgacaagcaagggtttcacgcaggcacacccccaccctttagtctgccaagcgtcctggggagcacggggcctctcgctagcggtgcggcacctggctacgcccctccacccttcctgcacattctcccggctcaccagcagccccacagccagcttcttcatcaccatctccctcaggacgcccagtcggggagcggtcagcggagtcagccgtcttcactgcaacctaagagtcaggctagcaagccagcctacggtaattctccgtattggacgaactag

SEQ ID NO: 198684 - DNA, 4284 bp, Artificial Sequence
  derived and/or modified sequence
gtgacgcgaggtcacgtgacgggttgggcagcctgtgccgccgccgccgctttgtaagaggcacattggcagattttctattttgtacatacattattttgtatatactgtatatgatgacttcagtgagcagtgaccattgtcgaggtgctcgggaaaaaccacagatttcagcagcacaatcaacgcaaccacagaaacaagtggtacaggcaacagctgaacagatgcgtctcgctcaagtgatctttgataagaatgattcagattttgaagctaaagttaagcagcttatggaagtgacagggaaaaatcaggatgaatgcatagtggccctacatgattgtaatggagatgtgaacaaagctatcaatatattgctggaagggaattcagacacaacttcatgggagactgtagggtgtaagaaaaagaattttgcaaaagaaaattcagaaaacaaagagaatagagagaagaaaagcgagaaagaatcgagtcgtggacgtggaaacaacaaccggaaaggaagaggcggcaatcgtggcagagaatttagaggtgaagaaaatggaattgattgcaatcaagtggacaaaccttcagatcgtggcaagcgagcccggggtagaggatttggacgtggcagagggagaggggcaggaaggttctcaacccaaggcatggggacatttaatcctgcagactattcagattctacatctacagatgtgtgtgggacaaagctagtagtttgggaagctgctcagaatggtgcagatgagggaactgaactggcatcaaatactcacaacatagctcaggatctgtcaaacaaaagttcttatggactcaaaggggcttggaagaattctgtggaagagtggacaacagaagactggactgaagatctttctgaaacaaaggtcttcactgcctcatctgctccagcagagaatcacatcttacctgggcaaagcattgatctggtagccttgctccagaagcctgttcctcacagtcaagcctcagaagccaactcctttgaaacttcccaacagcagggctttggccaagcccttgtcttcacaaattcgcaacacaacaatcagatggcaccagggactggcagctccactgccgtcaactcctgttctcctcagagcctgtcatccgtccttggctcaggatttggagagcttgcaccaccaaaaatggcaaacatcaccagctcccagattttggaccagttgaaagctccgagtttgggccagtttaccaccaccccaagtacacagcagaatagtacaagtcaccctacaactactacttcttgggacctcaagcccccaacatcccagtcctcagtcctcagtcatcttgacttcaaatctcaacctgagccatccccagttcttagccagttgagccagcgacaacagcaccagagccaggcagtcactgttcctcctcctggtttggagtcctttccttcccaggcaaaacttcgagaatcaacacctggagacagtccctccactgtgaacaagcttttgcagcttcccagcacgaccattgaaaatatctctgtgtctgtccaccagccacagcccaaacacatcaaacttgctaagcggcggatacccccagcttctaagatcccagcttctgcagtggaaatgcctggttcagcagatgtcacaggattaaatgtgcagtttggggctctggaatttgggtcagaaccttctctctctgaatttggatcagctccaagcagtgaaaatagtaatcagattcccatcagcttgtattcgaagtctttaagtgagcctttgaatacatctttatcaatgaccagtgcagtacagaactccacatatacaacttccgtcattacctcctgcagtctgacaagctcatcactgaattctgctagtccagtagcaatgtcttcctcttatgaccagagttctgtgcataacaggatcccataccaaagccctgtgagttcatcagagtcagctccaggaaccatcatgaatggacatggtggtggtcgaagtcagcagacactagacactccaaagacaacaggccctccctctgccctcccgtctgtgagctccctgcccagcaccacctcctgcactgcacttctgccgtccacatcccagcacactggcgacctgactagcagccctctctctcagcttagcagttcgctctccagccaccagagcagcctctctgcacatgcagccctctcctcgagcacgtcacacacacatgccagtgtggagagcgcctcttcccaccagtcctcagccaccttctccacggcagcgacctccgtctcaagttccgcatcctcaggcgccagcctgtccagtagcatgaacaccgcgaacagcctctgtctgggtgggacccccgcgagtgcatccagcagcagtagcagggccgcgcccttggtgacctcaggcaaagcacccccaaacttacctcagggggtgcctcccctgctgcacaaccagtacctcgtaggtcccggaggactgcttcctgcctacccgatctatggctatgacgagctccagatgctgcagtcacggctgccagtggactactatggaattccctttgctgcacccacagcgcttgccagccgagatgggagcctagctaataatccatatccaggtgatgtcacaaagtttggccgtggggactctgcatcccctgcacccgctaccacaccagctcagccacagcagagccaatcacagacccaccacacagcccagcagcccttcgtgaatcctgcactgccacctggctatagctacactggtcttccctactacacaggcatgcccagtgccttccagtatggccccaccatgtttgtccctccagcctcagccaagcaacatggggtgaacctcagcactcccacacctcccttccagcaggccagtggttatggccagcacggctacagtacaggttatgacgacctgacccaggggacagcagcaggagactactccaaaggtggctatgctggatcatcgcaggcaccaaacaagtctgcaggttctgggcctggcaaaggagtatcagtgtcttcaagcaccactggtctacctgatatgactggttctgtctacaataagacacagacttttgacaagcagggatttcatgcagggacgcctccacctttcagcctgccctcggtcttgggctccactgggcccctggcctcgggagcggcccctggctatgcacccccaccattcctacacatcttgccagcccaccagcagccccactcacagctgctgcaccaccaccttccgcaggatgcacagagtggctcgggtcagcgcagccagcccagctccctgcagcccaagtctcaagcctccaaacctgcctacggcaactctccatactggacaaactaaacccagaagagaggggtgggctggggcaaggcttatcctgggcaggagagaacacacgagcacgtatttgggagcccagtgccctttcctagaattcccgacatgtgtcagccatgcctctgtggggagtctgcctcccagactggctactgtatgtaatgtatttatgtatgtatttgtaaatgtgatagaagtctgggggggagttgggggatggcggcagatgttagccaggtctgccctccccattcaagccccttctccactgtagcaaaataagcacccccaccccatctgccttcaggtcttcttcacagcctgcactgcccagtgggccactaggggcagtctctggaagggctggttcaaggctgtttgggtataggggtcaggtaccaatgaagaatcacgacttgtctcactcctttggaaattgttttctttcctgtgtaattacttcatacctctgtttttgagaaactgttccgtttgtcatctgtcatggtctccttccaccaaatcttcatctgggaatagcagcggtatccctccacccaagtatggccacctgtttgtcttcatatagaacaggggcttctggtctggtcatgtccctagagacttactagagactggctgaccatgaaaaaaaaaaaaataatctgagttattcagccagtcagctcccctttaaaaatctaaggtatctccaagcaacacatctccattctagttgtcttgaaccacgtgggcaactgtttcaggggttttctcttgcccaatccccacctaataaagttctgagagcatg

SEQ ID NO: 198685 - DNA, 4289 bp, Artificial Sequence
  derived and/or modified sequence
gctttgtaagaggcacattggcaggtaacgagcggcggcggcggcagcgggtcttgggtcctccgagagcagcagcgattttctattttgtacatacattattttgtatatactgtatatgatgacttcagtgagcagtgaccattgtcgaggtgctcgggaaaaaccacagatttcagcagcacaatcaacgcaaccacagaaacaagtggtacaggcaacagctgaacagatgcgtctcgctcaagtgatctttgataagaatgattcagattttgaagctaaagttaagcagcttatggaagtgacagggaaaaatcaggatgaatgcatagtggccctacatgattgtaatggagatgtgaacaaagctatcaatatattgctggaagggaattcagacacaacttcatgggagactgtagggtgtaagaaaaagaattttgcaaaagaaaattcagaaaacaaagagaatagagagaagaaaagcgagaaagaatcgagtcgtggacgtggaaacaacaaccggaaaggaagaggcggcaatcgtggcagagaatttagaggtgaagaaaatggaattgattgcaatcaagtggacaaaccttcagatcgtggcaagcgagcccggggtagaggatttggacgtggcagagggagaggggcaggaaggttctcaacccaaggcatggggacatttaatcctgcagactattcagattctacatctacagatgtgtgtgggacaaagctagtagtttgggaagctgctcagaatggtgcagatgagggaactgaactggcatcaaatactcacaacatagctcaggatctgtcaaacaaaagttcttatggactcaaaggggcttggaagaattctgtggaagagtggacaacagaagactggactgaagatctttctgaaacaaaggtcttcactgcctcatctgctccagcagagaatcacatcttacctgggcaaagcattgatctggtagccttgctccagaagcctgttcctcacagtcaagcctcagaagccaactcctttgaaacttcccaacagcagggctttggccaagcccttgtcttcacaaattcgcaacacaacaatcagatggcaccagggactggcagctccactgccgtcaactcctgttctcctcagagcctgtcatccgtccttggctcaggatttggagagcttgcaccaccaaaaatggcaaacatcaccagctcccagattttggaccagttgaaagctccgagtttgggccagtttaccaccaccccaagtacacagcagaatagtacaagtcaccctacaactactacttcttgggacctcaagcccccaacatcccagtcctcagtcctcagtcatcttgacttcaaatctcaacctgagccatccccagttcttagccagttgagccagcgacaacagcaccagagccaggcagtcactgttcctcctcctggtttggagtcctttccttcccaggcaaaacttcgagaatcaacacctggagacagtccctccactgtgaacaagcttttgcagcttcccagcacgaccattgaaaatatctctgtgtctgtccaccagccacagcccaaacacatcaaacttgctaagcggcggatacccccagcttctaagatcccagcttctgcagtggaaatgcctggttcagcagatgtcacaggattaaatgtgcagtttggggctctggaatttgggtcagaaccttctctctctgaatttggatcagctccaagcagtgaaaatagtaatcagattcccatcagcttgtattcgaagtctttaagtgagcctttgaatacatctttatcaatgaccagtgcagtacagaactccacatatacaacttccgtcattacctcctgcagtctgacaagctcatcactgaattctgctagtccagtagcaatgtcttcctcttatgaccagagttctgtgcataacaggatcccataccaaagccctgtgagttcatcagagtcagctccaggaaccatcatgaatggacatggtggtggtcgaagtcagcagacactagacactccaaagacaacaggccctccctctgccctcccgtctgtgagctccctgcccagcaccacctcctgcactgcacttctgccgtccacatcccagcacactggcgacctgactagcagccctctctctcagcttagcagttcgctctccagccaccagagcagcctctctgcacatgcagccctctcctcgagcacgtcacacacacatgccagtgtggagagcgcctcttcccaccagtcctcagccaccttctccacggcagcgacctccgtctcaagttccgcatcctcaggcgccagcctgtccagtagcatgaacaccgcgaacagcctctgtctgggtgggacccccgcgagtgcatccagcagcagtagcagggccgcgcccttggtgacctcaggcaaagcacccccaaacttacctcagggggtgcctcccctgctgcacaaccagtacctcgtaggtcccggaggactgcttcctgcctacccgatctatggctatgacgagctccagatgctgcagtcacggctgccagtggactactatggaattccctttgctgcacccacagcgcttgccagccgagatgggagcctagctaataatccatatccaggtgatgtcacaaagtttggccgtggggactctgcatcccctgcacccgctaccacaccagctcagccacagcagagccaatcacagacccaccacacagcccagcagcccttcgtgaatcctgcactgccacctggctatagctacactggtcttccctactacacaggcatgcccagtgccttccagtatggccccaccatgtttgtccctccagcctcagccaagcaacatggggtgaacctcagcactcccacacctcccttccagcaggccagtggttatggccagcacggctacagtacaggttatgacgacctgacccaggggacagcagcaggagactactccaaaggtggctatgctggatcatcgcaggcaccaaacaagtctgcaggttctgggcctggcaaaggagtatcagtgtcttcaagcaccactggtctacctgatatgactggttctgtctacaataagacacagacttttgacaagcagggatttcatgcagggacgcctccacctttcagcctgccctcggtcttgggctccactgggcccctggcctcgggagcggcccctggctatgcacccccaccattcctacacatcttgccagcccaccagcagccccactcacagctgctgcaccaccaccttccgcaggatgcacagagtggctcgggtcagcgcagccagcccagctccctgcagcccaagtctcaagcctccaaacctgcctacggcaactctccatactggacaaactaaacccagaagagaggggtgggctggggcaaggcttatcctgggcaggagagaacacacgagcacgtatttgggagcccagtgccctttcctagaattcccgacatgtgtcagccatgcctctgtggggagtctgcctcccagactggctactgtatgtaatgtatttatgtatgtatttgtaaatgtgatagaagtctgggggggagttgggggatggcggcagatgttagccaggtctgccctccccattcaagccccttctccactgtagcaaaataagcacccccaccccatctgccttcaggtcttcttcacagcctgcactgcccagtgggccactaggggcagtctctggaagggctggttcaaggctgtttgggtataggggtcaggtaccaatgaagaatcacgacttgtctcactcctttggaaattgttttctttcctgtgtaattacttcatacctctgtttttgagaaactgttccgtttgtcatctgtcatggtctccttccaccaaatcttcatctgggaatagcagcggtatccctccacccaagtatggccacctgtttgtcttcatatagaacaggggcttctggtctggtcatgtccctagagacttactagagactggctgaccatgaaaaaaaaaaaaataatctgagttattcagccagtcagctcccctttaaaaatctaaggtatctccaagcaacacatctccattctagttgtcttgaaccacgtgggcaactgtttcaggggttttctcttgcccaatccccacctaataaagttctgagagcatg

SEQ ID NO: 198686 - DNA, 4218 bp, Artificial Sequence
  derived and/or modified sequence
gtgacgcgaggtcacgtgacgggttgggcagcctgtgccgccgccgccgctttgtaagaggcacattggcagattttctattttgtacatacattattttgtatatactgtatatgatgacttcagtgagcagtgaccattgtcgaggtgctcgggaaaaaccacagatttcagcagcacaatcaacgcaaccacagaaacaagtggtacaggcaacagctgaacagatgcgtctcgctcaagtgatctttgataagaatgattcagattttgaagctaaagttaagcagcttatggaagtgacagggaaaaatcaggatgaatgcatagtggccctacatgattgtaatggagatgtgaacaaagctatcaatatattgctggaagggaattcagacacaacttcatgggagactgtagggtgtaagaaaaagaattttgcaaaagaaaattcagaaaacaaagagaatagagagaagaaaagcgagaaagaatcgagtcgtggacgtggaaacaacaaccggaaaggaagaggcggcaatcgtggcagagaatttagaggtgaagaaaatggaattgattgcaatcaagtggacaaaccttcagatcgtggcaagcgagcccggggtagaggatttggacgtggcagagggagaggggcaggaaggttctcaacccaaggcatggggacatttaatcctgcagactattcagattctacatctacagatgtgtgtgggacaaagctagtagtttgggaagctgctcagaatggtgcagatgagggaactggggcttggaagaattctgtggaagagtggacaacagaagactggactgaagatctttctgaaacaaaggtcttcactgcctcatctgctccagcagagaatcacatcttacctgggcaaagcattgatctggtagccttgctccagaagcctgttcctcacagtcaagcctcagaagccaactcctttgaaacttcccaacagcagggctttggccaagcccttgtcttcacaaattcgcaacacaacaatcagatggcaccagggactggcagctccactgccgtcaactcctgttctcctcagagcctgtcatccgtccttggctcaggatttggagagcttgcaccaccaaaaatggcaaacatcaccagctcccagattttggaccagttgaaagctccgagtttgggccagtttaccaccaccccaagtacacagcagaatagtacaagtcaccctacaactactacttcttgggacctcaagcccccaacatcccagtcctcagtcctcagtcatcttgacttcaaatctcaacctgagccatccccagttcttagccagttgagccagcgacaacagcaccagagccaggcagtcactgttcctcctcctggtttggagtcctttccttcccaggcaaaacttcgagaatcaacacctggagacagtccctccactgtgaacaagcttttgcagcttcccagcacgaccattgaaaatatctctgtgtctgtccaccagccacagcccaaacacatcaaacttgctaagcggcggatacccccagcttctaagatcccagcttctgcagtggaaatgcctggttcagcagatgtcacaggattaaatgtgcagtttggggctctggaatttgggtcagaaccttctctctctgaatttggatcagctccaagcagtgaaaatagtaatcagattcccatcagcttgtattcgaagtctttaagtgagcctttgaatacatctttatcaatgaccagtgcagtacagaactccacatatacaacttccgtcattacctcctgcagtctgacaagctcatcactgaattctgctagtccagtagcaatgtcttcctcttatgaccagagttctgtgcataacaggatcccataccaaagccctgtgagttcatcagagtcagctccaggaaccatcatgaatggacatggtggtggtcgaagtcagcagacactagacactccaaagacaacaggccctccctctgccctcccgtctgtgagctccctgcccagcaccacctcctgcactgcacttctgccgtccacatcccagcacactggcgacctgactagcagccctctctctcagcttagcagttcgctctccagccaccagagcagcctctctgcacatgcagccctctcctcgagcacgtcacacacacatgccagtgtggagagcgcctcttcccaccagtcctcagccaccttctccacggcagcgacctccgtctcaagttccgcatcctcaggcgccagcctgtccagtagcatgaacaccgcgaacagcctctgtctgggtgggacccccgcgagtgcatccagcagcagtagcagggccgcgcccttggtgacctcaggcaaagcacccccaaacttacctcagggggtgcctcccctgctgcacaaccagtacctcgtaggtcccggaggactgcttcctgcctacccgatctatggctatgacgagctccagatgctgcagtcacggctgccagtggactactatggaattccctttgctgcacccacagcgcttgccagccgagatgggagcctagctaataatccatatccaggtgatgtcacaaagtttggccgtggggactctgcatcccctgcacccgctaccacaccagctcagccacagcagagccaatcacagacccaccacacagcccagcagcccttcgtgaatcctgcactgccacctggctatagctacactggtcttccctactacacaggcatgcccagtgccttccagtatggccccaccatgtttgtccctccagcctcagccaagcaacatggggtgaacctcagcactcccacacctcccttccagcaggccagtggttatggccagcacggctacagtacaggttatgacgacctgacccaggggacagcagcaggagactactccaaaggtggctatgctggatcatcgcaggcaccaaacaagtctgcaggttctgggcctggcaaaggagtatcagtgtcttcaagcaccactggtctacctgatatgactggttctgtctacaataagacacagacttttgacaagcagggatttcatgcagggacgcctccacctttcagcctgccctcggtcttgggctccactgggcccctggcctcgggagcggcccctggctatgcacccccaccattcctacacatcttgccagcccaccagcagccccactcacagctgctgcaccaccaccttccgcaggatgcacagagtggctcgggtcagcgcagccagcccagctccctgcagcccaagtctcaagcctccaaacctgcctacggcaactctccatactggacaaactaaacccagaagagaggggtgggctggggcaaggcttatcctgggcaggagagaacacacgagcacgtatttgggagcccagtgccctttcctagaattcccgacatgtgtcagccatgcctctgtggggagtctgcctcccagactggctactgtatgtaatgtatttatgtatgtatttgtaaatgtgatagaagtctgggggggagttgggggatggcggcagatgttagccaggtctgccctccccattcaagccccttctccactgtagcaaaataagcacccccaccccatctgccttcaggtcttcttcacagcctgcactgcccagtgggccactaggggcagtctctggaagggctggttcaaggctgtttgggtataggggtcaggtaccaatgaagaatcacgacttgtctcactcctttggaaattgttttctttcctgtgtaattacttcatacctctgtttttgagaaactgttccgtttgtcatctgtcatggtctccttccaccaaatcttcatctgggaatagcagcggtatccctccacccaagtatggccacctgtttgtcttcatatagaacaggggcttctggtctggtcatgtccctagagacttactagagactggctgaccatgaaaaaaaaaaaaataatctgagttattcagccagtcagctcccctttaaaaatctaaggtatctccaagcaacacatctccattctagttgtcttgaaccacgtgggcaactgtttcaggggttttctcttgcccaatccccacctaataaagttctgagagcatg

SEQ ID NO: 198687 - DNA, 1349 bp, Artificial Sequence
  derived and/or modified sequence
gtgacgcgaggtcacgtgacgggttgggcagcctgtgccgccgccgccgctttgtaagaggcacattggcagattttctattttgtacatacattattttgtatatactgtatatgatgacttcagtgagcagtgaccattgtcgaggtgctcgggaaaaaccacagatttcagcagcacaatcaacgcaaccacagaaacaagtggtacaggcaacagctgaacagatgcgtctcgctcaagtgatctttgataagaatgattcagattttgaagctaaagttaagcagcttatggaagtgacagggaaaaatcaggatgaatgcatagtggccctacatgattgtaatggagatgtgaacaaagctatcaatatattgctggaagggaattcagacacaacttcatgggagactgtagggtgtaagaaaaagaattttgcaaaagaaaattcagaaaacaaagagaatagagagaagaaaagcgagaaagaatcgagtcgtggacgtggaaacaacaaccggaaaggaagaggcggcaatcgtggcagagaatttagaggtgaagaaaatggaattgattgcaatcaagtggacaaaccttcagatcgtggcaagcgagcccggggtagagaactggcatcaaatactcacaacatagctcaggatctgtcaaacaaaagttcttatggactcaaaggggcttggaagaattctgtggaagagtggacaacagaagactggactgaagatctttctgaaacaaaggtcttcactgcctcatctgctccagcagagaatcacatcttacctgggcaaagcattgatctggtagccttgctccagaagcctgttcctcacagtcaagcctcagaagccaactcctttgaaacttcccaacagcagggctttggccaagcccttgtcttcacaaattcgcaacacaacaatcagatggcaccagggactggcagctccactgccgtcaactcctgttctcctcagagcctgtcatccgtccttggctcaggatttggagagcttgcaccaccaaaaatggcaaacatcaccagctcccagattttggaccagttgaaagctccgagtttgggccagtttaccaccaccccaagtacacagcagaatagtacaagtcaccctacaactactacttcttgggacctcaagcccccaacatcccagtcctcagtcctcagtcatcttgacttcaaatctcaacctgagccatccccagttcttagccagttgagccagcgacaacagcaccagagccaggcagtcactgttcctcctcctggtttggagtcctttccttcccaggcaaaactt

SEQ ID NO: 198688 - DNA, 2183 bp, Artificial Sequence
  derived and/or modified sequence
gggttgggcagcctgtgccgccgccgccgctttgtaagaggcacattggcagattttctattttgtacatacattattttgtatatactgtatatgatgacttcagtgagcagtgaccattgtcgaggtgctcgggaaaaaccacagatttcagcagcacaatcaacgcaaccacagaaacaagtggtacaggcaacagctgaacagatgcgtctcgctcaagtgatctttgataagaatgattcagattttgaagctaaagttaagcagcttatggaagtgacagggaaaaatcaggatgaatgcatagtggccctacatgattgtaatggagatgtgaacaaagctatcaatatattgctggaagggaattcagacacaacttcatgggagactgtagggtgtaagaaaaagaattttgcaaaagaaaattcagaaaacaaagagaatagagagaagaaaagcgagaaagaatcgagtcgtggacgtggaaacaacaaccggaaaggaagaggcggcaatcgtggcagagaatttagaggtgaagaaaatggaattgattgcaatcaagtggacaaaccttcagatcgtggcaagcgagcccggggtagagaactggcatcaaatactcacaacatagctcaggatctgtcaaacaaaagttcttatggactcaaaggggcttggaagaattctgtggaagagtggacaacagaagactggactgaagatctttctgaaacaaaggtcttcactgcctcatctgctccagcagagaatcacatcttacctgggcaaagcattgatctggtagccttgctccagaagcctgttcctcacagtcaagcctcagaagccaactcctttgaaacttcccaacagcagggctttggccaagcccttgtcttcacaaattcgcaacacaacaatcagatggcaccagggactggcagctccactgccgtcaactcctgttctcctcagagcctgtcatccgtccttggctcaggatttggagagcttgcaccaccaaaaatggcaaacatcaccagctcccagattttggaccagttgaaagctccgagtttgggccagtttaccaccaccccaagtacacagcagaatagtacaagtcaccctacaactactacttcttgggacctcaagcccccaacatcccagtcctcagtcctcagtcatcttgacttcaaatctcaacctgagccatccccagttcttagccagttgagccagcgacaacagcaccagagccaggcagtcactgttcctcctcctggtttggagtcctttccttcccaggcaaaacttcgagaatcaacacctggagacagtccctccactgtgaacaagcttttgcagcttcccagcacgaccattgaaaatatctctgtgtctgtccaccagccacagcccaaacacatcaaacttgctaagcggcggatacccccagcttctaagatcccagcttctgcagtggaaatgcctggttcagcagatgtcacaggattaaatgtgcagtttggggctctggaatttgggtcagaaccttctctctctgaatttggatcagctccaagcagtgaaaatagtaatcagattcccatcagcttgtattcgaagtctttaagtgagcctttgaatacatctttatcaatgaccagtgcagtacagaactccacatatacaacttccgtcattacctcctgcagtctgacaagctcatcactgaattctgctagtccagtagcaatgtcttcctcttatgaccagagttctgtgcataacaggatcccataccaaagccctgtgagttcatcagagtcagctccaggaaccatcatgaatggacatggtggtggtcgaagtcagcagacactagacactccaaagacaacaggccctccctctgccctcccgtctgtgagctccctgcccagcaccacctcctgcactgcacttctgccgtccacatcccagcacactggcgacctgactagcagccctctctctcagcttagcagcatgccagtgtggagagcgcctcttcccaccagtcctcagccaccttctccacggcagcgacctccgtctcaagttccgcatcctcaggcgccagcctgtccagtagcatgaacaccgcgaacagcctctgtctgggtggg

SEQ ID NO: 198689 - DNA, 828 bp, Artificial Sequence
  derived and/or modified sequence
gagaaagaatcgagtcgtggacgtggaaacaacaaccggaaaggaagaggcggcaatcgtggcagagaatttagaggtgaagaaaatggaattgattgcaatcaagtggacaaaccttcagatcgtggcaagcgagcccggggtagaggatttggacgtggcagagggagaggggcaggaaggttctcaacccaaggcatggggacatttaatcctgcagactattcagattctacatctacagatgtgtgtgggacaaagctagtagtttgggaagctgctcagaatggtgcagatgagggaactggggcttggaagaattctgtggaagagtggacaacagaagactggactgaagatctttctgaaacaaaggtcttcactgcctcatctgctccagcagagaatcacatcttacctgggcaaagcattgatctggtagccttgctccagaagcctgttcctcacagtcaagcctcagaagccaactcctttgaaacttcccaacagcagggctttggccaagcccttgtcttcacaaattcgcaacacaacaatcagatggcaccagggactggcagctccactgccgtcaactcctgttctcctcagagcctgtcatccgtccttggctcaggatttggagagcttgcaccaccaaaaatggcaaacatcaccagctcccagattttggaccagttgaaagctccgagtttgggccagtttaccaccaccccaagtacacagcagaatagtacaagtcaccctacaactactacttcttgggacctcaagcccccaacatcccagtcctcagtcctcagtcat

SEQ ID NO: 198690 - DNA, 3658 bp, Artificial Sequence
  derived and/or modified sequence
attggcaggtaacgagcggcggcggcggcagcgggtcttgggtcctccgagagcagcagcgattttctattttgtacatacattattttgtatatactgtatatgatgacttcagtgagcagtgaccattgtcgaggtgctcgggaaaaaccacagatttcagcagcacaatcaacgcaaccacagaaacaagtggtacagctgtaccgacctcttgacacttcctagagctcagcctggcaacagctgaacagatgcgtctcgctcaagtgatctttgataagaatgattcagattttgaagctaaagttaagcagcttatggaagtgacagggaaaaatcaggatgaatgcatagtggccctacatgattgtaatggagatgtgaacaaagctatcaatatattgctggaagggaattcagacacaacttcatgggagactgtagggtgtaagaaaaagaattttgcaaaagaaaattcagaaaacaaagagaatagagagaagaaaagcgagaaagaatcgagtcgtggacgtggaaacaacaaccggaaaggaagaggcggcaatcgtggcagagaatttagaggtgaagaaaatggaattgattgcaatcaagtggacaaaccttcagatcgtggcaagcgagcccggggtagagaactggcatcaaatactcacaacatagctcaggatctgtcaaacaaaagttcttatggactcaaaggggcttggaagaattctgtggaagagtggacaacagaagactggactgaagatctttctgaaacaaaggtcttcactgcctcatctgctccagcagagaatcacatcttacctgggcaaagcattgatctggtagccttgctccagaagcctgttcctcacagtcaagcctcagaagccaactcctttgaaacttcccaacagcagggctttggccaagcccttgtcttcacaaattcgcaacacaacaatcagatggcaccagggactggcagctccactgccgtcaactcctgttctcctcagagcctgtcatccgtccttggctcaggatttggagagcttgcaccaccaaaaatggcaaacatcaccagctcccagattttggaccagttgaaagctccgagtttgggccagtttaccaccaccccaagtacacagcagaatagtacaagtcaccctacaactactacttcttgggacctcaagcccccaacatcccagtcctcagtcctcagtcatcttgacttcaaatctcaacctgagccatccccagttcttagccagttgagccagcgacaacagcaccagagccaggcagtcactgttcctcctcctggtttggagtcctttccttcccaggcaaaacttcgagaatcaacacctggagacagtccctccactgtgaacaagcttttgcagcttcccagcacgaccattgaaaatatctctgtgtctgtccaccagccacagcccaaacacatcaaacttgctaagcggcggatacccccagcttctaagatcccagcttctgcagtggaaatgcctggttcagcagatgtcacaggattaaatgtgcagtttggggctctggaatttgggtcagaaccttctctctctgaatttggatcagctccaagcagtgaaaatagtaatcagattcccatcagcttgtattcgaagtctttaagtgagcctttgaatacatctttatcaatgaccagtgcagtacagaactccacatatacaacttccgtcattacctcctgcagtctgacaagctcatcactgaattctgctagtccagtagcaatgtcttcctcttatgaccagagttctgtgcataacaggatcccataccaaagccctgtgagttcatcagagtcagctccaggaaccatcatgaatggacatggtggtggtcgaagtcagcagacactagacactccaaagacaacaggccctccctctgccctcccgtctgtgagctccctgcccagcaccacctcctgcactgcacttctgccgtccacatcccagcacactggcgacctgactagcagccctctctctcagcttagcagttcgctctccagccaccagagcagcctctctgcacatgcagccctctcctcgagcacgtcacacacacatgccagtgtggagagcgcctcttcccaccagtcctcagccaccttctccacggcagcgacctccgtctcaagttccgcatcctcaggcgccagcctgtccagtagcatgaacaccgcgaacagcctctgtctgggtgggacccccgcgagtgcatccagcagcagtagcagggccgcgcccttggtgacctcaggcaaagcacccccaaacttacctcagggggtgcctcccctgctgcacaaccagtacctcgtaggtcccggaggactgcttcctgcctacccgatctatggctatgacgagctccagatgctgcagtcacggctgccagtggactactatggaattccctttgctgcacccacagcgcttgccagccgagatgggagcctagctaataatccatatccaggtgatgtcacaaagtttggccgtggggactctgcatcccctgcacccgctaccacaccagctcagccacagcagagccaatcacagacccaccacacagcccagcagcccttcgtgaatcctgcactgccacctggctatagctacactggtcttccctactacacaggcatgcccagtgccttccagtatggccccaccatgtttgtccctccagcctcagccaagcaacatggggtgaacctcagcactcccacacctcccttccagcaggccagtggttatggccagcacggctacagtacaggttatgacgacctgacccaggggacagcagcaggagactactccaaaggtggctatgctggatcatcgcaggcaccaaacaagtctgcaggttctgggcctggcaaaggagtatcagtgtcttcaagcaccactggtctacctgatatgactggttctgtctacaataagacacagacttttgacaagcagggatttcatgcagggacgcctccacctttcagcctgccctcggtcttgggctccactgggcccctggcctcgggagcggcccctggctatgcacccccaccattcctacacatcttgccagcccaccagcagccccactcacagctgctgcaccaccaccttccgcaggatgcacagagtggctcgggtcagcgcagccagcccagctccctgcagcccaagtctcaagcctccaaacctgcctacggcaactctccatactggacaaactaaacccagaagagaggggtgggctggggcaaggcttatcctgggcaggagagaacacacgagcacgtatttgggagcccagtgccctttcctagaattcccgacatgtgtcagccatgcctctgtggggagtctgcctcccagactgaccatgaaaaaaaaaaaaataatctgagttattcagccagtcagctcccctttaaaaatctaaggtatctccaagcaacacatctccattctagttgtcttgaaccacgtgggcaactgtttcaggggttttctcttgcccaatccccacctaataaagttctgagagcatg

SEQ ID NO: 198691 - DNA, 3779 bp, Artificial Sequence
  derived and/or modified sequence
attggcaggtaacgagcggcggcggcggcagcgggtcttgggtcctccgagagcagcagcgattttctattttgtacatacattattttgtatatactgtatatgatgacttcagtgagcagtgaccattgtcgaggtgctcgggaaaaaccacagatttcagcagcacaatcaacgcaaccacagaaacaagtggtacaggcaacagctgaacagatgcgtctcgctcaagtgatctttgataagaatgattcagattttgaagctaaagttaagcagcttatggaagtgacagggaaaaatcaggatgaatgcatagtggccctacatgattgtaatggagatgtgaacaaagctatcaatatattgctggaagggaattcagacacaacttcatgggagactgtagggtgtaagaaaaagaattttgcaaaagaaaattcagaaaacaaagagaatagagagaagaaaagcgagaaagaatcgagtcgtggacgtggaaacaacaaccggaaaggaagaggcggcaatcgtggcagagaatttagaggtgaagaaaatggaattgattgcaatcaagtggacaaaccttcagatcgtggcaagcgagcccggggtagaggatttggacgtggcagagggagaggggcaggaaggttctcaacccaaggcatggggacatttaatcctgcagactattcagattctacatctacagatgtgtgtgggacaaagctagtagtttgggaagctgctcagaatggtgcagatgagggaactgaactggcatcaaatactcacaacatagctcaggatctgtcaaacaaaagttcttatggactcaaaggggcttggaagaattctgtggaagagtggacaacagaagactggactgaagatctttctgaaacaaaggtcttcactgcctcatctgctccagcagagaatcacatcttacctgggcaaagcattgatctggtagccttgctccagaagcctgttcctcacagtcaagcctcagaagccaactcctttgaaacttcccaacagcagggctttggccaagcccttgtcttcacaaattcgcaacacaacaatcagatggcaccagggactggcagctccactgccgtcaactcctgttctcctcagagcctgtcatccgtccttggctcaggatttggagagcttgcaccaccaaaaatggcaaacatcaccagctcccagattttggaccagttgaaagctccgagtttgggccagtttaccaccaccccaagtacacagcagaatagtacaagtcaccctacaactactacttcttgggacctcaagcccccaacatcccagtcctcagtcctcagtcatcttgacttcaaatctcaacctgagccatccccagttcttagccagttgagccagcgacaacagcaccagagccaggcagtcactgttcctcctcctggtttggagtcctttccttcccaggcaaaacttcgagaatcaacacctggagacagtccctccactgtgaacaagcttttgcagcttcccagcacgaccattgaaaatatctctgtgtctgtccaccagccacagcccaaacacatcaaacttgctaagcggcggatacccccagcttctaagatcccagcttctgcagtggaaatgcctggttcagcagatgtcacaggattaaatgtgcagtttggggctctggaatttgggtcagaaccttctctctctgaatttggatcagctccaagcagtgaaaatagtaatcagattcccatcagcttgtattcgaagtctttaagtgagcctttgaatacatctttatcaatgaccagtgcagtacagaactccacatatacaacttccgtcattacctcctgcagtctgacaagctcatcactgaattctgctagtccagtagcaatgtcttcctcttatgaccagagttctgtgcataacaggatcccataccaaagccctgtgagttcatcagagtcagctccaggaaccatcatgaatggacatggtggtggtcgaagtcagcagacactagacactccaaagacaacaggccctccctctgccctcccgtctgtgagctccctgcccagcaccacctcctgcactgcacttctgccgtccacatcccagcacactggcgacctgactagcagccctctctctcagcttagcagttcgctctccagccaccagagcagcctctctgcacatgcagccctctcctcgagcacgtcacacacacatgccagtgtggagagcgcctcttcccaccagtcctcagccaccttctccacggcagcgacctccgtctcaagttccgcatcctcaggcgccagcctgtccagtagcatgaacaccgcgaacagcctctgtctgggtgggacccccgcgagtgcatccagcagcagtagcagggccgcgcccttggtgacctcaggcaaagcacccccaaacttacctcagggggtgcctcccctgctgcacaaccagtacctcgtaggtcccggaggactgcttcctgcctacccgatctatggctatgacgagctccagatgctgcagtcacggctgccagtggactactatggaattccctttgctgcacccacagcgcttgccagccgagatgggagcctagctaataatccatatccaggtgatgtcacaaagtttggccgtggggactctgcatcccctgcacccgctaccacaccagctcagccacagcagagccaatcacagacccaccacacagcccagcagcccttcgtgaatcctgcactgccacctggctatagctacactggtcttccctactacacaggcatgcccagtgccttccagtatggccccaccatgtttgtccctccagcctcagccaagcaacatggggtgaacctcagcactcccacacctcccttccagcaggccagtggttatggccagcacggctacagtacaggttatgacgacctgacccaggggacagcagcaggagactactccaaaggtggctatgctggatcatcgcaggcaccaaacaagtctgcaggttctgggcctggcaaaggagtatcagtgtcttcaagcaccactggtctacctgatatgactggttctgtctacaataagacacagacttttgacaagcagggatttcatgcagggacgcctccacctttcagcctgccctcggtcttgggctccactgggcccctggcctcgggagcggcccctggctatgcacccccaccattcctacacatcttgccagcccaccagcagccccactcacagctgctgcaccaccaccttccgcaggatgcacagagtggctcgggtcagcgcagccagcccagctccctgcagcccaagtctcaagcctccaaacctgcctacggcaactctccatactggacaaactaaacccagaagagaggggtgggctggggcaaggcttatcctgggcaggagagaacacacgagcacgtatttgggagcccagtgccctttcctagaattcccgacatgtgtcagccatgcctctgtggggagtctgcctcccagactgaccatgaaaaaaaaaaaaataatctgagttattcagccagtcagctcccctttaaaaatctaaggtatctccaagcaacacatctccattctagttgtcttgaaccacgtgggcaactgtttcaggggttttctcttgcccaatccccacctaataaagttctgagagcatg

SEQ ID NO: 198692 - DNA, 3107 bp, Artificial Sequence
  derived and/or modified sequence
acattggcaggtaacgagcggcggcggcggcagcgggtcttgggtcctccgagagcagcagcgattttctattttgtacatacattattttgtatatactgtatatgatgacttcagtgagcagtgaccattgtcgaggtgctcgggaaaaaccacagatttcagcagcacaatcaacgcaaccacagaaacaagtggtacagctgtaccgacctcttgacacttcctagagctcagcctggcaacagctgaacagatgcgtctcgctcaagtgatctttgataagaatgattcagattttgaagctaaagttaagcagctttctgaaacaaaggtcttcactgcctcatctgctccagcagagaatcacatcttacctgggcaaagcattgatctggtagccttgctccagaagcctgttcctcacagtcaagcctcagaagccaactcctttgaaacttcccaacagcagggctttggccaagcccttgtcttcacaaattcgcaacacaacaatcagatggcaccagggactggcagctccactgccgtcaactcctgttctcctcagagcctgtcatccgtccttggctcaggatttggagagcttgcaccaccaaaaatggcaaacatcaccagctcccagattttggaccagttgaaagctccgagtttgggccagtttaccaccaccccaagtacacagcagaatagtacaagtcaccctacaactactacttcttgggacctcaagcccccaacatcccagtcctcagtcctcagtcatcttgacttcaaatctcaacctgagccatccccagttcttagccagttgagccagcgacaacagcaccagagccaggcagtcactgttcctcctcctggtttggagtcctttccttcccaggcaaaacttcgagaatcaacacctggagacagtccctccactgtgaacaagcttttgcagcttcccagcacgaccattgaaaatatctctgtgtctgtccaccagccacagcccaaacacatcaaacttgctaagcggcggatacccccagcttctaagatcccagcttctgcagtggaaatgcctggttcagcagatgtcacaggattaaatgtgcagtttggggctctggaatttgggtcagaaccttctctctctgaatttggatcagctccaagcagtgaaaatagtaatcagattcccatcagcttgtattcgaagtctttaagtgagcctttgaatacatctttatcaatgaccagtgcagtacagaactccacatatacaacttccgtcattacctcctgcagtctgacaagctcatcactgaattctgctagtccagtagcaatgtcttcctcttatgaccagagttctgtgcataacaggatcccataccaaagccctgtgagttcatcagagtcagctccaggaaccatcatgaatggacatggtggtggtcgaagtcagcagacactagacactccaaagacaacaggccctccctctgccctcccgtctgtgagctccctgcccagcaccacctcctgcactgcacttctgccgtccacatcccagcacactggcgacctgactagcagccctctctctcagcttagcagttcgctctccagccaccagagcagcctctctgcacatgcagccctctcctcgagcacgtcacacacacatgccagtgtggagagcgcctcttcccaccagtcctcagccaccttctccacggcagcgacctccgtctcaagttccgcatcctcaggcgccagcctgtccagtagcatgaacaccgcgaacagcctctgtctgggtgggacccccgcgagtgcatccagcagcagtagcagggccgcgcccttggtgacctcaggcaaagcacccccaaacttacctcagggggtgcctcccctgctgcacaaccagtacctcgtaggtcccggaggactgcttcctgcctacccgatctatggctatgacgagctccagatgctgcagtcacggctgccagtggactactatggaattccctttgctgcacccacagcgcttgccagccgagatgggagcctagctaataatccatatccaggtgatgtcacaaagtttggccgtggggactctgcatcccctgcacccgctaccacaccagctcagccacagcagagccaatcacagacccaccacacagcccagcagcccttcgtgaatcctgcactgccacctggctatagctacactggtcttccctactacacaggcatgcccagtgccttccagtatggccccaccatgtttgtccctccagcctcagccaagcaacatggggtgaacctcagcactcccacacctcccttccagcaggccagtggttatggccagcacggctacagtacaggttatgacgacctgacccaggggacagcagcaggagactactccaaaggtggctatgctggatcatcgcaggcaccaaacaagtctgcaggttctgggcctggcaaaggagtatcagtgtcttcaagcaccactggtctacctgatatgactggttctgtctacaataagacacagacttttgacaagcagggatttcatgcagggacgcctccacctttcagcctgccctcggtcttgggctccactgggcccctggcctcgggagcggcccctggctatgcacccccaccattcctacacatcttgccagcccaccagcagccccactcacagctgctgcaccaccaccttccgcaggatgcacagagtggctcgggtcagcgcagccagcccagctccctgcagcccaagtctcaagcctccaaacctgcctacggcaactctccatactggacaaactaaacccagaagagaggggtgggctggggcaaggcttatcctgggcaggagagaacacacgagcacgtatttgggagcccagtgccctttcctagaattcccgacatgtgtcagccatgcctctgtggggagtctgcctcccagactggctactgtatgtaatgtatttatgtatgtatttgtaaatgtgatagaagtctgggggggagttgggggatggcggcagatg

SEQ ID NO: 198693 - protein, 1338 aa, Artificial Sequence
  derived and/or modified sequence
MFLMPTSSELNSGQNFLTQWMTNPSRAGVILNRGFPILEADKEKRAAVDISTSFPIKGTHFSDSFSFINEEDSLLEEQKLESNNPYKPQSDKSETHTAFPCIKKGPQVAACHSAPGHQEENKNDFIPDLASEFKEGAYKDPLFKKLEQLKEVQQKKQEQLKRQQLEQLQRLMEEQEKLLTMVSGQCTLPGLSLLPDDQSQKHRSPGNTTTGERATCCFPSYVYPDPTQEETYPSNILSHEQSNFCRTAHGDFVLTSKRASPNLFSEAQYQEAPVEKNNLKEENRNHPTGESILCWEKVTEQIQEANDKNLQKHDDSSEVANIEERPIKAAIGERKQTFEDYLEEQIQLEEQELKQKQLKEAEGPLPIKAKPKQPFLKRGEGLARFTNAKSKFQKGKESKLVTNQSTSEDQPLFKMDRQQLQRKTALKNKELCADNPILKKDSKARTKSGSVTLSQKPKMLKCSNRKSLSPSGLKIQTGKKCDGQFRDQIKFENKVTSNNKENVTECPKPCDTGCTGWNKTQGKDRLPLSTGPASRLAAKSPIRETMKESESSLDVSLQKKLETWEREKEKENLELDEFLFLEQAADEISFSSNSSFVLKILERDQQICKGHRMSSTPVKAVPQKTNPADPISHCNRSEDLDHTAREKESECEVAPKQLHSLSSADELREQPCKIRKAVQKSTSENQTEWNARDDEGVPNSDSSTDSEEQLDVTIKPSTEDRERGISSREDSPQVCDDKGPFKDTRTQEDKRRDVDLDLSDKDYSSDESIMESIKHKVSEPSRSSSLSLSKMDFDDERTWTDLEENLCNHDVVLGNESTYGTPQTCYPNNEIGILDKTIKRKIAPVKRGEDLSKSRRSRSPPTSELMMKFFPSLKPKPKSDSHLGNELKLNISQDQPPGDNARSQVLREKIIELETEIEKFKAENASLAKLRIERESALEKLRKEIADFEQQKAKELARIEEFKKEEMRKLQKERKVFEKYTTAARTFPDKKEREEIQTLKQQIADLREDLKRKETKWSSTHSRLRSQIQMLVRENTDLREEIKVMERFRLDAWKRAEAIESSLEVEKKDKLANTSVRFQNSQISSGTQVEKYKKNYLPMQGNPPRRSKSAPPRDLGNLDKGQAASPREPLEPLNFPDPEYKEEEEDQDIQGEISHPDGKVEKVYKNGCRVILFPNGTRKEVSADGKTITVTFFNGDVKQVMPDQRVIYYYAAAQTTHTTYPEGLEVLHFSSGQIEKHYPDGRKEITFPDQTVKNLFPDGQEESIFPDGTIVRVQRDGNKLIEFNNGQRELHTAQFKRREYPDGTVKTVYANGHQETKYRSGRIRVKDKEGNVLMDTEL

SEQ ID NO: 198694 - DNA, 4017 bp, Artificial Sequence
  derived and/or modified sequence
atgtttcttatgcctacaagctctgagctgaacagcggccagaacttcttgacgcagtggatgacaaatccctcacgcgccggggttatactgaatcgcgggttccccattttggaggctgacaaagagaagagggctgcagtcgacatctctacatcattccctattaagggaacgcacttttccgattccttcagctttatcaacgaggaagatagtctcctggaggagcagaaattggaatcaaataacccttataagccccagtccgataagagtgagacgcatacagcatttccatgtatcaagaaaggaccacaagtcgcagcttgccatagcgcccctggccaccaggaagagaacaagaacgatttcatcccagatctggctagcgaatttaaagaaggagcttataaagatccactctttaagaaactggaacaactcaaggaagtacagcagaaaaagcaggaacagctgaaaagacagcaactggagcaacttcagcgtcttatggaagagcaagaaaagttgttaaccatggtctcgggacagtgcaccctccctggcctcagcctgctgcccgacgaccaatctcaaaagcatcgtagtcctggcaacactacgactggagagagggctacctgctgctttccgagctatgtttatcccgacccaactcaggaggagacttacccgtcaaacatcctctctcatgagcagtccaatttctgccgtaccgcccacggcgactttgtgctgacgtccaaacgcgcctcaccaaatctgttctccgaagcccagtaccaggaagccccagtcgaaaagaacaaccttaaggaagagaatcggaatcaccctaccggggaaagtatactgtgttgggagaaggtcaccgaacagatacaggaagctaatgataaaaatctccaaaagcatgatgactcctccgaggtggctaacattgaagagcgcccaattaaggcagccatcggtgagcggaaacagacctttgaggattacctggaggaacagatccagcttgaggagcaagagttgaaacaaaagcagctcaaagaggccgagggaccactgccgattaaggccaagccaaaacagccatttttaaagagaggagagggcctggctcggttcaccaacgcgaaaagtaaattccaaaagggaaaggagtcaaagctcgtcaccaaccaaagcacatcagaagatcagcctcttttcaagatggaccgtcagcagctccagaggaagaccgccttgaagaacaaggaactgtgcgctgacaatcctatcctgaaaaaagacagcaaagcacgcactaaatctggctcagtgaccctatcccagaagcccaaaatgctgaaatgcagcaatcgcaaaagcctgagcccgagtggcctcaaaattcaaacaggcaaaaaatgcgatggccagttcagggatcagataaagtttgaaaacaaggtgaccagtaataacaaggaaaatgtaaccgaatgtcccaagccgtgcgacacagggtgtaccggctggaataagactcaaggaaaggaccggttacctctttctacgggtccagcaagccgccttgctgccaagagtcccattcgcgagactatgaaggagagtgagtcctccctcgatgtgagcctgcagaaaaaactggagacttgggagagagagaaggaaaaggagaatctggaactggatgagtttctttttttggaacaagccgccgatgaaatttcattttcttctaactcatccttcgtgctgaaaattcttgaaagagatcagcagatctgtaagggacaccgcatgtcaagcactcccgtgaaggctgtccctcagaaaaccaacccagcagatccaatcagccactgtaatcgatccgaggacctggatcataccgccagagagaaagagagcgagtgtgaagtcgctccaaagcagctgcattcactgagctccgccgatgagctgcgtgagcaaccttgcaaaattcgtaaagccgtccagaagtctacatcagaaaaccagacagagtggaacgctcgcgacgacgagggcgttcccaattccgacagttctactgattccgaggaacagcttgacgtgactatcaagcctagcactgaggacagggaacgtgggataagctcgcgggaggactctccacaggtgtgtgacgacaaaggaccttttaaggacacccgcacccaggaggataaaaggcgggatgtggacttggatctgagtgacaaagactacagctctgacgaaagcattatggagagcattaaacataaagttagcgagccaagcagatcttcttcattatccctgtcgaagatggatttcgacgacgagcgcacttggacagatctcgaggaaaatctgtgcaaccacgacgtggtgctcggaaacgagagtacatatggcacaccccagacgtgttaccccaataacgaaataggcattctggataagactatcaaacgcaagatagcccccgtgaaaagaggggaggatctgtcaaaatctcggcggtctagaagtccacccaccagtgagctcatgatgaaattctttccttccctgaagccaaagccaaaatccgatagccacctggggaacgagttgaagttgaacatctcgcaggatcaaccccccggggataatgctaggagccaggttttacgcgagaagattattgagcttgagacagaaatcgagaaatttaaggctgagaacgcatccctggctaagctgaggatcgagcgggaatctgccctcgaaaaactcagaaaggaaatcgcagatttcgaacagcagaaggcaaaggaactggccaggattgaagaattcaagaaagaggaaatgaggaaactgcagaaagagagaaaagttttcgaaaaatacactacagctgctagaacgtttccagataagaaggaacgggaagaaatacagacgctcaaacagcaaattgctgatttgcgcgaggacctcaaacgcaaagagactaagtggtcctcgactcatagccgactcaggtcccagatacagatgttagtcagggagaacactgatttaagggaggagataaaggtaatggagcgattcagattggatgcatggaaacgagccgaggcgattgaaagcagcctagaagtggagaagaaagacaaactcgccaatacctccgtccgctttcaaaactcgcaaataagtagcggaacccaggtggaaaagtacaagaagaattacctgcccatgcaaggcaatccgcctaggagaagcaaatccgctccacctcgagacttgggtaacctcgataagggccaagccgcctcaccacgcgaacctcttgagccacttaattttccagatcccgaatacaaagaggaagaagaggatcaggacattcagggcgagatatcacatcccgacggaaaggtggaaaaagtgtataagaatggctgtagagtgattctgtttcccaacggcacgcgcaaagaggtgagtgcagatggcaaaacgattaccgtgaccttttttaacggggacgtgaagcaggtgatgcccgatcaacgggtaatatattattacgcggcagctcagacaacgcataccacttatcctgagggcctggaagtcctgcatttctcttcgggccagatcgagaaacactaccctgacggaagaaaggagattacatttcctgaccagacagtgaagaatctgtttccagacggacaagaagagtccatttttccagatggaactatcgtgagagtccagagggatggaaacaagctgatcgaattcaataacggtcagagggaattgcataccgcgcagttcaagaggcgagagtaccccgatggcactgttaagactgtttacgctaacggccaccaggagaccaaatacaggagcggacggataagagtaaaagacaaggaaggcaatgtgttgatggacacagagctgtag

SEQ ID NO: 198695 - DNA, 4017 bp, Artificial Sequence
  derived and/or modified sequence
atgttcctgatgcccaccagcagcgagctgaacagcggccagaacttcctgacccagtggatgaccaaccccagcagagctggggtcatcctgaacagaggcttccccatcctggaggccgacaaggagaagagagctgctgtggacatcagcaccagcttccccatcaagggcacccacttcagtgacagcttctccttcatcaatgaggaggacagcctgctggaggagcagaagctggagagcaacaacccctacaagccccagagcgacaagtctgagacccacacagccttcccctgcatcaagaagggcccccaggtggccgcctgccacagcgcccctggccaccaggaggagaacaagaatgacttcatcccagacctggccagcgagttcaaggagggcgcctacaaggaccccctcttcaagaagctggagcagctgaaggaggtgcagcagaagaagcaggagcagctgaagaggcagcagctggagcagctgcagaggctgatggaggagcaggagaagctgctgaccatggtgtctggccagtgcaccctgcccggcctgagcctgctgcctgatgaccagagccagaagcacaggagccctggcaacaccaccaccggggagcgggccacctgctgcttccccagctatgtgtacccagaccccacccaggaggagacctaccccagcaacatcctgagccatgagcagagcaacttctgcaggacagcccatggagactttgtgctgaccagcaagagggccagccccaacctcttcagcgaggcccagtaccaggaggcccctgtggagaagaacaacctgaaggaggagaacagaaaccaccccaccggggagagcatcctgtgctgggagaaggtgacagagcagatccaggaggccaatgacaagaacctgcagaagcatgatgacagcagcgaggtggccaacatcgaggagcggcccatcaaggccgccatcggggagaggaagcagacctttgaggactacctggaggagcagatccagctggaggagcaggagctgaagcagaagcagctgaaggaggccgagggccccctgcccatcaaggccaagcccaagcagcccttcctgaagagaggagagggcctggcccgcttcaccaatgccaagagcaagttccagaagggcaaggagagcaagctggtgaccaaccagagcaccagcgaggaccagcccctcttcaagatggaccggcagcagctgcagaggaagacagccctgaagaacaaggagctgtgtgccgacaaccccatcctgaagaaggacagcaaggcccggaccaagagcggctctgtgaccctgagccagaagcccaagatgctgaagtgcagcaacaggaagagcctgagccccagcggcctgaagatccagacaggcaagaagtgtgatggccagttccgggaccagatcaagtttgagaacaaggtgaccagcaacaacaaggaaaatgtgacagaatgtcccaagccctgtgacaccggctgcaccggctggaacaagacccagggcaaggaccggctgcccctgagcacaggccctgccagccggctggccgccaagagccccatccgggagaccatgaaggagagcgagagcagcctggatgtgtccctgcagaagaagctggagacctgggagcgggagaaggagaaggagaacctggagctggatgagttcctgttcctggagcaggccgcagatgagatctccttcagcagcaacagcagctttgtgctgaagatcctggagcgggaccagcagatctgcaagggccacaggatgagcagcacccctgtgaaggctgtgccccagaagaccaacccagctgaccccatcagccactgcaacagaagtgaggacctggaccacacagcccgggagaaggagagtgaatgtgaggtggcccccaagcagctgcacagcctgagcagcgcagatgagctgcgggagcagccctgcaagatcaggaaggctgtgcagaagagcaccagcgagaaccagacagagtggaatgccagagatgatgagggcgtgcccaacagcgacagcagcacagacagcgaggagcagctggatgtgaccatcaagcccagcacagaagatcgggagcggggcatcagcagccgggaggacagcccccaggtgtgtgatgacaagggccccttcaaggacaccaggacccaggaggacaagagaagagatgtggacctggacctgagtgacaaggactacagcagtgatgagagcatcatggagagcatcaagcacaaggtgtctgagcccagccgcagcagcagcctgagcctgagcaagatggactttgatgatgagaggacctggacagacctggaggagaacctgtgcaaccatgatgtggtgctgggcaatgaaagcacctacggcaccccccagacctgctaccccaacaatgaaattggcatcctggacaagaccatcaagaggaagatcgcccctgtgaagagaggagaggacctgagcaagagcagaagaagccgcagcccccccaccagcgagctgatgatgaagttcttccccagcctgaagcccaagcccaagagtgacagccacctgggcaatgagctgaagctgaacatcagccaggaccagcccccaggggacaatgcccggagccaggtgctgcgggagaagatcatcgagctggagacagaaattgagaagttcaaggcagaaaatgccagcctggccaagctgcgcatcgagcgggagagcgccctggagaagctgaggaaggagattgctgactttgagcagcagaaggccaaggagctggccagaattgaggagttcaagaaggaggagatgaggaagctgcagaaggagaggaaggtgtttgagaagtacaccacagctgcccggaccttcccagacaagaaggagcgggaggagatccagaccctgaagcagcagattgctgacctgcgggaggacctgaagaggaaggagaccaagtggagcagcacccacagccggctgcggagccagatccagatgctggtgcgggagaacacagacctgcgggaggagatcaaggtgatggagcgcttccggctggatgcctggaagagagctgaggccatcgagagcagcctggaggtggagaagaaggacaagctggccaacacctctgtgcgcttccagaacagccagatcagcagcggcacccaggtggagaagtacaagaagaactacctgcccatgcagggcaaccccccaagaagaagcaagagcgccccaccccgggacctgggcaacctggacaagggccaggccgccagcccccgggagcccctggagcccctgaacttcccagaccctgagtacaaggaggaggaggaggaccaggacatccagggcgagatcagccacccagatggcaaggtggagaaggtgtacaagaatggctgcagggtcatcctcttccccaacggcaccaggaaggaggtgtctgcagatggcaagaccatcaccgtgaccttcttcaatggagatgtgaagcaggtgatgccagaccagagggtcatctactactatgctgctgcccagaccacccacaccacctacccagagggcctggaggtgctgcacttcagcagcggccagatcgagaagcactacccagatggcaggaaggagatcaccttcccagaccagacagtgaagaacctcttcccagatggccaggaggagagcatcttcccagatggcaccatcgtgcgggtgcagagagatggcaacaagctgattgagttcaacaacggccagcgggagctgcacacagcccagttcaagagaagagagtacccagatggcaccgtgaagacagtgtatgccaacggccaccaggagaccaagtaccgcagcggccgcatccgggtgaaggacaaggagggcaatgtgctgatggacacagagctgtag

SEQ ID NO: 198696 - DNA, 4017 bp, Artificial Sequence
  derived and/or modified sequence
atgttcctgatgcccaccagcagcgagctgaacagcggccagaacttcctgacccagtggatgacaaaccctagccgagccggcgttatcttaaacaggggctttccaatcctggaggctgataaagagaaaagagcggcagttgatatatcaacctcctttccaattaagggtacccattttagtgatagtttttctttcatcaatgaggaagactcgctcctagaagaacagaagctagaatccaataacccctataagcctcagtccgataagtccgaaacgcacaccgccttcccctgcataaaaaagggtccacaggtagccgcttgccatagcgctcccggccaccaggaagaaaacaaaaacgacttcatcccggatctcgcctctgaatttaaggagggtgcttacaaggatcccttgttcaaaaaactcgagcagcttaaggaagtgcagcagaagaagcaggagcagctaaaacgccagcagttggaacagctccagaggcttatggaagaacaggagaaactgttaaccatggtgagcggccagtgcacccttcctggtttgtccctgctgcctgacgaccagagccaaaagcaccgatccccgggaaacactactacaggtgaacgtgccacctgttgtttcccatcatacgtgtaccctgatccaactcaggaagagacatacccttccaacatcctgtcacatgaacaatctaatttttgtcgcacagctcatggggacttcgtgctaacttctaagagagcgtcaccaaacctgttttcggaggcccagtaccaggaagccccagtggagaagaacaaccttaaggaggagaatcggaatcatcctacaggcgagagtatcctgtgttgggagaaagtcactgaacaaatccaggaagccaacgacaagaatctgcagaaacatgacgactcatcagaggtggccaatatagaggaacgtcctatcaaggccgctatcggtgagcgaaaacagacattcgaggattacctcgaggaacagatccaactcgaggaacaggagctgaagcagaaacagctgaaagaggctgaggggccccttccaatcaaggcaaagcctaagcaaccatttctgaagcggggggagggattggctaggttcactaatgctaagtccaaatttcaaaagggcaaggagagcaaactagtgactaatcagagcacttctgaagatcagcctttgttcaagatggaccgtcagcagcttcaacgtaaaacggctctaaaaaataaagaactgtgtgctgataatcctattctgaagaaggatagtaaggcgcgaacgaaatccggaagtgtgactctctctcaaaaaccgaaaatgcttaagtgctcaaatcggaaatctttatctccttcagggctcaagatccaaaccggcaaaaagtgcgatggacagttccgggaccagatcaaattcgagaacaaggtcacttccaataacaaggagaacgtgaccgaatgccccaaaccttgcgacaccggctgtacaggctggaataagactcagggaaaagataggctgcctctgagcacgggacctgcatctcgccttgccgctaagtcaccaattagagagactatgaaggaatctgaaagctcactggatgtctctctccagaagaagctcgaaacatgggagagagaaaaggagaaagaaaacctggagctcgacgagtttctgttcctggagcaagctgccgatgagatcagctttagttctaacagttcattcgttttgaagattctggagagggatcagcagatctgcaaaggccatcggatgtcctctacccccgtcaaggccgtgccgcagaaaactaatccagccgaccctataagccactgtaacagaagcgaggatttagaccacacggcgagagaaaaagagtccgaatgtgaggtggctcccaaacagttacattctctcagcagcgctgatgagctacgggagcaaccttgtaaaattaggaaggctgttcagaagtccacttccgaaaaccagacagaatggaatgctcgcgatgatgagggagtgccaaactccgactccagtacggattccgaggaacagcttgacgttaccataaagcctagcactgaagacagggaacggggcatatcatctagagaggattctccacaggtgtgcgacgataaaggcccttttaaggataccagaacccaggaagataagcgcagggacgttgaccttgatttgagtgataaggattactctagtgacgagtctattatggagagcatcaaacacaaggtctccgagcccagtaggagtagctcgctctccctcagcaagatggactttgacgatgagcgaacttggaccgacctggaggaaaacctgtgcaatcacgacgtggtcctggggaacgaatcgacttacggcactccccagacttgttaccccaataatgagattgggattctagataagacaatcaaaaggaagattgcgcctgtcaagagaggcgaggacctgtccaagagtcgccgctccagatccccacccacctcagaactgatgatgaagttttttccatctttgaaacctaaaccgaaaagtgacagtcatctggggaatgagcttaaactgaacatatcccaggaccagccccccggggacaacgctagatcccaggtgcttcgcgagaagatcatagaactcgaaacagagattgagaaatttaaggcagaaaacgcgtccctggccaaactgcgaattgagcgtgagagcgcccttgagaagctgagaaaggagatcgcagactttgagcagcaaaaggcaaaagagctggcgcggatcgaagaattcaagaaagaggagatgagaaaactacagaaagagaggaaggttttcgaaaagtacactacagctgctcggacattccctgataaaaaagagcgggaagagatccaaactctcaagcagcagatcgccgacttaagagaagacctgaaacgaaaagagacaaaatggtcctcgactcatagtcgactcaggagtcagatccagatgttagtgagagagaacacagaccttcgcgaagagattaaggtgatggagaggtttcgacttgatgcctggaaaagggctgaggccatcgaatcctctttggaagttgaaaaaaaggataaactcgccaacacttctgttaggtttcagaatagccagatctcaagcggtacccaagtggagaagtacaaaaagaattatctgccaatgcagggcaatcctcctagaagatcaaagagtgctccacccagagacctcgggaatctggacaaggggcaggctgcaagtccgcgggagcccctcgagccactcaacttcccagatcccgaatacaaagaggaggaggaggaccaggatatccagggtgaaatcagccacccagatggaaaggtggaaaaagtctataagaacgggtgcagagtgatcctgtttccgaatggaacccgaaaggaggtgtctgctgatggcaagaccatcactgtgacctttttcaatggggacgtgaagcaagtgatgcctgaccagcgcgtcatctattactacgctgcggcacagacaacgcatactacatatccagaagggctggaggtactgcatttctccagcgggcagattgagaagcattaccctgatggccgcaaggagattaccttcccggaccaaactgttaaaaacctcttccccgatggccaggaagagtcaatcttccccgatgggactatagtgagagttcagagggatggtaacaagttgattgaattcaacaacggccagcgcgaactccacaccgcccagttcaaacgtcgcgagtatccagacggcactgtgaaaaccgtgtatgccaatggccaccaggaaactaagtatcgctcagggcgaatccgcgtcaaggataaggaaggtaatgtactgatggatactgagctctag

SEQ ID NO: 198697 - DNA, 4017 bp, Artificial Sequence
  derived and/or modified sequence
atgtttttgatgcccacttctagtgagctgaactccgggcagaactttcttacccaatggatgaccaatccatcaagagccggagtgattcttaataggggattcccaatacttgaagctgacaaggagaaacgtgccgcagttgatatctcgacatcctttcctattaagggcacccatttttcagattcctttagcttcatcaatgaggaggattctttactcgaggagcagaaactggaaagcaacaacccctacaagcctcagtctgataagagtgaaactcacacagctttcccttgcattaaaaagggtccacaagtggctgcctgtcattccgcacctggacaccaggaggagaacaaaaacgactttattccagatttggcctcagagtttaaggaaggagcttacaaggacccattatttaaaaagcttgaacaactgaaggaggttcagcagaaaaaacaggaacaattaaagcggcagcaactggagcagctgcagaggctaatggaagagcaggagaaactcctcaccatggtcagtggccagtgtacgctgcccggtcttagcctgttgccagacgatcaaagccagaagcataggtcacccggtaatacaaccaccggagagcgggcaacatgttgtttcccatcttacgtgtaccctgatccaacccaggaagagacctaccccagcaacatcctctctcacgaacagagcaatttttgtcgcaccgcacatggcgactttgtgctgactagtaaacgggcttcccctaacctgttttcagaagcccaataccaggaggccccagtggaaaagaacaatctgaaggaagaaaaccggaatcaccccaccggagagtctattctctgttgggagaaagtgaccgaacagatccaggaggctaacgacaagaaccttcagaaacacgacgattcctcagaggtggccaatatcgaagaacggcctattaaagccgctatcggagaacggaagcagaccttcgaggattacctggaagaacaaatccagctggaggaacaggagctgaagcaaaagcagttgaaggaggccgaggggccactgccgatcaaagccaagcccaagcagcccttcctgaaaaggggggaaggcctcgcaagattcactaacgctaaaagtaagttccagaagggtaaggaaagtaagctggttaccaaccaatccacgtcagaggaccagcccctttttaagatggatcgacagcaactgcagcgcaagactgcccttaaaaacaaggagctttgcgcagacaacccaattttaaaaaaagatagcaaagccagaaccaaatccggctctgttacactgtcacagaagccaaagatgctgaagtgctcgaatcgtaagtccttatctcctagcggccttaagatacagactggaaagaagtgcgacggccagtttcgtgaccaaataaagttcgaaaacaaggtcacttccaacaataaagagaacgtcaccgagtgccccaagccgtgcgatactggctgtacggggtggaataaaactcaggggaaagaccgcctgccattgagcactggccctgcttcccggctagccgcaaaaagtccaatccgcgagaccatgaaggaaagtgagtctagtttggatgtgtctctccagaagaagcttgagacgtgggagcgggaaaaagagaaggaaaatctggaactggacgagtttctgttcctcgaacaggcagcggacgagatcagtttttcctctaattcttccttcgttctgaagatattggaacgtgatcagcagatttgtaaaggccacagaatgagctcgacccccgtcaaagcagtccctcagaaaacaaaccctgcggaccccatttcccattgtaatcgcagcgaagatctcgaccatactgcacgtgaaaaggagagcgagtgcgaagtcgcgcctaaacagctgcactctctgtcttctgctgatgaattgcgagagcagccctgcaagatccgaaaggcagtgcagaagagtactagtgaaaaccagactgaatggaatgctagagacgatgaaggagttcccaattctgattcctcaaccgacagcgaggagcagctggacgttacaattaagccttcaaccgaagaccgagaacgaggaatctcatcccgcgaggatagcccacaagtgtgtgatgataaaggaccctttaaagacaccagaacacaggaagataaaaggagagacgtcgacctggacttgtcagataaagattattcctctgacgagtcaatcatggaaagtataaaacacaaagtgagtgagcccagcaggtctagctctctttccctctcgaaaatggacttcgacgatgagcgaacatggactgacctcgaagagaacctatgtaaccacgatgtggtcctgggaaacgagagcacctacggcaccccacaaacgtgttatccaaacaatgagatcggcatattagataagaccatcaaacgcaaaatcgctcctgtaaaacggggagaggacctgtcaaagagtagaaggagccggtcgcctcccactagtgagttgatgatgaaattctttcccagtctgaagccaaagcctaagagtgattcacatctggggaacgagctgaaacttaatatctcacaggatcagcccccaggtgataacgccaggtcacaagtactgagggagaagattatagaactggagacggaaatcgaaaagttcaaggccgaaaatgcatctttagcgaaactgcgcatcgagcgggagagcgcactcgagaaactcagaaaggagattgcggattttgagcagcaaaaggcgaaggagctggctaggatcgaggagtttaaaaaggaagaaatgcgcaaacttcagaaagagcgcaaggtgttcgaaaagtacacgaccgcagccaggacttttcccgataagaaggaacgggaggagatccagactttaaagcagcagatcgcagatctcagggaagatttaaagcgcaaagaaactaagtggtccagcacccattccagactgcgctcccagatccagatgttggtgcgcgagaatactgacctccgagaagaaattaaggttatggagagatttaggcttgacgcatggaaaagagcagaggccatagagagcagcctggaagtggagaagaaagacaagctcgcaaacacctcggtcagattccagaatagccagatatccagcgggactcaggtcgagaagtacaagaaaaactaccttcccatgcaaggaaatcccccaagaaggtccaagagcgcccctcctcgggatctgggaaacctggataagggccaggcagcctcccctcgggagcccctggagccactcaatttcccagaccctgaatacaaggaggaggaagaagaccaagatatacagggagaaatcagccaccccgatggcaaagtggagaaagtttacaagaacggttgccgagtcatactcttccccaacggaactcgcaaggaagtcagtgcagacgggaagacaataacggtaacctttttcaatggcgatgtcaaacaggtcatgccggatcagcgcgtgatttattactatgccgctgcccagaccacgcacaccacttaccctgagggcttggaagtcttgcatttttccagcggtcaaatcgagaaacactatccagacggacgcaaagaaattacttttccagatcaaacagttaagaatctgttccccgatggccaggaggaaagtatttttccggacggcaccatagtgcgggtccagagagacgggaataagctgattgagtttaataatggacaacgtgaactacacacagcccagtttaagcgaagggaatatccagacggaacagtgaagaccgtttacgcaaatggacaccaagagacgaagtaccgctctggacgaataagagttaaggacaaggaaggcaacgttttaatggacactgagttgtag

SEQ ID NO: 198698 - DNA, 4347 bp, Artificial Sequence
  derived and/or modified sequence
aggacctcgggacgggggcggggctccgacagaggcggcgattgtggcggcccatttgtaaatgctgcggagattgaggtgtcggttcgtgctgctgagctgcccaggcttcacggagcggtgttggaaatcaatagctcttctagcctttgcattgtttaaatataatagtgtcattggactaagatgttcctgatgccaacctcttcagagttaaacagtgggcagaacttcctaacccagtggatgaccaatccttctcgggctggggtcatattaaatcgtggatttcctattttggaagcagacaaagagaagcgagcagctgtggacatttctaccagctttcctattaaaggcacacatttttctgatagcttcagctttataaatgaagaagattcacttcttgaagaacagaagttggagtcaaacaacccttacaaaccacagtcagataaatctgaaacccatacagcctttccttgcattaaaaagggaccacaggtagcggcatgtcacagtgctcctggacaccaggaagaaaacaaaaatgacttcatcccagatcttgcgagtgaattcaaagaaggggcttataaagacccactttttaaaaaacttgaacagctgaaagaagtacaacagaagaagcaggaacaattgaagaggcaacagttggagcaactacagagactcatggaagaacaagagaagctgctcaccatggtgtctgggcagtgcacacttccaggtttgagtttactgcctgatgatcagagccagaagcacaggtctccaggaaataccaccactggagagagagccacatgctgcttcccatcatatgtctacccggacccaacccaggaagaaacatacccgtccaacattttatcccatgagcaaagcaacttctgtagaactgctcatggagattttgtcttaacttcaaaacgtgcgtctcctaatttattttctgaggcacagtatcaagaagcacctgtggaaaaaaataatttaaaagaagaaaaccgtaaccatcctacaggagaaagtatcttatgttgggagaaagtgacagaacagattcaggaagcaaatgataagaacttacaaaaacatgatgattcctcagaagtggctaatattgaagaaaggcccattaaagctgctattggagaaaggaaacagacctttgaagattacttagaagaacaaattcagttggaagagcaagaactgaagcaaaaacagctgaaggaagcagaaggaccattgccaatcaaagcaaaaccaaaacaaccatttttaaaacgaggagaaggtttagctagatttactaatgccaaatctaagtttcaaaaaggcaaagaaagtaaactagtgactaaccagagcacttccgaggaccagccgctgtttaaaatggatagacagcaactccagcggaaaaccgctcttaaaaataaagagctgtgtgcagacaaccctatccttaaaaaggacagtaaagctagaaccaagagtggttctgtcaccctcagtcagaagccgaaaatgctgaagtgtagtaacaggaaaagtctttctccgtcaggattgaaaatacagacggggaagaaatgtgatgggcagtttagagaccagatcaaatttgaaaacaaagtcacatctaataataaagaaaatgtaactgagtgtccaaaaccttgcgatactggctgcacagggtggaataagacacaaggtaaagacagacttcctctttcaacagggccggccagccggctggctgctaagagccccataagggagaccatgaaagagtctgaatcttctcttgacgtttctcttcagaaaaagttagagacttgggaacgagaaaaggaaaaggaaaatttggaattagatgaatttttgtttttagaacaagctgctgatgaaatatcattttctagtaattcctcatttgtactgaaaatcttagaaagggatcaacagatctgcaaaggtcaccggatgtcttccacccctgtcaaagctgtgccacagaagacaaatccggcagatcccattagtcattgtaaccgcagtgaggatttggaccacactgcacgtgagaaggagagtgagtgtgaagtcgcacccaaacaacttcattcattgtcctcagctgatgaattgagggaacagccttgtaaaatcaggaaagccgtccaaaagagcacttctgaaaatcagactgaatggaatgcacgtgacgatgaaggtgttccaaatagtgacagtagcactgactctgaggaacagcttgatgttaccataaaaccatcgactgaggatagagagaggggcatcagcagcagagaggatagcccacaagtctgtgatgataaggggccttttaaggacaccaggacccaagaagataaaaggagagatgttgatctggatttgtctgataaagattacagtagcgatgagtctatcatggaaagcataaaacataaagtgtctgagccctcgagatcctcatccctaagtctgagtaaaatggactttgatgatgaaagaacttggactgaccttgaagagaatttgtgtaaccatgatgttgttcttgggaatgaatccacttatgggacgccgcagacatgctaccctaataatgaaataggtatcctggacaaaacaataaaaaggaagattgcaccagtcaagaggggagaagacttgagcaagtccaggaggagcagaagtcctcctacatcggagctgatgatgaaattctttccttctttgaaaccaaaaccaaagtcagattcacacttgggaaatgaactcaagttaaacataagtcaagaccaaccacctggtgacaatgctcgatcccaggttttgagagagaaaattattgaattggaaacagaaatagaaaagtttaaagctgagaacgcatctttagctaaacttcgcattgaacgagaaagtgccttggaaaaactcaggaaagaaattgcagacttcgaacaacagaaagcaaaagaattagctcgaatagaagagtttaaaaaggaggagatgaggaagctacaaaaggaacgtaaagtttttgaaaagtatactacagctgcaagaacttttccagataaaaaggaacgtgaagaaatacagactttaaaacagcaaatagcagatttacgggaagatttgaaaagaaaggaaaccaaatggtcaagtacacacagccgtctcagaagccagatacaaatgttagtcagagagaacacagacctccgggaagaaataaaagtgatggaaagattccgactggatgcctggaagagagcagaagccatagagagcagcctcgaggtggagaagaaggacaagcttgcgaacacatctgttcgatttcaaaacagtcagatttcttcaggaacccaggtagaaaaatacaagaaaaattatcttccaatgcaaggcaatccacctcgaagatccaagtctgcacctcctcgtgatttaggcaatttggataagggacaagctgcctctcccagggagccacttgaaccactgaacttcccagatcctgaatataaagaggaggaggaagaccaagacatacagggagaaatcagtcatcctgatggaaaggtggaaaaggtttataagaatgggtgccgtgttatactgtttcccaatggaactcgaaaggaagtgagtgcagatgggaagaccatcactgtcactttctttaatggtgacgtgaagcaggtcatgccagaccaaagagtgatctactactatgcagctgcccagaccactcacacgacatacccggagggactggaagtcttacatttctcaagtggacaaatagaaaaacattacccagatggaagaaaagaaatcacgtttcctgaccagactgttaaaaacttatttcctgatggacaagaagaaagcattttcccagatggtacaattgtcagagtacaacgtgatggcaacaaactcatagagtttaataatggccaaagagaactacatactgcccagttcaagagacgggaatacccagatggcactgttaaaaccgtatatgcaaacggtcatcaagaaacgaagtacagatccggtcggataagagttaaggacaaggagggtaatgtgctaatggacacggagctgtgacgatcctcatgtgatcatgaagtaacagtaactgactttttatgttaaaaaatgtacatttactgtggattctgtttaatttattgtgtatgtgtggggaaaagattagattctaaaataaaagtttaccctgtggcatcttca

SEQ ID NO: 198699 - DNA, 4017 bp, Artificial Sequence
  derived and/or modified sequence
atgttcctgatgcccaccagcagcgagctgaacagcggccagaacttcctgacccagtggatgaccaaccccagcagagccggcgtgatcctgaacagaggcttccccatcctggaggccgacaaggagaagagagccgccgtggacatcagcaccagcttccccatcaagggcacccacttcagcgacagcttcagcttcatcaacgaggaggacagcctgctggaggagcagaagctggagagcaacaacccctacaagccccagagcgacaagagcgagacccacaccgccttcccctgcatcaagaagggcccccaggtggccgcctgccacagcgcccccggccaccaggaggagaacaagaacgacttcatccccgacctggccagcgagttcaaggagggcgcctacaaggaccccctgttcaagaagctggagcagctgaaggaggtgcagcagaagaagcaggagcagctgaagagacagcagctggagcagctgcagagactgatggaggagcaggagaagctgctgaccatggtgagcggccagtgcaccctgcccggcctgagcctgctgcccgacgaccagagccagaagcacagaagccccggcaacaccaccaccggcgagagagccacctgctgcttccccagctacgtgtaccccgaccccacccaggaggagacctaccccagcaacatcctgagccacgagcagagcaacttctgcagaaccgcccacggcgacttcgtgctgaccagcaagagagccagccccaacctgttcagcgaggcccagtaccaggaggcccccgtggagaagaacaacctgaaggaggagaacagaaaccaccccaccggcgagagcatcctgtgctgggagaaggtgaccgagcagatccaggaggccaacgacaagaacctgcagaagcacgacgacagcagcgaggtggccaacatcgaggagagacccatcaaggccgccatcggcgagagaaagcagaccttcgaggactacctggaggagcagatccagctggaggagcaggagctgaagcagaagcagctgaaggaggccgagggccccctgcccatcaaggccaagcccaagcagcccttcctgaagagaggcgagggcctggccagattcaccaacgccaagagcaagttccagaagggcaaggagagcaagctggtgaccaaccagagcaccagcgaggaccagcccctgttcaagatggacagacagcagctgcagagaaagaccgccctgaagaacaaggagctgtgcgccgacaaccccatcctgaagaaggacagcaaggccagaaccaagagcggcagcgtgaccctgagccagaagcccaagatgctgaagtgcagcaacagaaagagcctgagccccagcggcctgaagatccagaccggcaagaagtgcgacggccagttcagagaccagatcaagttcgagaacaaggtgaccagcaacaacaaggagaacgtgaccgagtgccccaagccctgcgacaccggctgcaccggctggaacaagacccagggcaaggacagactgcccctgagcaccggccccgccagcagactggccgccaagagccccatcagagagaccatgaaggagagcgagagcagcctggacgtgagcctgcagaagaagctggagacctgggagagagagaaggagaaggagaacctggagctggacgagttcctgttcctggagcaggccgccgacgagatcagcttcagcagcaacagcagcttcgtgctgaagatcctggagagagaccagcagatctgcaagggccacagaatgagcagcacccccgtgaaggccgtgccccagaagaccaaccccgccgaccccatcagccactgcaacagaagcgaggacctggaccacaccgccagagagaaggagagcgagtgcgaggtggcccccaagcagctgcacagcctgagcagcgccgacgagctgagagagcagccctgcaagatcagaaaggccgtgcagaagagcaccagcgagaaccagaccgagtggaacgccagagacgacgagggcgtgcccaacagcgacagcagcaccgacagcgaggagcagctggacgtgaccatcaagcccagcaccgaggacagagagagaggcatcagcagcagagaggacagcccccaggtgtgcgacgacaagggccccttcaaggacaccagaacccaggaggacaagagaagagacgtggacctggacctgagcgacaaggactacagcagcgacgagagcatcatggagagcatcaagcacaaggtgagcgagcccagcagaagcagcagcctgagcctgagcaagatggacttcgacgacgagagaacctggaccgacctggaggagaacctgtgcaaccacgacgtggtgctgggcaacgagagcacctacggcaccccccagacctgctaccccaacaacgagatcggcatcctggacaagaccatcaagagaaagatcgcccccgtgaagagaggcgaggacctgagcaagagcagaagaagcagaagcccccccaccagcgagctgatgatgaagttcttccccagcctgaagcccaagcccaagagcgacagccacctgggcaacgagctgaagctgaacatcagccaggaccagccccccggcgacaacgccagaagccaggtgctgagagagaagatcatcgagctggagaccgagatcgagaagttcaaggccgagaacgccagcctggccaagctgagaatcgagagagagagcgccctggagaagctgagaaaggagatcgccgacttcgagcagcagaaggccaaggagctggccagaatcgaggagttcaagaaggaggagatgagaaagctgcagaaggagagaaaggtgttcgagaagtacaccaccgccgccagaaccttccccgacaagaaggagagagaggagatccagaccctgaagcagcagatcgccgacctgagagaggacctgaagagaaaggagaccaagtggagcagcacccacagcagactgagaagccagatccagatgctggtgagagagaacaccgacctgagagaggagatcaaggtgatggagagattcagactggacgcctggaagagagccgaggccatcgagagcagcctggaggtggagaagaaggacaagctggccaacaccagcgtgagattccagaacagccagatcagcagcggcacccaggtggagaagtacaagaagaactacctgcccatgcagggcaacccccccagaagaagcaagagcgccccccccagagacctgggcaacctggacaagggccaggccgccagccccagagagcccctggagcccctgaacttccccgaccccgagtacaaggaggaggaggaggaccaggacatccagggcgagatcagccaccccgacggcaaggtggagaaggtgtacaagaacggctgcagagtgatcctgttccccaacggcaccagaaaggaggtgagcgccgacggcaagaccatcaccgtgaccttcttcaacggcgacgtgaagcaggtgatgcccgaccagagagtgatctactactacgccgccgcccagaccacccacaccacctaccccgagggcctggaggtgctgcacttcagcagcggccagatcgagaagcactaccccgacggcagaaaggagatcaccttccccgaccagaccgtgaagaacctgttccccgacggccaggaggagagcatcttccccgacggcaccatcgtgagagtgcagagagacggcaacaagctgatcgagttcaacaacggccagagagagctgcacaccgcccagttcaagagaagagagtaccccgacggcaccgtgaagaccgtgtacgccaacggccaccaggagaccaagtacagaagcggcagaatcagagtgaaggacaaggagggcaacgtgctgatggacaccgagctgtag

SEQ ID NO: 198700 - protein, 440 aa, Artificial Sequence
  derived and/or modified sequence
MIIPSLEELDSLKYSDLQNLAKSLGLRANLRATKLLKALKGYIKHEARKGNENQDESQTSASSCDETEIQISNQEEAERQPLGHVTKTRRRCKTVRVDPDSQQNHSEIKISNPTEFQNHEKQESQDLRATAKVPSPPDEHQEAENAVSSGNRDSKVPSEGKKSLYTDESSKPGKNKRTAITTPNFKKLHEAHFKEMESIDQYIERKKKHFEEHNSMNELKQPINKGGVRTPVPPRGRLSVASTPISQRRSQGRSCGPASQSTLGLKGSLKRSAISAAKTGVRFSAATKDNEHKRSLTKTPARKSAHVTVSGGTPKGEAVLGTHKLKTITGNSAAVITPFKLTTEATQTPVSNKKPVFDLKASLSRPLNYEPHKGKLKPWGQSKENNYLNQHVNRINFYKKTYKQPHLQTKEEQRKKREQERKEKKAKVLGMRRGLILAED

SEQ ID NO: 198701 - DNA, 1323 bp, Artificial Sequence
  derived and/or modified sequence
atgattatcccatctttggaagagctcgacagcctgaagtactctgatctacagaacttggctaaatcgctcggactgagggctaacttgcgtgcaaccaagttattgaaggctctcaaaggatacatcaagcatgaagcaagaaaagggaacgagaatcaggatgagtcccagactagcgcttctagttgtgatgaaaccgagattcagattagcaaccaggaggaagcggagcgccagcctctaggccatgttaccaaaacgcggcgaaggtgtaaaaccgtgcgggtggatcccgatagtcaacagaaccacagcgaaattaagatatccaaccctacagaatttcagaaccacgagaaacaggagtcccaggatctgagggctactgcgaaagtgcctagcccgccagatgaacaccaggaggcagagaatgctgtgagctccggaaaccgtgactccaaagtaccctccgaaggaaagaaaagcctatatacagacgagagctctaagcccggcaaaaacaaacgcaccgccatcaccacaccaaattttaagaagttgcatgaggcgcactttaaagaaatggagagcatcgaccagtatattgaaagaaagaaaaagcacttcgaagagcacaactctatgaatgaattaaaacagcctataaataagggaggcgtgaggacaccggtcccaccccgggggagactgtctgtcgcctcgacccctattagtcagaggcgcagccagggaagaagctgcggaccagcctcacagtcaacactcggcctgaagggctccctgaagcggagcgccatcagcgcggctaagaccggcgtgcggtttagcgcagccactaaggacaacgaacacaagcggagcctgacgaaaacccctgcgcgcaaaagcgcacacgtgaccgtgagtggcgggacccccaagggagaggccgtactgggaacacacaagttgaaaaccattaccggaaatagcgcagcggtcattacaccattcaagctgaccactgaggcgacccagactcctgtgagcaacaaaaagcctgtgtttgacctgaaagcctcactctcccgcccgctgaactatgaaccacataaaggaaagctcaagccttgggggcaatccaaagaaaacaactaccttaatcagcacgtcaaccgaattaatttttacaagaagacctataagcagccgcacttgcagactaaggaagaacagagaaagaaaagagaacaggaacggaaagaaaaaaaggccaaagtactcggcatgcgccgcggcctgatattagcagaagactag

SEQ ID NO: 198702 - DNA, 1323 bp, Artificial Sequence
  derived and/or modified sequence
atgatcatccccagcctggaggagctggacagcctgaagtacagcgacctgcagaacctggccaagagcctgggcctgcgggccaacctgcgggccaccaagctgctgaaggccctgaagggctacatcaagcatgaggccaggaaaggaaatgaaaaccaggatgagagccagaccagcgccagcagctgtgatgaaacagagatccagatcagcaaccaggaggaggccgagcggcagcccctgggccacgtgaccaagacccggcggcgctgcaagacagtgcgggtggaccctgacagccagcagaaccacagcgagatcaagatcagcaaccccacagagttccagaaccacgagaagcaggagagccaggacctgcgggccacagccaaggtgcccagccccccagatgagcaccaggaggccgagaatgctgtgagcagcggcaacagagacagcaaggtgcccagcgagggcaagaagagcctgtacacagatgagagcagcaagccaggcaagaacaagaggacagccatcaccacccccaacttcaagaagctgcacgaggcccacttcaaggagatggagagcattgaccagtacattgaaaggaagaagaagcactttgaggagcacaacagcatgaatgagctgaagcagcccatcaacaagggcggcgtgaggacccctgtgcccccccggggccgcctgtctgtggccagcacccccatcagccagaggaggagccagggccgcagctgtggccctgccagccagagcaccctgggcctgaagggcagcctgaagaggtctgccatctctgctgccaagacaggagtgcgcttctctgctgccaccaaggacaatgagcacaagaggagcctgaccaagaccccagccaggaagagcgcccacgtgacagtgtctgggggcacccccaagggggaggccgtgctgggcacccacaagctgaagaccatcactggaaacagcgctgctgtgatcacccccttcaagctgaccacagaggccacccagacccctgtgagcaacaagaagcctgtgtttgacctgaaggccagcctgagccggcccctgaactatgagccccacaagggcaagctgaagccctggggccagagcaaggagaacaactacctgaaccagcacgtgaaccgcatcaacttctacaagaagacctacaagcagccccacctgcagaccaaggaggagcagaggaagaagcgggagcaggagaggaaggagaagaaggccaaggtgctgggcatgaggcggggcctcatcctggctgaagattag

SEQ ID NO: 198703 - DNA, 1323 bp, Artificial Sequence
  derived and/or modified sequence
atgatcatccccagcctggaggagctggacagcctgaagtacagcgatcttcagaatctggcgaagtctctgggactgcgagccaatctgagagccaccaagctgctgaaagcactgaaaggctacatcaagcacgaggcgcggaaggggaacgagaatcaggatgagagccagacttcagcatctagttgtgatgagacagagatccagatcagtaaccaggaagaggctgaaagacagcccttagggcatgtgaccaagactcgacgtcggtgtaagaccgtgcgcgtggaccccgactcgcaacagaatcactccgagatcaagatttctaatccaaccgagttccagaaccatgagaaacaagaaagtcaggacctccgcgcaaccgcaaaggtgccctctcccccagatgaacatcaggaggccgaaaacgcggtgagttctgggaatcgtgacagcaaggtgcccagcgagggaaagaaaagcctgtatacagacgagtcgtctaaaccgggtaagaacaagaggactgctatcactacaccgaactttaagaagctccatgaagctcactttaaagagatggaatccatcgatcaatatatagagcgaaagaaaaaacatttcgaagaacataattccatgaacgagctcaaacagcctatcaacaaaggtggcgtgcggacgcccgtgccgccgcggggcagactgtccgttgccagcacgccaatctcccagcgtaggtctcaggggcggagttgcggccctgcctcacagtctaccctgggtctaaaagggtcgcttaagaggtccgcaatatctgcagcaaagacgggggtgaggtttagtgcagccactaaagacaacgagcacaaaaggtctctcaccaaaactccagctaggaagtctgcacacgtaaccgtgtctggtggcactccaaagggggaggcagttctgggaacccataagctaaagacaatcactggtaactcggccgccgtaataactcccttcaaattgaccactgaggctacccaaacacccgtttctaacaaaaagccagtatttgatctgaaagcctctctgagcagaccccttaattacgagcctcacaagggtaaacttaagccgtgggggcagtctaaagagaataattatttaaaccagcacgtcaataggatcaacttttacaagaagacttacaaacagccccaccttcagacgaaggaagagcagcggaaaaaacgggaacaggagagaaaagaaaaaaaagcaaaggtgcttggaatgcgccgtgggttgattctagccgaagattag

SEQ ID NO: 198704 - DNA, 2274 bp, Artificial Sequence
  derived and/or modified sequence
aaagttaagagtggcgccagggatttgaaccgcgctgacgaagtttggtgatccatcttccgagtatcgccgggatttcgaatcgcgatgatcatcccctctctagaggagctggactccctcaagtacagtgacctgcagaacttagccaagagtctgggtctccgggccaacctgagggcaaccaagttgttaaaagccttgaaaggctacattaaacatgaggcaagaaaaggaaatgagaatcaggatgaaagtcaaacttctgcatcctcttgtgatgagactgagatacagatcagcaaccaggaagaagctgagagacagccacttggccatgtcaccaaaacaaggagaaggtgcaagactgtccgtgtggaccctgactcacagcagaatcattcagagataaaaataagtaatcccactgaattccagaatcatgaaaagcaggaaagccaggatctcagagctactgcaaaagttccttctccaccagacgagcaccaagaagctgagaatgctgtttcctcaggtaacagagattcaaaggtaccttcagaaggaaagaaatctctctacacagatgagtcatccaaacctggaaaaaataaaagaactgcaatcactactccaaactttaagaagcttcatgaagctcattttaaggaaatggagtccattgatcaatatattgagagaaaaaagaaacattttgaagaacacaattccatgaatgaactgaagcagcccatcaataagggaggggtcaggactccagtacctccaagaggaagactctctgtggcttctactcccatcagccaacgacgctcgcaaggccggtcttgtggccctgcaagtcagagtaccttgggtctgaaggggtcactcaagcgctctgctatctctgcagctaaaacgggtgtcaggttttcagctgctactaaagataatgagcataagcgttcactgaccaagactccagccagaaagtctgcacatgtgaccgtgtctgggggcaccccaaaaggcgaggctgtgcttgggacacacaaattaaagaccatcacggggaattctgctgctgttattaccccattcaagttgacaactgaggcaacgcagactccagtctccaataagaaaccagtgtttgatcttaaagcaagtttgtctcgtcccctcaactatgaaccacacaaaggaaagctaaaaccatgggggcaatctaaagaaaataattatctaaatcaacatgtcaacagaattaacttctacaagaaaacttacaaacaaccccatctccagacaaaggaagagcaacggaagaaacgcgagcaagaacgaaaggagaagaaagcaaaggttttgggaatgcgaaggggcctcattttggctgaagattaataattttttaacatcttgtaaatattcctgtattctcaacttttttccttttgtaaattttttttttttgctgtcatccccactttagtcacgagatctttttctgctaactgttcatagtctgtgtagtgtccatgggttcttcatgtgctatgatctctgaaaagacgttatcaccttaaagctcaaattctttgggatggtttttacttaagtccattaacaattcaggtttctaacgagacccatcctaaaattctgtttctagatttttaatgtcaagttcccaagttccccctgctggttctaatattaacagaactgcagtcttctgctagccaatagcatttacctgatggcagctagttatgcaagcttcaggagaatttgaacaataacaagaatagggtaagctgggatagaaaggccacctcttcactctctatagaatatagtaacctttatgaaacggggccatatagtttggttatgacatcaatattttacctaggtgaaattgtttaggcttatgtaccttcgttcaaatatcctcatgtaattgccatctgtcactcactatattcacaaaaataaaactctacaactcattctaacattgcttacttaaaagctacatagccctatcgaaatgcgaggattaatgctttaatgcttttagagacagggtctcactgtgttgcccaggctggtctcaaactccaccaaatgtacttcttattcattttatggaaaagactaggctttgcttagtatcatgtccatgtttccttcacctcagtggagcttctgagttttatactgctcaagatcgtcataaataaaattttttctcattgtcataga

SEQ ID NO: 198705 - DNA, 1323 bp, Artificial Sequence
  derived and/or modified sequence
atgattatcccttcattggaggagctggactctttgaagtactcagaccttcagaacctggccaagtctcttggactgcgggcaaacctcagagcaacgaagcttttaaaagctctcaaagggtacattaagcacgaggcaagaaagggcaatgaaaatcaggatgagtcacagacatctgcatcctcctgcgatgagaccgagatccagatttccaatcaagaggaggccgaacgtcaacctctgggacacgtgaccaagactaggcggagatgtaagaccgtccgggtggatcccgatagtcagcagaatcattctgagatcaaaatctccaatcccacagaatttcagaatcacgaaaagcaggagtctcaagatttgcgggctacagctaaggtgccaagcccacccgatgaacatcaggaggccgagaatgctgtctctagtggtaatagagatagcaaagtcccttccgaggggaagaaatccttatatacagatgaaagctcaaagccaggaaaaaacaaaaggactgcaatcactacccccaactttaaaaagttacatgaggcacatttcaaggaaatggagagcattgaccagtatattgaaaggaaaaaaaagcatttcgaagagcataactcgatgaacgaattgaaacaaccgataaataagggcggagtacgtaccccggtgccacccaggggtcgtctgtctgtcgctagcacacccattagccagcgcaggtcccaagggagaagctgtggcccagcaagccagtcaaccttggggcttaaaggctccctgaaaaggagtgcaatcagcgccgcaaagacaggtgtgcgtttcagtgccgcaacaaaagacaatgaacataaacgaagcttaacgaaaacccccgcacggaaaagtgctcatgtaactgtcagcggcggaacgccaaagggagaggctgtcctcgggactcacaaactgaagaccatcacgggaaactccgccgctgtgattacaccatttaagctgacgacggaggccacccaaacaccggtctccaataaaaaacccgtgttcgatcttaaggccagtcttagcaggccgctaaactacgagccacacaaaggtaaactgaaaccatgggggcagagcaaggaaaataattatcttaatcaacacgtcaataggattaacttttacaagaagacttacaaacagccccacttacagactaaggaagaacagaggaagaagcgtgagcaggaaaggaaagaaaaaaaagccaaggtgctggggatgcgaagaggacttattctagctgaagattag

SEQ ID NO: 198706 - DNA, 1323 bp, Artificial Sequence
  derived and/or modified sequence
atgatcatccccagcctggaggagctggacagcctgaagtacagcgacctgcagaacctggccaagagcctgggcctgagagccaacctgagagccaccaagctgctgaaggccctgaagggctacatcaagcacgaggccagaaagggcaacgagaaccaggacgagagccagaccagcgccagcagctgcgacgagaccgagatccagatcagcaaccaggaggaggccgagagacagcccctgggccacgtgaccaagaccagaagaagatgcaagaccgtgagagtggaccccgacagccagcagaaccacagcgagatcaagatcagcaaccccaccgagttccagaaccacgagaagcaggagagccaggacctgagagccaccgccaaggtgcccagcccccccgacgagcaccaggaggccgagaacgccgtgagcagcggcaacagagacagcaaggtgcccagcgagggcaagaagagcctgtacaccgacgagagcagcaagcccggcaagaacaagagaaccgccatcaccacccccaacttcaagaagctgcacgaggcccacttcaaggagatggagagcatcgaccagtacatcgagagaaagaagaagcacttcgaggagcacaacagcatgaacgagctgaagcagcccatcaacaagggcggcgtgagaacccccgtgccccccagaggcagactgagcgtggccagcacccccatcagccagagaagaagccagggcagaagctgcggccccgccagccagagcaccctgggcctgaagggcagcctgaagagaagcgccatcagcgccgccaagaccggcgtgagattcagcgccgccaccaaggacaacgagcacaagagaagcctgaccaagacccccgccagaaagagcgcccacgtgaccgtgagcggcggcacccccaagggcgaggccgtgctgggcacccacaagctgaagaccatcaccggcaacagcgccgccgtgatcacccccttcaagctgaccaccgaggccacccagacccccgtgagcaacaagaagcccgtgttcgacctgaaggccagcctgagcagacccctgaactacgagccccacaagggcaagctgaagccctggggccagagcaaggagaacaactacctgaaccagcacgtgaacagaatcaacttctacaagaagacctacaagcagccccacctgcagaccaaggaggagcagagaaagaagagagagcaggagagaaaggagaagaaggccaaggtgctgggcatgagaagaggcctgatcctggccgaggactag

SEQ ID NO: 198707 - protein, 204 aa, Artificial Sequence
  derived and/or modified sequence
MDETVAEFIKRTILKIPMNELTTILKAWDFLSENQLQTVNFRQRKESVVQHLIHLCEEKRASISDAALLDIIYMQFHQHQKVWEVFQMSKGPGEDVDLFDMKQFKNSFKKILQRALKNVTVSFRETEENAVWIRIAWGTQYTKPNQYKPTYVVYYSQTPYAFTSSSMLRRNTPLLGQELEATGKIYLRQEEIILDITEMKKACN

SEQ ID NO: 198708 - DNA, 615 bp, Artificial Sequence
  derived and/or modified sequence
atggacgaaacagtggctgagttcattaagaggacaatcctgaaaattccaatgaatgaacttaccactatcctcaaggcctgggatttcttgtccgagaatcagctgcagacggtgaactttaggcagaggaaggagagcgtggtgcaacatcttatccatttatgtgaagagaaaagagcctccatctctgatgctgctctgctggatatcatttacatgcagtttcaccagcatcaaaaagtctgggaggtatttcagatgagcaagggacccggcgaggatgtcgacctcttcgatatgaagcagttcaagaactcgttcaaaaaaatcctgcagagagcgctgaagaatgttacagtcagctttcgggagactgaggagaatgccgtctggatcaggatcgcctggggtactcagtacactaagcctaaccaatacaagcctacgtacgtcgtctactactcccagacgccatacgccttcacttcgagcagcatgttgcgccgtaatacgccgctcctgggccaggaactagaggcgaccggcaagatctacctccgccaggaggagataattctggatattaccgagatgaaaaaggcttgcaattag

SEQ ID NO: 198709 - DNA, 615 bp, Artificial Sequence
  derived and/or modified sequence
atggatgagaccgtggccgagttcatcaagaggaccatcctgaagatccccatgaatgagctgaccaccatcctgaaggcctgggacttcctgtctgagaaccagctgcagacagtgaacttccggcagaggaaggagagcgtggtgcagcacctgatccacctgtgtgaggagaagagggccagcatcagtgatgctgccctgctggacatcatctacatgcagttccaccagcaccagaaggtgtgggaggtgttccagatgagcaagggccctggagaagatgtggacctgtttgacatgaagcagttcaagaacagcttcaagaagatcctgcagagggccctgaagaatgtgacagtgtccttccgggagacagaggagaatgctgtgtggatcagaattgcctggggcacccagtacaccaagcccaaccagtacaagcccacctacgtggtgtactacagccagaccccctatgccttcaccagcagctccatgctgcggaggaacacccccctgctgggccaggagctggaggccaccgggaagatctacctgcggcaggaggagatcatcctggacatcacagagatgaagaaggcctgcaactag

SEQ ID NO: 198710 - DNA, 615 bp, Artificial Sequence
  derived and/or modified sequence
atggacgagaccgtggccgagttcatcaagcggaccatcctgaagatacctatgaacgaattgacgaccatcctcaaggcatgggactttctctccgagaatcagttacagactgtcaattttaggcagagaaaagagtccgttgtgcagcacctgatacatctctgtgaagagaagagggcgtcaatttccgacgctgcattgttagacatcatttacatgcaattccaccaacatcaaaaagtctgggaggtgtttcagatgtcaaagggcccgggcgaggatgtggacctcttcgacatgaaacagttcaaaaactcatttaagaagattctgcaaagagcacttaaaaacgtgactgtgagctttagagagactgaagagaacgcagtctggatccgcattgcgtggggaacacaatatacaaaacccaatcagtataagccaacatatgtagtttactactcccaaactccctatgccttcacctctagtagcatgctgagacgaaacactccattgctgggccaggagttagaggctaccggcaagatctacctgaggcaggaagaaattatactcgatattaccgaaatgaaaaaggcctgcaactag

SEQ ID NO: 198711 - DNA, 615 bp, Artificial Sequence
  derived and/or modified sequence
atggacgagactgtggctgagtttataaaaaggaccatactcaagattcctatgaatgagctaaccactatcttgaaagcatgggacttcctttcggaaaatcagctgcaaaccgtgaactttaggcaacgaaaggaatccgtcgtccaacacttgatccacctctgtgaggaaaaacgtgcttctataagcgacgcagcccttttagatattatctacatgcagttccatcagcaccagaaggtctgggaagtgttccaaatgtccaaagggcctggcgaggacgtggacctgtttgatatgaaacagtttaaaaactcctttaaaaaaatcctccagcgagctttgaaaaatgtgactgtgtctttccgtgaaacggaagagaacgctgtgtggatcagaattgcatggggtacccagtatacaaagccaaatcagtacaagcccacctacgtggtgtattacagccagaccccgtacgccttcacatcttctagtatgttgcgaaggaataccccactcctcggacaggaactggaggctaccggcaagatttacctacggcaggaagagatcattttagatattactgagatgaaaaaggcatgtaattag

SEQ ID NO: 198712 - DNA, 1398 bp, Artificial Sequence
  derived and/or modified sequence
cacctcgctcgcagcctccccagcgcagcagcccggctgtgggcctgcggcagccgggtcttcctggtccccacctcctggggccgacgggcggcaggaaggggctcggcgggacgcgccatcagggacctgaggaggaacaacggaacgcgttcggaacggcctggactcccgagactcacccgactcgtggccacaccgggagaactgaagcggcagtagccggcggagacgcccgacccgaaggccggctgctagggagcagacagctgaaccgcttgccagacgccgaaacccagtgacgccctccaccgctccaccgtgctcccggctcctcgcccccgccgcccgcgggccccaaggcgcatgcgccgcctgtcctggaggggcccatttccgtccgtcgtggggggaggcacagtgagtccactggggcacggcagcgtctaagccacaagccgagcacataagccaggtcctaacggagcctatgtgtaagtccactactggtgcaaggttgcacacttctaagaagagcggcgtggggggctcggcgaccttcgcttcagtcgctcccccgtgcagtcccctgtgcccaagacacagcctgatgcttgtgctccggtgggcggagcttggaggcggcgggaactgcaattggtggctttgaaggcgcggcgagcgggaacagctcttgaggagtgagactgcaggagatgtgggccgtgccaaagagatggatgagactgttgctgagttcatcaagaggaccatcttgaaaatccccatgaatgaactgacaacaatcctgaaggcctgggattttttgtctgaaaatcaactgcagactgtaaatttccgacagagaaaggaatctgtagttcagcacttgatccatctgtgtgaggaaaagcgtgcaagtatcagtgatgctgccctgttagacatcatttatatgcaatttcatcagcaccagaaagtttgggaagtttttcagatgagtaaaggaccaggtgaagatgttgacctttttgatatgaaacaatttaaaaattcgttcaagaaaattcttcagagagcattaaaaaatgtgacagtcagcttcagagaaactgaggagaatgcagtctggattcgaattgcctggggaacacagtacacaaagccaaaccagtacaaacctacctacgtggtgtactactcccagactccgtacgccttcacgtcctcctccatgctgaggcgcaatacaccgcttctgggtcaggagttagaagctactgggaaaatctacctccgacaagaggagatcattttagatattaccgaaatgaagaaagcttgcaattagtgaacatgaaaggaaaataaaaattcctcacagtcatctttttataa

SEQ ID NO: 198713 - DNA, 615 bp, Artificial Sequence
  derived and/or modified sequence
atggacgagaccgtggccgagttcatcaagagaaccatcctgaagatccccatgaacgagctgaccaccatcctgaaggcctgggacttcctgagcgagaaccagctgcagaccgtgaacttcagacagagaaaggagagcgtggtgcagcacctgatccacctgtgcgaggagaagagagccagcatcagcgacgccgccctgctggacatcatctacatgcagttccaccagcaccagaaggtgtgggaggtgttccagatgagcaagggccccggcgaggacgtggacctgttcgacatgaagcagttcaagaacagcttcaagaagatcctgcagagagccctgaagaacgtgaccgtgagcttcagagagaccgaggagaacgccgtgtggatcagaatcgcctggggcacccagtacaccaagcccaaccagtacaagcccacctacgtggtgtactacagccagaccccctacgccttcaccagcagcagcatgctgagaagaaacacccccctgctgggccaggagctggaggccaccggcaagatctacctgagacaggaggagatcatcctggacatcaccgagatgaagaaggcctgcaactag

SEQ ID NO: 198714 - protein, 260 aa, Artificial Sequence
  derived and/or modified sequence
MNSAAGFSHLDRRERVLKLGESFEKQPRCAFHTVRYDFKPASIDTSSEGYLEVGEGEQVTITLPNIEGSTPPVTVFKGSKKPYLKECILIINHDTGECRLEKLSSNITVKKTRVEGSSKIQYRKEQQQQQMWNSARTPNLVKHSPSEDKMSPASPIDDIERELKAEASLMDQMSSCDSSSDSKSSSSSSSEDSSSDSEDEDCKSSTSDTGNCVSGHPTMTQYRIPDIDASHNRFRDNSGLLMNTLRNDLQLSESGSDSDD

SEQ ID NO: 198715 - protein, 263 aa, Artificial Sequence
  derived and/or modified sequence
MNSAAGFSHLDRRERVLKLGESFEKQPRCAFHTVRYDFKPASIDTSSEGYLEVGEGEQVTITLPNIEGSTPPVTVFKGSKKPYLKECILIINHDTGECRLEKLSSNITVKKTRVEGSSKIQYRKEQQQQQMWNSARTPNLVKHSPSEDKMSPASPIDDIERELKAEASLMDQMSSCDSSSDSKSSSSSSSEDSSSDSEDEDCKSSTSDTGNCVSGHPTMTQYRIPDIDASHNRFRDNSGLLMNTLNNLSSHSFSSLYDPLLSH

SEQ ID NO: 198716 - DNA, 783 bp, Artificial Sequence
  derived and/or modified sequence
atgaattctgctgccggcttctctcatttagatcgccgtgagcgcgtgttaaagctgggcgaatcattcgaaaaacaacctcgctgtgccttccacaccgtgaggtacgattttaagcccgcaagtatcgataccagctctgaggggtatcttgaggtcggcgagggagaacaggtcaccatcactcttccgaatattgaaggcagcacccctccagtgacagtttttaaaggttcgaagaagccctacctgaaagagtgcattttgattatcaaccacgatacaggcgagtgcagactggagaagctgagctccaacatcacggtgaagaagacccgcgtcgaaggctctagcaagatccagtacagaaaggaacagcagcagcagcaaatgtggaattccgcaaggacgcccaaccttgtgaaacacagccccagcgaggacaaaatgtcccctgccagtcctattgatgatattgagagggaactgaaggccgaggcgagcctgatggaccaaatgtcttcatgcgattcttcatccgatagtaaaagcagctctagtagttcatcagaggattctagctctgacagcgaagatgaggactgcaagagtagcacatctgatacgggaaactgcgtgtccggccatcccactatgactcagtatcgcattccagatatagatgcctcgcataatcgcttccgggacaacagcggcctcctgatgaacacactgcgtaacgatttgcagcttagcgagagcggaagcgattcggacgactag

SEQ ID NO: 198717 - DNA, 792 bp, Artificial Sequence
  derived and/or modified sequence
atgaactctgcagccgggttctctcacctcgatagaagagaaagggtgcttaagcttggcgaaagtttcgagaaacagcctcgctgcgccttccataccgttagatatgattttaaaccggcttctatcgatacttcttcagaaggttatctggaagtgggcgagggagagcaggtcactataactcttcctaatattgagggcagtactccacctgttactgtgttcaagggttcgaagaagccctatctcaaagagtgcattctgattatcaaccacgatactggagaatgcaggctcgaaaaactttcaagcaacatcaccgtcaaaaagactcgggttgagggatcatctaaaatccagtaccgaaaagagcagcagcagcaacagatgtggaatagtgcccgtacacctaacttagttaaacattccccatctgaggataaaatgtcacccgcaagtccgatcgatgatatagaaagagagctgaaggcagaagcctccctgatggaccagatgtcatcctgcgactcaagctcagactctaaatcttcaagctcttccagcagtgaggactcttcctccgattctgaggacgaagactgcaaaagcagtactagtgacactggcaactgcgtcagcggccatccaactatgactcagtatcgcataccggacatcgacgcgtcccataatagatttagggacaatagcggacttctgatgaatacccttaataatctaagcagccactccttcagcagtctgtacgacccgcttttgtcgcattag

SEQ ID NO: 198718 - DNA, 783 bp, Artificial Sequence
  derived and/or modified sequence
atgaacagcgctgctggcttcagccacctggaccggcgggagcgggtgctgaagctgggggagagctttgagaagcagccccgctgtgccttccacacagtgcgctatgacttcaagccagccagcattgacaccagcagcgagggctacctggaggtgggggagggggagcaggtgaccatcaccctgcccaacatcgagggcagcaccccacctgtgaccgtcttcaagggcagcaagaagccctacctgaaggagtgcatcctgatcatcaaccacgacacaggagaatgtcggctggagaagctgagcagcaacatcaccgtgaagaagaccagggtggagggcagcagcaagatccagtacaggaaggagcagcagcagcagcagatgtggaacagcgcccggacccccaacctggtgaagcacagccccagcgaggacaagatgagccctgccagccccattgatgacatcgagcgggagctgaaggccgaggccagcctgatggaccagatgagcagctgtgacagcagcagtgacagcaagagcagcagcagcagcagcagcgaggacagcagcagtgacagtgaagatgaggactgcaagagcagcaccagtgacaccggcaactgtgtgtctggccaccccaccatgacccagtaccgcatcccagacattgatgccagccacaaccgcttccgggacaacagcggcctgctgatgaacaccctgagaaatgacctgcagctgtctgagagcggcagtgacagtgatgactag

SEQ ID NO: 198719 - DNA, 792 bp, Artificial Sequence
  derived and/or modified sequence
atgaacagcgctgctggcttcagccacctggaccggcgggagcgggtgctgaagctgggggagagctttgagaagcagccccgctgtgccttccacacagtgcgctatgacttcaagccagccagcattgacaccagcagcgagggctacctggaggtgggggagggggagcaggtgaccatcaccctgcccaacatcgagggcagcaccccacctgtgaccgtcttcaagggcagcaagaagccctacctgaaggagtgcatcctgatcatcaaccacgacacaggagaatgtcggctggagaagctgagcagcaacatcaccgtgaagaagaccagggtggagggcagcagcaagatccagtacaggaaggagcagcagcagcagcagatgtggaacagcgcccggacccccaacctggtgaagcacagccccagcgaggacaagatgagccctgccagccccattgatgacatcgagcgggagctgaaggccgaggccagcctgatggaccagatgagcagctgtgacagcagcagtgacagcaagagcagcagcagcagcagcagcgaggacagcagcagtgacagtgaagatgaggactgcaagagcagcaccagtgacaccggcaactgtgtgtctggccaccccaccatgacccagtaccgcatcccagacattgatgccagccacaaccgcttccgggacaacagcggcctgctgatgaacaccctgaacaacctgagcagccacagcttcagcagcctgtatgaccccctgctgagccactag

SEQ ID NO: 198720 - DNA, 783 bp, Artificial Sequence
  derived and/or modified sequence
atgaacagcgccgccggcttcagccacctggaccggcgggagcgggtgttgaagctgggcgagagttttgagaaacagcctaggtgtgcatttcataccgtccggtatgatttcaaacccgcatccatagacacgtcttctgaagggtacttggaagtgggagaaggcgagcaggtgaccataactctacccaatattgagggttccacaccaccagtgaccgtattcaagggaagtaagaagccttacctgaaggaatgcattttgatcatcaatcacgatactggtgaatgtagactcgaaaaactgtctagtaacattacagtgaagaaaacacgcgtcgagggctcctctaagattcagtatagaaaggagcaacagcagcagcagatgtggaattctgcccggacacccaacttggtgaagcatagcccatcagaagacaagatgtctcctgcttcacccatcgatgacatcgaaagggagcttaaagcagaggcaagcctgatggaccagatgtcctcatgcgattcctctagcgactccaagtcctcgtcgtcgagttcttcagaggacagcagttcagatagcgaggacgaggactgcaaatccagcactagtgacacgggtaattgtgtctccggtcaccccaccatgacacagtacaggatacccgatatagatgcttcccacaacagattccgcgataatagcggattgctgatgaacactctgagaaatgatctacagctaagtgaatccggtagtgacagcgacgattag

SEQ ID NO: 198721 - DNA, 792 bp, Artificial Sequence
  derived and/or modified sequence
atgaacagcgccgccggcttcagccacctggaccggcgggagcgggtgctgaaactcggggaaagcttcgagaagcagccacgctgcgctttccatactgtgaggtacgactttaaacccgctagcatagacacctcaagcgagggctatctggaagtgggcgaaggcgagcaagtgacaattaccctgcctaatattgaagggtccacccccccagtgactgtcttcaagggatcaaaaaaaccttatctgaaagagtgcattctgatcatcaaccatgacaccggagagtgccgtcttgagaaattgagttctaatataaccgtgaaaaagaccagagtcgagggctcctcaaagatccagtatcggaaggaacagcaacagcagcagatgtggaattcagctaggactcccaacttggtcaagcactcgccatctgaagacaagatgtcccccgctagtccaattgatgatatagagcgtgagttgaaggccgaggcaagcctgatggaccagatgagttcctgtgattcttcgtcggactccaagagttcctcatcttcttcatctgaggacagtagcagcgatagcgaagacgaagactgtaaaagcagcacttcggacaccggcaattgcgtgagcggacatcccactatgactcaataccgaatccccgatatcgacgcatctcataaccggtttcgcgacaattccggtcttcttatgaacactcttaacaacctttcctctcactcatttagtagtctctacgaccctctgttaagtcactag

SEQ ID NO: 198722 - DNA, 783 bp, Artificial Sequence
  derived and/or modified sequence
atgaactccgcagcagggtttagtcacttagaccgcagggagcgagtgttgaaacttggagagtccttcgaaaagcagccccgttgcgcattccacacggtgcggtatgactttaaaccagcatctatcgatacttctagcgaggggtatctggaagtcggagagggtgagcaggtcacgattaccttaccaaatatcgaaggaagcacccccccagtgacagtttttaagggctcaaagaaaccctaccttaaggagtgcatcctcattattaatcacgacaccggggaatgtcgtctcgaaaagctaagctcaaacataacagtgaagaagacccgcgtagagggcagcagcaagattcagtataggaaggaacagcaacagcaacagatgtggaatagcgctaggactcccaatctggtgaagcactctccatctgaagataagatgagtcctgcttcccctatagacgacatcgaaagggagctgaaagctgaggcatccctgatggatcagatgagcagctgtgatagctcaagtgactccaagtcctcttcgtctagctctagtgaagactccagcagcgattcggaggacgaggattgtaagtccagcacctcagatactggaaactgtgtatctggtcaccccaccatgacacagtacaggatccccgatattgacgccagccataatcggttccgggacaattccggcttgcttatgaacaccctgagaaatgacttgcagctgtccgagagcggaagcgattccgacgactag

SEQ ID NO: 198723 - DNA, 792 bp, Artificial Sequence
  derived and/or modified sequence
atgaattccgccgcaggattttctcacttagaccgacgggagagggtactgaagctcggtgagtcttttgaaaaacagcccaggtgtgcatttcataccgtgaggtatgatttcaaacctgcgtctatcgataccagtagcgaaggctatctggaagtgggggaaggagaacaggtaacaatcacactgccgaatattgagggctcaactccacccgtgacagtgtttaagggaagcaagaaaccctacctgaaggagtgcattctgataattaaccacgacactggagagtgtcggcttgagaagctgagctcgaatattacagtcaaaaagacacgcgttgaggggagctcgaagatccagtatcggaaagaacagcagcagcagcagatgtggaatagcgcccgaacacccaacctggtaaagcactctccctcagaggacaaaatgagtccagctagccccatcgacgacattgagagagaactaaaggctgaagcgagcctgatggaccaaatgtcctcctgcgatagtagttctgattctaagtcaagtagcagctccagttcagaagattcaagctcagacagcgaggatgaggattgtaaatcgtctacctccgataccggcaattgtgtctctggccatcccactatgactcagtaccggatcccagacatagacgcgagccacaaccggtttcgcgacaatagcggattgctcatgaacactctaaacaatctctcatcacattccttttcttccttatatgacccccttctctctcactag

SEQ ID NO: 198724 - DNA, 992 bp, Artificial Sequence
  derived and/or modified sequence
agctgcttcaggctgaggtggcagatagtgagcgctggtggcggagttaaagtcaaagcaggagagtaattatgaatagcgcagcgggattctcacacctagaccgtcgcgagcgggttctcaagttaggggagagtttcgagaagcagccgcgctgcgccttccacactgtgcgctatgacttcaaacctgcttctattgacacttcttctgaaggataccttgaggttggtgaaggtgaacaggtgaccataactctgccaaatatagaaggttcaactccaccagtaactgttttcaaaggttcaaaaaaaccttacttaaaagaatgcattttgattattaaccatgatactggagaatgtcggctagaaaaactcagcagcaacatcactgtaaaaaaaacaagagttgaaggaagcagtaaaattcagtatcgtaaagaacaacagcaacaacaaatgtggaattcagccaggactcccaatcttgtaaaacattctccatctgaagataagatgtccccagcatctccaatagatgatatcgaaagagaactgaaggcagaagctagtctaatggaccagatgagtagttgtgatagttcatcagattccaaaagttcatcatcttcaagtagtgaggatagttctagtgactcagaagatgaagattgcaaatcctctacttctgatacagggaattgtgtctcaggacatcctaccatgacacagtacaggattcctgatatagatgccagtcataatagatttcgagacaacagtggccttctgatgaatactttaagaaatgatttgcagctgagtgaatcaggaagtgacagtgatgactgaagaaatatttagctataaataaaaatttatacagcatgtataatttattttgtattaacaataaaaattcctaagactgagggaaatatgtcttaacttttgatgataaaagaaattaaatttgattcagaaatttca

SEQ ID NO: 198725 - DNA, 960 bp, Artificial Sequence
  derived and/or modified sequence
agatagtgagcgctggtggcggagttaaagtcaaagcaggagagtaattatgaatagcgcagcgggattctcacacctagaccgtcgcgagcgggttctcaagttaggggagagtttcgagaagcagccgcgctgcgccttccacactgtgcgctatgacttcaaacctgcttctattgacacttcttctgaaggataccttgaggttggtgaaggtgaacaggtgaccataactctgccaaatatagaaggttcaactccaccagtaactgttttcaaaggttcaaaaaaaccttacttaaaagaatgcattttgattattaaccatgatactggagaatgtcggctagaaaaactcagcagcaacatcactgtaaaaaaaacaagagttgaaggaagcagtaaaattcagtatcgtaaagaacaacagcaacaacaaatgtggaattcagccaggactcccaatcttgtaaaacattctccatctgaagataagatgtccccagcatctccaatagatgatatcgaaagagaactgaaggcagaagctagtctaatggaccagatgagtagttgtgatagttcatcagattccaaaagttcatcatcttcaagtagtgaggatagttctagtgactcagaagatgaagattgcaaatcctctacttctgatacagggaattgtgtctcaggacatcctaccatgacacagtacaggattcctgatatagatgccagtcataatagatttcgagacaacagtggccttctgatgaatactttaaataatctttcctctcactccttttcaagtttatatgatcctctgctcagtcattaaagttggagtttctcaaggcttacttttgggttctttttttcttttcattctacaatttctccctaaataacttcctccatgtttctgttgcagtcaatacttatgtgtaggtaacttgc

SEQ ID NO: 198726 - DNA, 783 bp, Artificial Sequence
  derived and/or modified sequence
atgaacagcgccgccggcttcagccacctggacagaagagagagagtgctgaagctgggcgagagcttcgagaagcagcccagatgcgccttccacaccgtgagatacgacttcaagcccgccagcatcgacaccagcagcgagggctacctggaggtgggcgagggcgagcaggtgaccatcaccctgcccaacatcgagggcagcaccccccccgtgaccgtgttcaagggcagcaagaagccctacctgaaggagtgcatcctgatcatcaaccacgacaccggcgagtgcagactggagaagctgagcagcaacatcaccgtgaagaagaccagagtggagggcagcagcaagatccagtacagaaaggagcagcagcagcagcagatgtggaacagcgccagaacccccaacctggtgaagcacagccccagcgaggacaagatgagccccgccagccccatcgacgacatcgagagagagctgaaggccgaggccagcctgatggaccagatgagcagctgcgacagcagcagcgacagcaagagcagcagcagcagcagcagcgaggacagcagcagcgacagcgaggacgaggactgcaagagcagcaccagcgacaccggcaactgcgtgagcggccaccccaccatgacccagtacagaatccccgacatcgacgccagccacaacagattcagagacaacagcggcctgctgatgaacaccctgagaaacgacctgcagctgagcgagagcggcagcgacagcgacgactag

SEQ ID NO: 198727 - DNA, 792 bp, Artificial Sequence
  derived and/or modified sequence
atgaacagcgccgccggcttcagccacctggacagaagagagagagtgctgaagctgggcgagagcttcgagaagcagcccagatgcgccttccacaccgtgagatacgacttcaagcccgccagcatcgacaccagcagcgagggctacctggaggtgggcgagggcgagcaggtgaccatcaccctgcccaacatcgagggcagcaccccccccgtgaccgtgttcaagggcagcaagaagccctacctgaaggagtgcatcctgatcatcaaccacgacaccggcgagtgcagactggagaagctgagcagcaacatcaccgtgaagaagaccagagtggagggcagcagcaagatccagtacagaaaggagcagcagcagcagcagatgtggaacagcgccagaacccccaacctggtgaagcacagccccagcgaggacaagatgagccccgccagccccatcgacgacatcgagagagagctgaaggccgaggccagcctgatggaccagatgagcagctgcgacagcagcagcgacagcaagagcagcagcagcagcagcagcgaggacagcagcagcgacagcgaggacgaggactgcaagagcagcaccagcgacaccggcaactgcgtgagcggccaccccaccatgacccagtacagaatccccgacatcgacgccagccacaacagattcagagacaacagcggcctgctgatgaacaccctgaacaacctgagcagccacagcttcagcagcctgtacgaccccctgctgagccactag

SEQ ID NO: 198728 - protein, 148 aa, Artificial Sequence
  derived and/or modified sequence
MWNPNAGQPGPNPYPPNIGCPGGSNPAHPPPINPPFPPGPCPPPPGAPHGNPAFPPGGPPHPVPQPGYPGCQPLGPYPPPYPPPAPGIPPVNPLAPGMVGPAVIVDKKMQKKMKKAHKKMHKHQKHHKYHKHGKHSSSSSSSSSSDSD

SEQ ID NO: 198729 - DNA, 447 bp, Artificial Sequence
  derived and/or modified sequence
atgtggaaccccaatgcgggccagcccggccctaacccctatcctccaaacatcggatgccctggtggctctaatcctgcccatcctccccctattaatcctcctttccctcccggaccttgcccaccaccaccgggcgcacctcatggtaatcccgcgttcccaccaggaggtcctcctcaccctgtcccacagccagggtatccaggatgtcaacccctgggaccttatccccctccttatccccctcctgctcctggaattcccccagtgaaccctttagcacctggcatggttggcccggccgtaatcgtcgataaaaagatgcagaaaaagatgaagaaggcacataagaaaatgcataagcaccagaaacaccataaataccacaagcacggcaaacactcttcctctagttccagcagcagcagcagcgactctgattag

SEQ ID NO: 198730 - DNA, 489 bp, Artificial Sequence
  derived and/or modified sequence
atgggctacctggattctattggatggcggacacacctcaatatgtggaacccaaatgctgggcaacctggcccaaacccctatccccccaatattggatgtcccgggggctccaatcccgctcatccacctcctataaatcctcccttccctccaggcccctgtccaccaccgcccggtgctccccacggcaaccccgccttcccgcccgggggacctccccatcccgtgcctcagcccggatacccagggtgccagcctctcgggccataccctcctccttacccccctcccgctccaggtatccctccagtgaatcccttagccccagggatggtgggtcctgccgttatcgtggacaaaaagatgcaaaagaaaatgaaaaaggcgcataagaagatgcacaagcatcagaagcatcacaaataccacaagcatggcaagcacagcagttccagttcgagctcctcatcatcagattccgactag

SEQ ID NO: 198731 - DNA, 447 bp, Artificial Sequence
  derived and/or modified sequence
atgtggaatcccaatgcaggtcagccggggcccaacccatatccacccaacatcggttgccctgggggatctaatccagcacacccaccccctattaatcctccattccccccagggccctgcccaccacccccgggcgcgccccatgggaatccagcgtttccccccgggggacctccgcatcccgttccacagccaggatatcccgggtgtcagccactaggcccttaccctccaccctatcctcctccagcccctggaatcccccccgtcaacccattggccccaggtatggtggggcccgcagtgattgtggataagaagatgcagaaaaagatgaaaaaggcccacaagaagatgcacaaacaccagaagcatcacaagtaccataaacacgggaaacattcatcctccagctcgagtagcagctccagtgacagcgactag

SEQ ID NO: 198732 - DNA, 447 bp, Artificial Sequence
  derived and/or modified sequence
atgtggaatcctaacgccggccagccaggccccaacccctacccccctaacatcggctgcccagggggaagtaacccggctcaccctccgcccatcaacccaccattcccacccggcccgtgcccccccccaccaggtgctcctcacgggaaccccgcctttccacccggaggacccccacaccccgtaccacagcccggttaccctggatgccaacccctgggtccttatcctccgccctatcctccccctgcccccggcatccctcctgttaaccccctggcacctggcatggtcggacccgccgtgattgtggataaaaagatgcagaagaaaatgaagaaggctcacaagaaaatgcacaaacatcaaaagcatcacaagtatcacaagcacggcaaacacagttctagctccagttccagctcttcctcagatagtgactag

SEQ ID NO: 198733 - DNA, 447 bp, Artificial Sequence
  derived and/or modified sequence
atgtggaaccccaatgccggccagcccggccccaacccctacccacccaacatcggctgccctgggggcagcaacccagcccaccccccacccatcaacccccccttccccccaggcccctgccccccacctcctggggcccctcatggcaacccagccttccccccaggcggccccccccaccctgtgccccagcccggctacccaggctgccagcccctgggcccctaccccccaccctacccacctccagcccctggcatcccccctgtgaaccccctggcccctggcatggtgggccctgctgtgattgtggacaagaagatgcagaagaagatgaagaaggcccacaagaagatgcacaagcaccagaagcaccacaagtaccacaagcacggcaagcacagcagcagcagcagcagcagcagcagcagtgacagcgactag

SEQ ID NO: 198734 - DNA, 489 bp, Artificial Sequence
  derived and/or modified sequence
atgggctacctggacagcatcggctggaggacccacctgaacatgtggaaccccaatgccggccagcccggccccaacccctacccacccaacatcggctgccctgggggcagcaacccagcccaccccccacccatcaacccccccttccccccaggcccctgccccccacctcctggggcccctcatggcaacccagccttccccccaggcggccccccccaccctgtgccccagcccggctacccaggctgccagcccctgggcccctaccccccaccctacccacctccagcccctggcatcccccctgtgaaccccctggcccctggcatggtgggccctgctgtgattgtggacaagaagatgcagaagaagatgaagaaggcccacaagaagatgcacaagcaccagaagcaccacaagtaccacaagcacggcaagcacagcagcagcagcagcagcagcagcagcagtgacagcgactag

SEQ ID NO: 198735 - DNA, 1229 bp, Artificial Sequence
  derived and/or modified sequence
agagcaaccgtttcctcctcagtcggaccagagtgattgattagtttgttgtctaatcatcagtcgagcggccacataattaccaattaggcagtagcagaggcgggtgccgaagcacggggtctgggtgactaggaagagccgagactgcgaaggagaacgcagcaagcccaggcggcggtggaaaggctggaggacacacctaaacatgtggaatcccaatgccgggcagccagggccaaatccatatccccccaatattgggtgccctggaggttccaatcctgcccacccaccacctattaatccaccctttcccccaggcccctgtcctcctcccccaggagctccccatggcaatccagctttccccccaggtgggccccctcatcctgtgccacagccagggtatccaggatgccaaccgttgggtccctaccctcctccatacccaccgcctgcccctggaatccctcctgtgaatcccttggctcctggcatggttggaccagcagtgatagtagacaagaagatgcagaagaaaatgaagaaagctcataaaaagatgcacaagcaccaaaagcaccacaagtaccacaagcatggcaagcattcctcctcttcctcctcctcttccagcagtgattctgactgaatacaggccctggacccttccctcaagtctcaccagttctgctctcccatcaagcttcagatgccatgttgtactgggggaatgtagcccttgtgctccccaccccctacctccacctgagcctcaccctgctgttgagccctgagtggctaggggaaatgggaagaggattgccatggcctggccatcttgttgctgcttggttagatcatatagctaatgaattaggcaggggagctattttttgaagatgatgaactaaatgttgaagacaagtttgagatctgtaaaatgtgattttttacttccacttataatacttgtgattggggaggtttgtggaaattcaattatgatgaaaaacctatcttttttgtaatgttggcatacttggggaatttagtggcaaatacattccccagcaggccttttgttggttgcactaactgcaaggttgctgggaagtagagtccatttggttgatgagctttgactgcggttttggaaccttacctctcctccttagcccaatatgctgtcttgggtcctattcaaataaagttatttctcctgg

SEQ ID NO: 198736 - DNA, 688 bp, Artificial Sequence
  derived and/or modified sequence
gaaggagaacgcagcaagcccaggcggcggtggaaaggtgatggggtatctggattccataggctggaggacacacctaaacatgtggaatcccaatgccgggcagccagggccaaatccatatccccccaatattgggtgccctggaggttccaatcctgcccacccaccacctattaatccaccctttcccccaggcccctgtcctcctcccccaggagctccccatggcaatccagctttccccccaggtgggccccctcatcctgtgccacagccagggtatccaggatgccaaccgttgggtccctaccctcctccatacccaccgcctgcccctggaatccctcctgtgaatcccttggctcctggcatggttggaccagcagtgatagtagacaagaagatgcagaagaaaatgaagaaagctcataaaaagatgcacaagcaccaaaagcaccacaagtaccacaagcatggcaagcattcctcctcttcctcctcctcttccagcagtgattctgactgaatacaggccctggacccttccctcaagtctcaccagttctgctctcccatcaagcttcagatgccatgttgtactgggggaatgtagcccttgtgctccccaccccctacctccacctgagcctcaccctgctgttgagccctgagtggctaggggaaa

SEQ ID NO: 198737 - DNA, 755 bp, Artificial Sequence
  derived and/or modified sequence
tttcttatgtggaagttgtggtagttctccaggctggaggacacacctaaacatgtggaatcccaatgccgggcagccagggccaaatccatatccccccaatattgggtgccctggaggttccaatcctgcccacccaccacctattaatccaccctttcccccaggcccctgtcctcctcccccaggagctccccatggcaatccagctttccccccaggtgggccccctcatcctgtgccacagccagggtatccaggatgccaaccgttgggtccctaccctcctccatacccaccgcctgcccctggaatccctcctgtgaatcccttggctcctggcatggttggaccagcagtgatagtagacaagaagatgcagaagaaaatgaagaaagctcataaaaagatgcacaagcaccaaaagcaccacaagtaccacaagcatggcaagcattcctcctcttcctcctcctcttccagcagtgattctgactgaatacaggccctggacccttccctcaagtctcaccagttctgctctcccatcaagcttcagatgccatgttgtactgggggaatgtagcccttgtgctccccaccccctacctccacctgagcctcaccctgctgttgagccctgagtggctaggggaaatgggaagaggattgccatggcctggccatcttgttgctgcttggttagatcatatagctaatgaattaggcaggggagctattttttgaagatgatg

SEQ ID NO: 198738 - DNA, 625 bp, Artificial Sequence
  derived and/or modified sequence
acataattaccaattaggcagtagcagaggcgggtgccgaagcacggggtctgggtgactaggaagagccgagactgcgaaggagaacgcagcaagcccaggcggcggtggaaaggtgatggggctggaggacacacctaaacatgtggaatcccaatgccgggcagccagggccaaatccatatccccccaatattgggtgccctggaggttccaatcctgcccacccaccacctattaatccaccctttcccccaggcccctgtcctcctcccccaggagctccccatggcaatccagctttccccccaggtgggccccctcatcctgtgccacagccagggtatccaggatgccaaccgttgggtccctaccctcctccatacccaccgcctgcccctggaatccctcctgtgaatcccttggctcctggcatggttggaccagcagtgatagtagacaagaagatgcagaagaaaatgaagaaagctcataaaaagatgcacaagcaccaaaagcaccacaagtaccacaagcatggcaagcattcctcctcttcctcctcctcttccagcagtgattctgactgaatacaggccctggacccttccctcaagtctcacca

SEQ ID NO: 198739 - DNA, 447 bp, Artificial Sequence
  derived and/or modified sequence
atgtggaaccccaacgccggccagcccggccccaacccctacccccctaatataggctgtcccggtgggagcaatccggcgcatcctcctccgattaaccctcctttcccgccagggccttgtcctccaccgcctggagctcctcatgggaaccccgcatttccccctggaggtcctccccaccctgttccgcaacccggttacccaggctgccaacccctagggccctacccccctccatacccgccccccgcccctggtattcctcctgttaaccctctcgccccaggtatggttggccccgccgtgatcgtggacaagaaaatgcagaaaaagatgaagaaggcacacaaaaagatgcacaagcaccaaaaacatcacaagtatcacaagcacggtaaacattcttcctcaagctcttcaagttcaagctccgattccgactag

SEQ ID NO: 198740 - DNA, 489 bp, Artificial Sequence
  derived and/or modified sequence
atgggctacctggacagcatcggctggcggacccacctgaacatgtggaaccccaatgcaggacagcccgggccaaacccctatcccccgaatattggctgcccaggagggagtaatccagcccatcctccacccattaatccacccttccctcccgggccatgcccccctccccctggggcaccacatggcaaccccgccttccctccaggtggacccccgcacccagtgccccaaccaggatacccaggctgtcagcctctgggtccctatccgcctccttaccctccccccgccccaggaatcccccctgtgaatccactcgccccgggcatggttgggcccgccgtcatagttgataaaaagatgcagaaaaagatgaagaaagcccacaaaaagatgcacaagcatcaaaaacatcataagtatcacaagcacggcaagcatagttcctcaagctcatcctcaagctcctctgatagtgactag

SEQ ID NO: 198741 - DNA, 447 bp, Artificial Sequence
  derived and/or modified sequence
atgtggaaccccaacgccggccagcccggccccaacccctacccccccaatattgggtgtcccgggggttcaaaccctgctcatcctccccctataaaccctccattcccacctggtccttgtccgccacccccgggggccccacatggtaatcctgcttttcccccaggtgggccaccacatcctgttccacaacccggctatccagggtgccagccccttggtccttatcccccaccctatcctcctccagcaccgggtattccacctgtcaatcccctggcccccggcatggtcgggccggctgttatcgtggataagaagatgcagaaaaagatgaaaaaagcacataagaaaatgcacaagcaccagaagcaccacaagtatcacaagcatggcaaacattctagctcaagctcatcaagctcatctagcgactcagattag

SEQ ID NO: 198742 - DNA, 447 bp, Artificial Sequence
  derived and/or modified sequence
atgtggaaccccaacgccggccagcccggccccaacccctacccccccaatatcggttgccctggcggtagtaaccccgcccaccccccccctataaatccgccttttccacctggaccatgtcctcctcccccgggggcaccacacggaaaccccgcattcccccctggtggacctccgcatcccgtgccacagcccggctatcctggctgtcagcccctgggtccctatccccctccctatccccctcctgcacccggtatacctccggtcaaccccctagcaccagggatggtcggtccggcggtgatcgtggataaaaaaatgcagaagaagatgaagaaggcacacaaaaaaatgcacaagcatcagaaacaccacaaataccacaagcacggcaagcacagttcaagcagctcatcaagctcctcctcagactcagattag

SEQ ID NO: 198743 - DNA, 447 bp, Artificial Sequence
  derived and/or modified sequence
atgtggaacccgaatgcgggacaacccggtcccaatccctatccccctaacatcggatgccccggaggctctaatcccgcacaccctccgccaatcaacccacctttcccacccggaccttgcccaccacccccaggggcaccacacgggaatccagctttcccacccggagggccacctcacccagtaccgcagcctggttacccaggctgccagccactgggcccttacccgccaccttatcccccacccgctcccggtattccacctgtaaaccctttagctcctggtatggtgggcccagccgtgatcgtggacaagaaaatgcagaagaagatgaaaaaggcgcataagaaaatgcacaagcaccagaagcaccacaaataccacaagcacggcaagcactcctctagttccagcagctcctcatcctccgacagcgactag

SEQ ID NO: 198744 - DNA, 489 bp, Artificial Sequence
  derived and/or modified sequence
atggggtatctggattctatcggatggagaacgcatctgaatatgtggaacccaaacgccggtcaaccaggacccaatccataccccccaaacatcgggtgcccaggcggttctaaccctgctcaccctcccccaataaatcccccatttcctcctggcccatgtcccccacctcccggagcaccccacgggaatcccgcattccctcctgggggtccacctcaccccgtcccccagccaggatacccagggtgtcaaccattggggccatatccaccgccatacccgcctcccgctcctggcatacctcctgtcaaccccctagctcccggtatggttgggcctgctgtgatcgtcgacaagaagatgcagaaaaagatgaaaaaagctcataagaaaatgcacaaacaccagaagcatcataagtaccataaacacggaaagcactcctcctcctcctctagctcttcgagttccgatagtgactag

SEQ ID NO: 198745 - DNA, 447 bp, Artificial Sequence
  derived and/or modified sequence
atgtggaatcccaacgcaggacaacccggaccaaatccttatcccccaaatatcgggtgtcctggcggttccaaccctgcccatcctcccccaattaacccaccattcccccctggcccatgtcctccaccccctggcgctccgcacgggaatcccgctttcccgccaggcggacctccacacccagtgccccagcctgggtatccaggttgccagccactgggtccttaccccccaccctaccccccacccgctcctggaatacccccagtgaaccccctcgcccctggaatggtggggcctgccgtcatagtggataagaagatgcaaaaaaagatgaagaaagctcataagaagatgcataagcaccagaagcaccacaaataccacaaacatggcaaacacagttcgtctagtagctccagcagtagcagcgacagcgactag

SEQ ID NO: 198746 - DNA, 447 bp, Artificial Sequence
  derived and/or modified sequence
atgtggaatcccaacgccggacaacccggaccaaacccctaccctcctaacatcggatgtcctggcggttccaatccagctcatcctccccctattaaccctcctttcccccctggcccttgcccaccacctccgggagcccctcatgggaatccagccttcccaccaggtgggcctccacaccctgtgccacaaccgggatatcctggatgccagcccctgggcccatacccgccaccctaccctccgcctgccccaggcattccacctgttaatcccctggcaccaggaatggtgggccctgcagttatcgtggacaagaagatgcagaagaaaatgaaaaaggcacataaaaaaatgcacaagcatcagaagcatcacaagtaccacaaacacggcaaacattcctctagctcttcttctagctcgtcttccgactccgattag

SEQ ID NO: 198747 - DNA, 447 bp, Artificial Sequence
  derived and/or modified sequence
atgtggaaccccaacgccggccagcccggccccaacccctacccccccaacatcggctgccccggcggcagcaaccccgcccaccccccccccatcaacccccccttcccccccggcccctgcccccccccccccggcgccccccacggcaaccccgccttcccccccggcggccccccccaccccgtgccccagcccggctaccccggctgccagcccctgggcccctacccccccccctaccccccccccgcccccggcatcccccccgtgaaccccctggcccccggcatggtgggccccgccgtgatcgtggacaagaagatgcagaagaagatgaagaaggcccacaagaagatgcacaagcaccagaagcaccacaagtaccacaagcacggcaagcacagcagcagcagcagcagcagcagcagcagcgacagcgactag

SEQ ID NO: 198748 - DNA, 489 bp, Artificial Sequence
  derived and/or modified sequence
atgggctacctggacagcatcggctggagaacccacctgaacatgtggaaccccaacgccggccagcccggccccaacccctacccccccaacatcggctgccccggcggcagcaaccccgcccaccccccccccatcaacccccccttcccccccggcccctgcccccccccccccggcgccccccacggcaaccccgccttcccccccggcggccccccccaccccgtgccccagcccggctaccccggctgccagcccctgggcccctacccccccccctaccccccccccgcccccggcatcccccccgtgaaccccctggcccccggcatggtgggccccgccgtgatcgtggacaagaagatgcagaagaagatgaagaaggcccacaagaagatgcacaagcaccagaagcaccacaagtaccacaagcacggcaagcacagcagcagcagcagcagcagcagcagcagcgacagcgactag

SEQ ID NO: 198749 - protein, 475 aa, Artificial Sequence
  derived and/or modified sequence
MQKSTNSDTSVETLNSTRQGTGAVQMRIKNANSHHDRLSQSKSMILTDVGKVTEPISRHRRNHSQHILKDVIPPLEQLMVEKEGYLQKAKIADGGKKLRKNWSTSWIVLSSRRIEFYKESKQQALSNMKTGHKPESVDLCGAHIEWAKEKSSRKNVFQITTVSGNEFLLQSDIDFIILDWFHAIKNAIDRLPKDSSCPSRNLELFKIQRSSSTELLSHYDSDIKEQKPEHRKSLMFRLHHSASDTSDKNRVKSRLKKFITRRPSLKTLQEKGLIKDQIFGSHLHKVCERENSTVPWFVKQCIEAVEKRGLDVDGIYRVSGNLATIQKLRFIVNQEEKLNLDDSQWEDIHVVTGALKMFFRELPEPLFPYSFFEQFVEAIKKQDNNTRIEAVKSLVQKLPPPNRDTMKVLFGHLTKIVAKASKNLMSTQSLGIVFGPTLLRAENETGNMAIHMVYQNQIAELMLSEYSKIFGSEED

SEQ ID NO: 198750 - DNA, 1428 bp, Artificial Sequence
  derived and/or modified sequence
atgcagaagtctactaactctgatacttccgtcgaaaccctcaactcaacaagacaggggactggcgccgtgcagatgcgcatcaaaaatgccaatagccaccatgacaggttgtcacagtcaaagagcatgattctaactgacgtgggcaaagtcactgaacctatctctcggcaccggagaaaccattctcagcatattcttaaagacgttataccccccctcgagcaactgatggtggagaaggagggctacttacagaaggccaaaatcgccgacgggggtaaaaagctgaggaagaattggtccacgtcttggattgtgctttcctctcgcagaattgaattttacaaagagagcaagcaacaggccctgtccaacatgaagacagggcacaaaccagagtctgtggacctgtgcggtgctcatattgagtgggccaaggaaaaaagcagccgaaagaatgtcttccagattactaccgtgagcggcaacgaatttcttttgcagagcgacattgactttataatccttgattggtttcatgcaataaagaatgctattgaccgcttacctaaagactcctcatgcccaagcaggaacctggaattattcaaaattcagcgcagctcttccactgagctcctgtcacactacgattcagatatcaaagaacagaagccagagcacaggaaaagcttaatgttcagactccatcacagtgcatctgacactagcgataagaatcgggtcaagtccaggcttaagaagttcatcacaagaagaccctcactaaaaacgctacaagaaaagggattgattaaggaccagattttcgggtcacacctgcacaaagtgtgcgagcgagaaaactcaacagttccttggtttgtcaaacagtgcattgaggccgttgagaaaagaggacttgacgtggatggcatctaccgggttagtggcaatcttgcgacaatccagaaactgcgatttattgtcaaccaggaagagaagttgaacttggacgacagccagtgggaagatatccatgtggtgaccggcgctctgaagatgtttttccgcgagttgcctgagcctttattcccatacagcttcttcgaacagttcgtggaggccattaagaaacaggacaacaacaccagaatagaggccgtcaaaagcctcgtgcagaagctgccacctcctaatagggataccatgaaggtgctgttcggacacctgactaaaatcgtcgccaaggcatccaagaacttaatgtctacccaaagcctcggaatcgtgttcgggcctacactcctgcgggctgagaacgaaactggcaacatggcaattcacatggtttatcagaatcaaattgccgaacttatgttatctgagtatagcaagattttcggaagcgaagaggactag

SEQ ID NO: 198751 - DNA, 1428 bp, Artificial Sequence
  derived and/or modified sequence
atgcagaagagcaccaacagcgacacctctgtggagaccctgaacagcacccggcagggcactggagctgtgcagatgaggatcaagaatgccaacagccaccacgaccggctgagccagagcaagtccatgatcctgacagatgtgggcaaggtgacagagcccatcagccgccacagaagaaaccacagccagcacatcctgaaggatgtgattcctcccctggagcagctgatggtggagaaggagggctacctgcagaaggccaagattgctgatggcggcaagaagctgaggaagaactggagcacctcctggatcgtgctgagcagccgccgcatcgagttctacaaggagagcaagcagcaggccctgagcaacatgaagacaggccacaagccagagagcgtggacctgtgtggggcccacatcgagtgggccaaggagaagagcagcaggaagaatgtgttccagatcaccaccgtgtctggaaatgagttcctgctgcagagcgacatcgacttcatcatcctggactggttccacgccatcaagaatgccatcgaccggctgcccaaggacagcagctgccccagcaggaacctggagctgttcaagatccagaggagcagcagcacagagctgctgagccactatgacagcgacatcaaggagcagaagccagagcacaggaagagcctgatgttccggctgcaccacagcgccagtgacaccagtgacaagaacagagtgaagagccggctgaagaagttcatcacccggcggcccagcctgaagaccctgcaggagaagggcctcatcaaggaccagatcttcggcagccacctgcacaaggtgtgtgagcgggagaacagcacagtgccctggtttgtgaagcagtgcatcgaggccgtggagaagaggggcctggatgtggatggcatctacagagtgtctggcaacctggccaccatccagaagctgcgcttcatcgtgaaccaggaggagaagctgaacctggatgacagccagtgggaggacatccacgtggtgactggagccctgaagatgttcttccgggagctgcctgagcccctcttcccctacagcttctttgagcagtttgtggaggccatcaagaagcaggacaacaacacccgcatcgaggccgtgaagagcctggtgcagaagctgcccccacccaacagagacaccatgaaggtgctgtttggccacctgaccaagatcgtggccaaggccagcaagaacctgatgagcacccagagcctgggcatcgtgtttggccccaccctgctgcgggcagaaaatgaaacaggcaacatggccatccacatggtgtaccagaaccagattgctgagctgatgctgtctgagtacagcaagatcttcggcagcgaggaggactag

SEQ ID NO: 198752 - DNA, 1428 bp, Artificial Sequence
  derived and/or modified sequence
atgcagaagagcaccaacagcgacaccagcgtggagaccctgaactccacccggcagggcaccggcgctgttcagatgcgcataaaaaacgcaaattctcaccacgaccggctgtcgcaatcaaaatccatgattttaactgacgtcgggaaggtaaccgagcctatctctcgccaccggcggaaccactcccaacatattttgaaggatgtgattcccccacttgagcagctgatggtcgaaaaagaagggtacctgcagaaggctaaaatagcggatggaggcaagaaactccgaaaaaattggtcaacaagctggatagtgctctcttctagaaggatcgagttttacaaggaaagcaaacagcaggcgctctccaatatgaaaaccggtcacaaaccagagagtgtcgacttatgcggcgcccatatcgaatgggctaaggaaaagtcatctcggaaaaatgtgttccagattaccaccgtatccggcaacgaattcctcctccagtcagacatagattttatcattctggattggttccatgccatcaagaacgccatagacagactcccaaaggactcatcatgtccttcccgaaatctggaacttttcaagattcagaggtcgtccagtactgagttgctcagccactacgactccgacattaaagagcagaaaccagaacataggaaatccttgatgttccgcctgcatcactcagcttcagatacaagtgataaaaatcgcgtcaagtctagactgaagaagtttatcacacgtcggccaagtcttaagactctccaggaaaaagggctgataaaggatcagatctttggctcccaccttcacaaggtctgtgagagagagaactctactgtaccatggtttgttaagcaatgtattgaggcggtcgagaaaagggggctggacgtagacgggatctaccgcgtttccggcaacctggcaactatccagaagcttcgatttattgtgaatcaggaggaaaagctgaatctcgacgactcccagtgggaggacatccatgtggtcaccggcgcactaaaaatgttcttccgggaattgccagaacccttgttcccatactcattctttgagcagttcgtagaggctattaaaaagcaggacaacaatactagaatcgaagctgtgaagtcccttgttcagaagttaccccctcccaacagagataccatgaaagtgctgttcggccatttaacgaagatagtggctaaggcatctaagaatctgatgtccacacagagcttgggaattgtgtttggcccgacattactgagagccgaaaacgagacaggaaatatggcaatacacatggtttaccagaaccagatagccgagctgatgctatctgagtactccaaaatctttggtagcgaggaagactag

SEQ ID NO: 198753 - DNA, 1428 bp, Artificial Sequence
  derived and/or modified sequence
atgcagaaaagcactaatagcgacacgtctgtggaaactctcaacagtactcgtcagggtaccggcgctgtccagatgagaatcaagaacgccaactctcaccacgatcgactgagtcaatcaaagtcaatgattctgacagacgtgggcaaggttaccgagcctatctctcggcaccggaggaatcatagccagcacatcctgaaggacgtaatccctccactcgagcagctcatggtcgagaaagaggggtatctgcagaaagcaaaaatagccgacggtggcaagaagctacgtaagaattggagcacgtcctggatagtgctttcttcgcggaggattgagttttataaagagtcaaaacagcaagctctctccaacatgaagaccggtcacaaacccgagtccgtggacttgtgtggagctcacatcgagtgggctaaggagaaatctagtcgaaagaacgtgttccagatcaccaccgtgtctggtaacgagtttctcctacagtcagacatcgactttatcatcttggattggtttcatgcaatcaagaacgccatcgaccggctgccaaaagatagctcctgcccgagtagaaatctggaactcttcaagatacagaggtcctcatcaacagagttgctcagtcattacgattccgacatcaaggaacagaagcccgaacaccggaaatccctcatgttcaggctgcatcatagcgccagcgatacgtccgataagaatcgagtaaagtctaggcttaaaaagttcattacacggagaccatctctgaagacactgcaagaaaaaggtctgatcaaggaccagatttttggatcccaccttcacaaggtgtgtgaaagggagaacagcaccgttccatggttcgttaaacagtgcattgaagctgtcgagaagaggggactagatgtcgatggcatttatcgcgtgagcggaaacctggccacaatccagaaactgcggttcattgtgaatcaggaggagaagctgaacctagacgactcgcaatgggaagatatacacgttgtcaccggcgctctgaagatgttttttagggagctgccggaacctctgtttccctacagttttttcgaacagttcgttgaggctatcaaaaagcaggacaacaacacgaggattgaggccgtcaagtcactggtgcagaagctgccccctccaaaccgagatacgatgaaggtgctttttggacaccttacaaaaattgtggctaaagctagcaagaacctgatgagtacacaatcgttaggcatcgtgttcggacctacattgctgcgggcagagaacgaaactgggaatatggctatacatatggtgtaccagaaccagatagccgagctgatgcttagtgagtatagtaaaatctttggatccgaggaagactag

SEQ ID NO: 198754 - DNA, 1775 bp, Artificial Sequence
  derived and/or modified sequence
gcctttttcttcccccagtactgaaattaagcagcatccaacacaggcctactcttacgacatgtgactttactgttttccgtttttgttgaaagagtcattaacagttaggagttgatggcagtttcaataacaggtcattgccgagaaaaggatagcactataatatgcagaaatctacaaattctgatacttccgtggaaacactgaattctacccgccaaggcacaggagctgtgcaaatgagaatcaaaaatgccaacagccaccatgacaggctcagccaaagtaaatccatgatcctcaccgatgtcgggaaggtcactgaacctatatccagacacagaaggaatcattcacagcatatcttgaaagatgtcattcctccattggaacaactgatggttgaaaaagaaggttatctgcaaaaagctaaaattgcagatggaggaaagaaactaaggaaaaactggtctacttcctggattgttctttctagtcgaagaattgaattttacaaagaatccaagcaacaggctctgtccaatatgaaaactgggcacaaaccagaaagtgtggatttgtgtggagcacacattgaatgggccaaggaaaaatcgagcagaaagaatgtctttcagatcacaacagtatcaggaaatgagttccttctacagtcagatattgacttcatcatattggattggttccacgctatcaaaaatgcaattgacagattgccaaaggattcaagttgtccatcaagaaacctggaattattcaaaatccaaagatcctctagcactgaattgctaagtcactacgacagtgatataaaagaacagaaaccagagcacagaaaatctttaatgttcagactgcatcacagtgcttccgatacaagcgacaaaaatcgagttaaaagcagattaaagaagtttattacccgaagaccttccctgaaaactctgcaagaaaaaggacttattaaagatcaaatttttggctctcatctgcacaaagtgtgtgaacgtgaaaattccacagttccgtggtttgtaaagcaatgcattgaagctgttgagaaaagaggtctagatgttgatggaatatatcgagttagtggcaatctggcaacaatacagaagttaagatttattgtcaaccaagaagagaagctgaatttggacgacagccagtgggaggacatccacgttgtcaccggagcactgaagatgtttttccgggagctgcctgagccgctcttcccttacagtttctttgagcagtttgtggaagcgatcaaaaagcaagacaacaacacaagaattgaagctgtaaaatctcttgtacaaaaactccctccgccaaatcgtgacaccatgaaagtcctctttggacatctaactaagatagtggccaaagcctccaagaacctcatgtccacgcaaagcttggggattgtatttggacctacccttctgcgagctgaaaatgaaacaggaaacatggcgatccacatggtctaccagaaccagatagctgagctcatgctgagtgagtacagtaagatcttcggctcagaggaagactgacagacaagacaagctactgaatacgttcacatctgtcttgatgcctaatatttttacatttctgtaaacatatttctgaaatattttttgcctttcaagcgacagatgcctcattttgtgaaaacttaatgatgattttgtgtttaagttccaaacatttgaataaaataattgacaata

SEQ ID NO: 198755 - DNA, 1428 bp, Artificial Sequence
  derived and/or modified sequence
atgcagaagagcaccaacagcgacaccagcgtggagaccctgaacagcaccagacagggcaccggcgccgtgcagatgagaatcaagaacgccaacagccaccacgacagactgagccagagcaagagcatgatcctgaccgacgtgggcaaggtgaccgagcccatcagcagacacagaagaaaccacagccagcacatcctgaaggacgtgatcccccccctggagcagctgatggtggagaaggagggctacctgcagaaggccaagatcgccgacggcggcaagaagctgagaaagaactggagcaccagctggatcgtgctgagcagcagaagaatcgagttctacaaggagagcaagcagcaggccctgagcaacatgaagaccggccacaagcccgagagcgtggacctgtgcggcgcccacatcgagtgggccaaggagaagagcagcagaaagaacgtgttccagatcaccaccgtgagcggcaacgagttcctgctgcagagcgacatcgacttcatcatcctggactggttccacgccatcaagaacgccatcgacagactgcccaaggacagcagctgccccagcagaaacctggagctgttcaagatccagagaagcagcagcaccgagctgctgagccactacgacagcgacatcaaggagcagaagcccgagcacagaaagagcctgatgttcagactgcaccacagcgccagcgacaccagcgacaagaacagagtgaagagcagactgaagaagttcatcaccagaagacccagcctgaagaccctgcaggagaagggcctgatcaaggaccagatcttcggcagccacctgcacaaggtgtgcgagagagagaacagcaccgtgccctggttcgtgaagcagtgcatcgaggccgtggagaagagaggcctggacgtggacggcatctacagagtgagcggcaacctggccaccatccagaagctgagattcatcgtgaaccaggaggagaagctgaacctggacgacagccagtgggaggacatccacgtggtgaccggcgccctgaagatgttcttcagagagctgcccgagcccctgttcccctacagcttcttcgagcagttcgtggaggccatcaagaagcaggacaacaacaccagaatcgaggccgtgaagagcctggtgcagaagctgcccccccccaacagagacaccatgaaggtgctgttcggccacctgaccaagatcgtggccaaggccagcaagaacctgatgagcacccagagcctgggcatcgtgttcggccccaccctgctgagagccgagaacgagaccggcaacatggccatccacatggtgtaccagaaccagatcgccgagctgatgctgagcgagtacagcaagatcttcggcagcgaggaggactag

SEQ ID NO: 198756 - protein, 105 aa, Artificial Sequence
  derived and/or modified sequence
MAGQEDPVQREIHQDWANREYIEIITSSIKKIADFLNSFDMSCRSRLATLNEKLTALERRIEYIEARVTKGETLRTVPCCCWEVALHNTGHMGKAPAAFSSFLSP

SEQ ID NO: 198757 - protein, 75 aa, Artificial Sequence
  derived and/or modified sequence
MAGQEDPVQREIHQDWANREYIEIITSSIKKIADFLNSFDMSCRSRLATLNEKLTALERRIEYIEARVTKGETLT

SEQ ID NO: 198758 - DNA, 228 bp, Artificial Sequence
  derived and/or modified sequence
atggccggccaggaggaccccgtgcagagagagatccaccaggactgggccaacagagagtacatcgagatcatcaccagcagcatcaagaagatcgccgacttcctgaacagcttcgacatgagctgcagaagcagactggccaccctgaacgagaagctgaccgccctggagagaagaatcgagtacatcgaggccagagtgaccaagggcgagaccctgacctag

SEQ ID NO: 198759 - DNA, 318 bp, Artificial Sequence
  derived and/or modified sequence
atggccggacaggaggacccagttcagagggagatccatcaggactgggccaaccgggagtacatcgagattatcacttcttctataaaaaagattgccgatttcctcaattccttcgatatgagctgtcgaagccggttggctactctgaacgagaaactgactgctttggaaaggaggattgagtacatagaagcacgcgtgaccaagggggaaaccctccgtacagtgccttgctgttgctgggaggtcgccctacacaataccggacacatgggcaaagccccagcagcctttagttcgtttttgtctccgtag

SEQ ID NO: 198760 - DNA, 228 bp, Artificial Sequence
  derived and/or modified sequence
atggctgggcaagaggaccctgtgcagagagaaattcatcaggactgggcaaacagagagtatatagaaattatcaccagttccatcaagaagattgctgactttttgaatagctttgacatgtcctgcagatcacgtttggctactctgaacgaaaaactaacagccctcgagagaagaatagagtatatcgaagcgcgggtgacaaaaggagaaacgctcacttag

SEQ ID NO: 198761 - DNA, 318 bp, Artificial Sequence
  derived and/or modified sequence
atggccggccaggaggaccctgtgcagcgggagatccaccaggactgggccaaccgggagtacatcgagatcatcaccagcagcatcaagaagattgctgacttcctgaacagctttgacatgagctgccgcagccggctggccaccctgaatgagaagctgacagccctggagaggagaattgagtacatcgaggcccgggtgaccaagggggagaccctgaggacagtgccctgctgctgctgggaggtggccctgcacaacacaggccacatgggcaaggccccagctgccttcagcagcttcctgagcccctag

SEQ ID NO: 198762 - DNA, 228 bp, Artificial Sequence
  derived and/or modified sequence
atggccggccaggaggaccctgtgcagcgggagatccaccaggactgggccaaccgggagtacatcgagatcatcaccagcagcatcaagaagattgctgacttcctgaacagctttgacatgagctgccgcagccggctggccaccctgaatgagaagctgacagccctggagaggagaattgagtacatcgaggcccgggtgaccaagggggagaccctgacctag

SEQ ID NO: 198763 - DNA, 318 bp, Artificial Sequence
  derived and/or modified sequence
atggccggccaggaggaccccgtgcagcgggagatccaccaggactgggcaaatagggagtatatcgagatcattacctcaagcataaagaaaattgcagatttcctgaactcctttgacatgtcgtgcagatcaaggctcgctactctgaatgagaagctgaccgctttggagaggcggatcgagtacatcgaggctcgcgtgacaaagggagaaacattgagaacggttccttgctgctgctgggaagtggccctacacaatactgggcacatgggtaaggcccctgccgccttctcctccttcctgtctccctag

SEQ ID NO: 198764 - DNA, 228 bp, Artificial Sequence
  derived and/or modified sequence
atggccggccaggaggaccccgtgcagcgggagatccaccaggactgggctaatagggaatacattgagattattacctccagtatcaagaaaattgccgattttctgaatagcttcgacatgagctgcagaagccgcttggccactctgaatgaaaaactaacggctttagaacgcaggattgagtacatcgaggctcgcgttaccaagggcgagaccctgacatag

SEQ ID NO: 198765 - DNA, 318 bp, Artificial Sequence
  derived and/or modified sequence
atggcaggtcaagaggaccccgttcagcgggagatccatcaggattgggcaaaccgggagtatatagagattatcacatcctccatcaaaaagattgccgatttccttaattcctttgatatgtcttgccgtagtaggctggccacccttaacgagaagctgacggcacttgaaagacggatagagtatatagaggcgagggttactaaaggtgagacgttaagaaccgtcccttgttgttgttgggaagtggcgctgcacaacacagggcatatggggaaggcccctgccgctttcagcagcttcctgtcaccctag

SEQ ID NO: 198766 - DNA, 228 bp, Artificial Sequence
  derived and/or modified sequence
atggcaggccaggaggaccccgtccagagggaaatacatcaggattgggccaacagagaatacattgaaatcattacctcctccataaagaaaatagcagatttcttgaatagctttgatatgtcttgcagatctagattggcaaccttgaatgagaagctgactgcgctcgagagaaggatcgagtacatcgaagcccgagtaacaaaaggggaaactcttacctag

SEQ ID NO: 198767 - DNA, 856 bp, Artificial Sequence
  derived and/or modified sequence
ggcggcggccatggcgggacaggaggatccggtgcagcgggagattcaccaggactgggctaaccgggagtacattgagataatcaccagcagcatcaagaaaatcgcagactttctcaactcgttcgatatgtcttgtcgttcaagacttgcaacactaaacgagaaattgacagcccttgaacggagaatagagtacattgaagctcgggtgacaaaaggtgagacactcagaacagtgccgtgctgctgctgggaagttgctttacacaacacaggccacatgggaaaggccccagcagccttcagctccttcctttctccttaaagagcaacagggcttattcttgtttttcttttttcaaaagtgtggcctttgggctctgccatctggggtgtggtgtggtatgtgggaagaagttcagaggaaccgttggaaacgacgttaggcattttaccttttcagtaacattttatacatctacttgtcaatgtatttgagacattcacagccaaaagcctgggactctttgtgaaggtcctcctcacctctatctttctttctctctctctcaaactttccttaaagttctcattgcctttgcactgcttctgtgaacagtctttgtctcctccccacctttggtgggaagtgcggggcagtcctggtcaagacactcatgccctggcaatgtggctgccagagaatgttgttgctaacccaccagtttcttgttgatttggagaggtcaaggccaggcccccacttggcttgaagggacattttcagacttttctttctgtcacttggagtgtctatgcctctcatatttccctaataaactcctcaactttt

SEQ ID NO: 198768 - DNA, 1233 bp, Artificial Sequence
  derived and/or modified sequence
ccgagaattcgtgggtgctcaagaggatgggtgtggcctggcagcgcaggcgcactagaggcctgtagggtcggggcgcctgcgcagtcgctcttcctcaggcggcggccatggcgggacaggaggatccggtgcagcgggagattcaccaggactgggctaaccgggagtacattgagataatcaccagcagcatcaagaaaatcgcagactttctcaactcgttcgatatgtcttgtcgttcaagacttgcaacactaaacgagaaattgacagcccttgaacggagaatagagtacattgaagctcgggtgacaaaaggtgagacactcacctagaacagtgccgtgctgctgctgggaagttgctttacacaacacaggccacatgggaaaggccccagcagccttcagctccttcctttctccttaaagagcaacagggcttattcttgtttttcttttttcaaaagtgtggcctttgggctctgccatctggggtgtggtgtggtatgtgggaagaagttcagaggaaccgttggaaacgacgttaggcattttaccttttcagtaacattttatacatctacttgtcaatgtatttgagacattcacagccaaaagcctgggactctttgtgaaggtcctcctcacctctatctttctttctctctctctcaaactttccttaaagttctcattgcctttgcactgcttctgtgaacagtctttgtctcctccccacctttggtgggaagtgcggggcagtcctggtcaagacactcatgccctggcaatgtggctgccagagaatgttgttgctaacccaccagtttcttgttgatttggagaggtcaaggccaggcccccacttggcttgaagggacattttcagacttttctttctgtcacttggagtgtctatgcctctcatatttccctaataaactcctcaactttttatctgactgctgtgattatggtggggagaggagctagagatgggttcacttattgcacagaaatgtaatacatggcgttattattctaacataaaactttcagatgtagctgtttgattcaaagcctaggtggcttaccagcccaagtccccatgtttggactttcagctgactagctcatcttgggaatcatttggtcattcagcacatttaccaagtatttactatgtaggcatgttaaactccaataaaacatacagcattgaatcaga

SEQ ID NO: 198769 - DNA, 318 bp, Artificial Sequence
  derived and/or modified sequence
atggccggccaggaggaccccgtgcagagagagatccaccaggactgggccaacagagagtacatcgagatcatcaccagcagcatcaagaagatcgccgacttcctgaacagcttcgacatgagctgcagaagcagactggccaccctgaacgagaagctgaccgccctggagagaagaatcgagtacatcgaggccagagtgaccaagggcgagaccctgagaaccgtgccctgctgctgctgggaggtggccctgcacaacaccggccacatgggcaaggcccccgccgccttcagcagcttcctgagcccctag

SEQ ID NO: 198770 - protein, 108 aa, Artificial Sequence
  derived and/or modified sequence
MSLTSSSSVRVEWIAAVTIAAGTAAIGYLAYKRFYVKDHRNKAMINLHIQKDNPKIVHAFDMEDLGDKAVYCRCWRSKKFPFCDGAHTKHNEETGDNVGPLIIKKKET

SEQ ID NO: 198771 - DNA, 327 bp, Artificial Sequence
  derived and/or modified sequence
atgagcctgacgtcctcctcctccgtgagggtggaatggatagccgccgtcactatcgcggctggtacagcagccatcggctacctggcttacaagaggttctatgtgaaagaccaccgcaataaagccatgatcaatctccatatacagaaggacaatcccaagatcgtacatgcctttgatatggaggacctcggtgacaaggctgtctactgccgctgttggcggagcaagaagttccctttttgcgacggggcgcacacaaagcacaatgaggagactggagacaatgtcggcccacttattattaagaagaaagagacctag

SEQ ID NO: 198772 - DNA, 327 bp, Artificial Sequence
  derived and/or modified sequence
atgagcctgaccagcagcagctctgtgcgggtggagtggattgctgctgtgaccatcgctgctggaacagctgccatcggctacctggcctacaagcgcttctacgtgaaggaccacaggaacaaggccatgatcaacctgcacatccagaaggacaaccccaagatcgtgcacgcctttgacatggaggacctgggggacaaggctgtgtactgccgctgctggaggagcaagaagttccccttctgtgatggagcccacaccaagcacaatgaggagaccggggacaacgtgggccccctcatcatcaagaagaaggagacctag

SEQ ID NO: 198773 - DNA, 327 bp, Artificial Sequence
  derived and/or modified sequence
atgagcctgaccagcagcagcagcgtgcgggtggagtggatcgccgctgtaacgatcgccgctggaactgcagctattgggtacctggcctacaaaaggttctacgtgaaggaccacaggaataaggcaatgatcaaccttcacatccaaaaagacaatcccaagatagtgcacgcctttgatatggaggacttgggggacaaagctgtctattgccggtgttggcggtcaaaaaagttccctttttgcgatggcgctcacaccaaacacaatgaagaaaccggtgataacgtcggtcccctgatcataaaaaaaaaagagacttag

SEQ ID NO: 198774 - DNA, 327 bp, Artificial Sequence
  derived and/or modified sequence
atgtcactcactagctcttcatctgtgcgggtagagtggattgccgctgtgacgatcgctgccggtacggctgccataggctatctcgcatacaaaaggttctacgttaaggaccaccggaataaggcaatgataaacttacacattcagaaggacaaccccaaaattgtccatgcatttgacatggaggacctgggcgataaagcagtctactgccggtgctggcgttccaagaaatttcctttttgcgacggggctcataccaagcacaatgaagaaactggggataatgtaggccctctgataatcaagaagaaagaaacgtag

SEQ ID NO: 198775 - DNA, 2479 bp, Artificial Sequence
  derived and/or modified sequence
ggagtccagacttccttatggccaggacagctccacgcatgctcagcacctaccagggtcgagctcacacacgtgcctacgacccgccgcggcgcctgcgcggtagcatcgcggagtcggtgctttagtacgccgctggcacctttactctcgccggccgcgcgaacccgtttgagctcggtatcctagtgcacacgccttgcaagcgacggcgccatgagtctgacttccagttccagcgtacgagttgaatggatcgcagcagttaccattgctgctgggacagctgcaattggttatctagcttacaaaagattttatgttaaagatcatcgaaataaagctatgataaaccttcacatccagaaagacaaccccaagatagtacatgcttttgacatggaggatttgggagataaagctgtgtactgccgttgttggaggtccaaaaagttcccattctgtgatggggctcacacaaaacataacgaagagactggagacaatgtgggccctctgatcatcaagaaaaaagaaacttaaatggacacttttgatgctgcaaatcagcttgtcgtgaagttacctgattgtttaattagaatgactaccacctctgtctgattcaccttcgctggattctaaatgtggtatattgcaaactgcagctttcacatttatggcatttgtcttgttgaaacatcgtggtgcacatttgtttaaacaaaaaaaaaaaaaaaaaggaaaaaccaacctgcatggcctgtgggttattttggtcttgtaaggatccatttctttaaaatactgacatatagagttgtaccttatatagaatatagttgtatcttgaagtcaacatattaaattattctcaaaattatgtatttgcagattgtacttgtaagtttcaaagaaaaattaccatcttttcatattgacctggaaactaaataggatgtgattcagctacattaatttcttaatacaatctaggaaagacctgttgtagccttgattttcttgacattggtaatgacactgagaaaatatggcttctgtttttcaccgttttcaatcaaaatgattgataaatgttattctgtttaatttcataagtcaggtcaataataaaggggtggtaacttcctcatatttatcttcacagatatttaatgaagatggatccattaaaggagccaatagtgaaaatttagttaaaggtgatattagatttaaattagtcatgaagaatgtcttaaaatctaatgttccagaattctggcccaaggaatggtaagcacttgaactgaggattttgaaggaattggaacatataatgtcaagtcttttgatcactaagccacatatcctgacagaaatagtagtcacaagattagatcaaaggcgtgggaagatttttttttttcccactctagctaatcaagcacatggcttttaaattgtatgatctttttcttaaaagcaaaaatttgaagacaagtgtttgtttatgtaatattcttcaaagactccgagcagaaacattgcattcattgttgattcagaaaaaagaaaatataaaaactgaaaataattagcaataaaagatttaagacaaatagttcataaatatttttaaagagattaggtttttgaatttcataggttagaaggaaaatcatggcaaaatttacagaaaattgggcaaacaattgaaattgataaagcaggtaaacatcatcatttattttagtatacatgaattctcagtagtagtcaatcacaaatttctacttgctaaaatccatttaccttgacaggaatcaaacctgacagcagcatatcctatgtaatatatgatcatggctatttttaaatatgtagttttgtgtattactgtagataaaagttggtaacaaaattgtacagtggttttaagaagcccatgtaactaacttggacatgtctttaagtcacatattcatcataaaatctaaaatcctacaaactgattctattagattcttagggtaaattttttctttgcccacctccttctttttaagataagtatgcatgtcagcaaaacagagcaatcatgcttttaaagatgaactgttttaaagaaaaataaatgcatcaactcccagtgtttctgataaagggacatccttctaacttaacagactattctttatcttgaatttgaaattatattgttagtcatgcatttttgtaatgtcagggggaacctggtaccagttctcaaaactataggattatatgagtgtgtgtatacatatggcaaaattataaatgaccaccttactgtgaaatatagatcttgagcattttgaaaggccaaaataattaggtaaatgtattttcaaggtcatgttaaaatgtttacatgcttttgaactagcattcatttatgattaaaacccttttcaggttatttgacctaaaaaccaaa

SEQ ID NO: 198776 - DNA, 327 bp, Artificial Sequence
  derived and/or modified sequence
atgagcctgaccagcagcagcagcgtgagagtggagtggatcgccgccgtgaccatcgccgccggcaccgccgccatcggctacctggcctacaagagattctacgtgaaggaccacagaaacaaggccatgatcaacctgcacatccagaaggacaaccccaagatcgtgcacgccttcgacatggaggacctgggcgacaaggccgtgtactgcagatgctggagaagcaagaagttccccttctgcgacggcgcccacaccaagcacaacgaggagaccggcgacaacgtgggccccctgatcatcaagaagaaggagacctag

SEQ ID NO: 198777 - protein, 165 aa, Artificial Sequence
  derived and/or modified sequence
MKCVFVTVGTTSFDDLIACVSAPDSLQKIESLGYNRLILQIGRGTVVPEPFSTESFTLDVYRYKDSLKEDIQKADLVISHAGAGSCLETLEKGKPLVVVINEKLMNNHQLELAKQLHKEGHLFYCTCSTLPGLLQSMDLSTLKCYPPGQPEKFSAFLDKVVGLQK

SEQ ID NO: 198778 - DNA, 498 bp, Artificial Sequence
  derived and/or modified sequence
atgaagtgtgtgttcgttacagtgggtacaacgtcatttgacgacctcatcgcctgcgtgtccgctccggacagcctccagaagattgaatcccttgggtacaaccgcctaatcctgcagattggacggggaacagttgtcccagaaccctttagcactgaatccttcacattagacgtgtacagatataaagattccctgaaggaagacattcagaaagccgacctggtgatcagtcacgcaggagccggcagctgtctggagaccttggagaaaggcaagccattggtggtagtgatcaacgaaaaactgatgaacaaccaccagttggaactggccaagcagctgcataaggaggggcacctgttttactgtacatgcagtacactacctggcttgcttcagagcatggatctaagcacgctcaaatgttaccctcccggccagcctgagaagttctcagctttccttgataaggtagtggggctacagaagtag

SEQ ID NO: 198779 - DNA, 498 bp, Artificial Sequence
  derived and/or modified sequence
atgaagtgtgtgtttgtgacagtgggcaccaccagctttgatgacctgattgcctgtgtgtctgccccagacagcctgcagaagattgagagcctgggctacaacagactcatcctgcagatcggccggggcaccgtggtgcctgagcccttcagcacagagagcttcaccctggatgtgtaccgctacaaggacagcctgaaggaggacatccagaaggctgacctggtgatcagccatgctggagctggcagctgcctggagaccctggagaagggcaagcccctggtggtggtgatcaatgagaagctgatgaacaaccaccagctggagctggccaagcagctgcacaaggagggccacctgttctactgcacctgcagcaccctgcccggcctgctgcagagcatggacctgagcaccctgaagtgctacccacctggccagcctgagaagttcagcgccttcctggacaaggtggtgggcctgcagaagtag

SEQ ID NO: 198780 - DNA, 498 bp, Artificial Sequence
  derived and/or modified sequence
atgaagtgcgtgttcgtgaccgtgggcaccaccagcttcgacgacttgattgcttgcgtttcggcccccgacagcctccaaaagattgagagcctgggctataatcgacttattctccagattggtcgggggactgtagtgcctgagcctttttccacggaatcgtttaccctggatgtgtaccgctataaggacagcttgaaggaagatatccaaaaagccgaccttgtgatctctcacgccggggcaggctcatgcctggaaaccctcgagaagggtaagcctctcgtggtcgtcatcaacgagaagctgatgaataaccaccagctagagctggccaagcagctccacaaagaaggacacttgttttattgcacctgtagcaccctcccgggcctgcttcagtctatggatctctccacccttaaatgctatcctccaggtcaacccgagaagtttagcgcttttctggataaagttgtaggcttgcagaagtag

SEQ ID NO: 198781 - DNA, 498 bp, Artificial Sequence
  derived and/or modified sequence
atgaaatgtgttttcgtgaccgttgggaccacctccttcgacgatttgattgcttgcgtgtctgctcccgactcccttcagaagatagagtcgttaggctacaacaggctcatactccaaatcggtcggggaactgtggtccccgagcccttttctacggagagcttcacacttgatgtgtacaggtacaaggattccctgaaagaggacatccagaaggccgaccttgtcatttcccatgcaggggcaggtagttgcctggaaaccctggaaaaaggaaagccccttgtagttgtgatcaacgaaaaactgatgaataaccatcagctggagctggccaaacagctccataaagaggggcatcttttctactgcacatgttctaccctgcccggactgcttcaatccatggacttgtctacactgaagtgctacccgccaggccagcctgagaagttcagtgccttcctggataaggtcgttggcctgcagaaatag

SEQ ID NO: 198782 - DNA, 1398 bp, Artificial Sequence
  derived and/or modified sequence
acggatttccgcctccctcacagaaggcagtcactgcaacgtgcgtggcctcagttgcgtcatatccggcccttgcgatcagggcttgaggaacccgcgccatgaagtgcgtgtttgttaccgtagggaccaccagctttgacgacctcattgcgtgtgtgtcggcgcccgacagtctgcaaaaaatcgagagccttggttacaaccgacttatcctgcaaattggtagaggaacggtggtacctgaacccttcagtactgagtcgtttactctggatgtttacaggtacaaggattccttgaaagaagacattcagaaagcagatcttgttattagtcacgcaggtgcaggaagctgtttggagactctggaaaaaggaaagccactcgtagtggttataaacgaaaagttgatgaacaatcatcagctggaactggcaaagcagctacacaaagagggtcatctcttctattgtacctgcagcacgcttcctgggctgttacagtcaatggacttatcaacactgaaatgttatcctcctggccagccagaaaaattttctgcatttttggataaagttgttggattacaaaaataaacactaaactctcaacactttaaaagcaacccccaaattcaacctatgtaatgtgattaaatcaaattaaatacataatatatatttacaaaataatataattaataaacttcctacatctatagaatgtataggaaattttatgttgtgcacatttgcattgggtccaaatcctaattgcagtttagtgaaattactagatttttttctaatcttcagtatgtagtgagcattcacaggttttctcctagaatctcaagtggaattggaatcataaaaatgaatgagatttgaaaactttcacaaagattataaatgtagttagtttgatactccttagaataaaaaaatgaaacagtaacaacttttatgtaaaaaaattttacataagagttagcatctttagctttataatctaaggaaccaaatttaaaaaatgatggattatgctctgtgaaatgaaaagttcaatcattgcctaaaaaagatgatcaagttagttgatctcttgtacttggaaaagctacttttttcctaaagaacagagtggagtggatatattcactttttttttctaaaacatacaaagtgataaaataatcgtgcctaatgtcaaaactttactggtttgagaagaataatcaaaaaggacttataccaataggacttactattgttttttaaggatctcctctcacagtggtaatgaaacattaactgtaacagaaatttacaatttatgtgcttataaaattagttttatgaatgaacaataaactgatgcatataatggcttaaa

SEQ ID NO: 198783 - DNA, 498 bp, Artificial Sequence
  derived and/or modified sequence
atgaagtgcgtgttcgtgaccgtgggcaccaccagcttcgacgacctgatcgcctgcgtgagcgcccccgacagcctgcagaagatcgagagcctgggctacaacagactgatcctgcagatcggcagaggcaccgtggtgcccgagcccttcagcaccgagagcttcaccctggacgtgtacagatacaaggacagcctgaaggaggacatccagaaggccgacctggtgatcagccacgccggcgccggcagctgcctggagaccctggagaagggcaagcccctggtggtggtgatcaacgagaagctgatgaacaaccaccagctggagctggccaagcagctgcacaaggagggccacctgttctactgcacctgcagcaccctgcccggcctgctgcagagcatggacctgagcaccctgaagtgctacccccccggccagcccgagaagttcagcgccttcctggacaaggtggtgggcctgcagaagtag

SEQ ID NO: 198784 - protein, 259 aa, Artificial Sequence
  derived and/or modified sequence
MAASRLELNLVRLLSRCEAMAAEKRDPDEWRLEKYVGALEDMLQALKVHASKPASEVINEYSWKVDFLKGMLQAEKLTSSSEKALANQFLAPGRVPTTARERVPATKTVHLQSRARYTSEMRSELLGTDSAEPEMDVRKRTGVAGSQPVSEKQLAAELDLVLQRHQNLQEKLAEEMLGLARSLKTNTLAAQSVIKKDNQTLSHSLKMADQNLEKLKTESERLEQHTQKSVNWLLWAMLIIVCFIFISMILFIRIMPKLK

SEQ ID NO: 198785 - protein, 146 aa, Artificial Sequence
  derived and/or modified sequence
MAASRLELNLVRLLSRCEAMAAEKRDPDEWRLEKYVGALEDMLQALKVHASKPASEVINEYSWKVDFLKGMLQAEKLTSSSEKALANQFLAPGRVPTTARERVPATKTVHLQSRARYTSEMRSELLGTAEAEPEMDVRKRTPCHTH

SEQ ID NO: 198786 - protein, 259 aa, Artificial Sequence
  derived and/or modified sequence
MAASRLELNLVRLLSRCEAMAAEKRDPDEWRLEKYVGALEDMLQALKVHASKPASEVINEYSWKVDFLKGMLQAEKLTSSSEKALANQFLAPGRVPTTARERVPATKTVHLQSRARYTSEMRSELLGTAEAEPEMDVRKRTGVAGSQPVSEKQLAAELDLVLQRHQNLQEKLAEEMLGLARSLKTNTLAAQSVIKKDNQTLSHSLKMADQNLEKLKTESERLEQHTQKSVNWLLWAMLIIVCFIFISMILFIRIMPKLK

SEQ ID NO: 198787 - DNA, 877 bp, Artificial Sequence
  derived and/or modified sequence
gcacttccgccctctcttaacatggagccggcggaaggggtggtgtagggccgggcgataatggcggcgtcgaggctggagctaaacctggtgcggctgctatcccgctgcgaggcgatggcagcggagaaacgggacccggacgagtggcgcctggagaagtacgtgggagccctagaggacatgttgcaggccctgaaggtccacgcgagcaaaccggcctctgaggtgatcaatgaatattcctggaaggtggattttctgaaggggatgctgcaagccgagaagctgacctcctcctcagagaaagcactggccaaccagttcctggcccctggccgtgtgccaaccacagccagagagcgagtgcccgccacaaagacggtgcatctgcagtcacgggcgcggtacaccagcgagatgcggagtgagctactaggcacggactctgcagagcctgagatggacgtaaggaagagaactggagtggcagggtcccagccagtgagtgagaagcagtcggcagctgagctagacctcgtcctgcagcgacatcagaacctccaggaaaagctggcggaagagatgctaggactggcccggagcctcaagaccaataccctggccgcccagagtgtcatcaagaaggacaaccagaccctgtcacactcactgaaaatggcggaccagaacctggagaaactgaagacggagtcagagcgtctggagcagcacacgcagaagtcagtcaactggctgctctgggccatgctcattatcgtctgcttcatcttcattagcatgatcctcttcattcgaatcatgcctaaactcaaataaagacccccgcccacctaaaaaaaaaaaaaaaaaaaaa

SEQ ID NO: 198788 - DNA, 780 bp, Artificial Sequence
  derived and/or modified sequence
atggccgccagcagactggagctgaacctggtgagactgctgagcagatgcgaggccatggccgccgagaagagagaccccgacgagtggagactggagaagtacgtgggcgccctggaggacatgctgcaggccctgaaggtgcacgccagcaagcccgccagcgaggtgatcaacgagtacagctggaaggtggacttcctgaagggcatgctgcaggccgagaagctgaccagcagcagcgagaaggccctggccaaccagttcctggcccccggcagagtgcccaccaccgccagagagagagtgcccgccaccaagaccgtgcacctgcagagcagagccagatacaccagcgagatgagaagcgagctgctgggcaccgacagcgccgagcccgagatggacgtgagaaagagaaccggcgtggccggcagccagcccgtgagcgagaagcagctggccgccgagctggacctggtgctgcagagacaccagaacctgcaggagaagctggccgaggagatgctgggcctggccagaagcctgaagaccaacaccctggccgcccagagcgtgatcaagaaggacaaccagaccctgagccacagcctgaagatggccgaccagaacctggagaagctgaagaccgagagcgagagactggagcagcacacccagaagagcgtgaactggctgctgtgggccatgctgatcatcgtgtgcttcatcttcatcagcatgatcctgttcatcagaatcatgcccaagctgaagtag

SEQ ID NO: 198789 - DNA, 780 bp, Artificial Sequence
  derived and/or modified sequence
atggctgcctctcgcctggaactgaacctggtcaggctcctgagtcggtgtgaagccatggctgccgaaaagcgtgatcctgacgagtggcgattagaaaagtacgtaggcgctctggaggacatgctgcaagccctaaaagtacatgcatcaaagccggctagcgaagttattaatgagtactcctggaaggtggactttttgaagggcatgctgcaggccgagaagctgaccagcagctcggaaaaggcgctggccaaccaattcttggcccctggccgcgtccccactactgctcgtgaacgcgtccccgctacaaagactgtgcatctccaaagtcgtgcccgctatacatcagagatgcgatcagaactcctggggactgactccgccgagcctgaaatggatgttcggaaacggaccggggttgcggggtctcagcctgttagcgaaaagcaactcgcagcggaattagaccttgtattacagcgacaccagaacctccaggaaaaactggcggaagagatgttaggcctagctcgctccctgaagactaacaccctcgcagcacagtctgtgatcaaaaaggataatcagactctcagccactccttaaaaatggctgaccaaaatctagagaagctgaaaaccgagtccgaacggctggaacaacacacccagaaatccgtcaactggctcctctgggccatgttgatcatagtgtgctttatttttatcagtatgattctgttcattcggatcatgcctaagctcaagtag

SEQ ID NO: 198790 - DNA, 780 bp, Artificial Sequence
  derived and/or modified sequence
atggccgccagccggctggagctgaacctggtgcggctgctgagccgctgtgaggccatggctgctgagaagagggaccctgatgagtggaggctggagaagtatgtgggcgccctggaggacatgctgcaggccctgaaggtgcacgccagcaagccagccagcgaggtgatcaatgagtacagctggaaggtggacttcctgaagggcatgctgcaggccgagaagctgaccagcagcagcgagaaggccctggccaaccagttcctggcccctggccgggtgcccaccacagcccgggagcgggtgcctgccaccaagacagtgcacctgcagagccgggcccgctacaccagcgagatgaggtctgagctgctgggcacagacagcgctgagcctgagatggatgtgaggaagaggactggagtggccggcagccagcctgtgtctgagaagcagctggccgctgagctggacctggtgctgcagaggcaccagaacctgcaggagaagctggccgaggagatgctgggcctggcccggagcctgaagaccaacaccctggccgcccagagcgtcatcaagaaggacaaccagaccctgagccacagcctgaagatggctgaccagaacctggagaagctgaagacagaaagtgagcggctggagcagcacacccagaagtctgtgaactggctgctgtgggccatgctgatcatcgtgtgcttcatcttcatctccatgatcctcttcatccgcatcatgcccaagctgaagtag

SEQ ID NO: 198791 - DNA, 780 bp, Artificial Sequence
  derived and/or modified sequence
atggccgccagccggctggagctgaacctggtgcggctgctgagcaggtgcgaggcgatggccgccgagaaaagggaccccgatgaatggcgcctggagaagtacgtcggagcgcttgaggatatgctgcaggccctcaaagtgcatgccagcaaacctgccagcgaggtcattaacgaatacagctggaaagtggactttctcaaaggaatgctgcaggccgaaaagcttacatcaagttccgagaaggctctcgctaatcaatttctagctcccggtcgcgtgccaaccaccgcccgcgaacgagttccagccaccaagaccgtgcacttgcagagtagggcccgatatacttcggagatgaggtcggagctgcttggaacagatagcgcagagcctgagatggacgttagaaagaggaccggcgtggccgggagccagccggtatcagaaaaacagctggcagcagagctcgatcttgtactgcagcggcatcagaatctacaggaaaaattagccgaagagatgttggggctggcaaggtcgcttaaaaccaatacgctggcagctcagtcagtgataaagaaggataaccaaaccctgtcccatagcctgaagatggcagaccaaaacctggaaaaactgaaaaccgagtctgagcgacttgaacagcacacccagaagagcgtgaactggctgctgtgggctatgcttatcatcgtgtgcttcatcttcatttctatgatcctgttcataagaatcatgccgaaactgaagtag

SEQ ID NO: 198792 - DNA, 780 bp, Artificial Sequence
  derived and/or modified sequence
atggctgctagtcgcctggagctaaacctggtgcggttgttgagcaggtgtgaggccatggcggctgaaaagagggaccccgacgagtggaggctggaaaaatatgtgggcgctctggaagacatgcttcaggcactgaaggtgcatgctagtaagcctgcttctgaagtgatcaatgagtactcttggaaggttgatttcttgaagggtatgctgcaagccgaaaagctgacaagctctagcgagaaggccctcgccaatcaatttcttgcccctggcagagtgccgaccacagccagagagagggttcctgccacaaagactgttcatctgcaatcaagagccaggtatacaagcgagatgcggtccgagctgttgggaaccgacagcgccgagcccgaaatggatgtgcgcaagagaacaggagtcgctggctcccaacccgtcagcgagaaacagctggccgcagagttagatttagtgctgcagcggcatcagaacctgcaggagaaactggccgaggagatgctgggcctggccaggtcactcaagacgaataccctcgctgcccagtctgtcatcaagaaggacaaccagactttatcccattcactcaaaatggcagatcaaaatctagagaagctgaaaaccgagagcgaaagactcgaacagcatactcaaaagtcggtgaattggttgctgtgggccatgctgatcatagtgtgcttcatcttcatctccatgatcctcttcattcggatcatgcccaagctcaaatag

SEQ ID NO: 198793 - DNA, 856 bp, Artificial Sequence
  derived and/or modified sequence
gcacttccgccctctcttaacatggagccggcggaaggggtggtgtagggccgggcgataatggcggcgtcgaggctggagctaaacctggtgcggctgctatcccgctgcgaggcgatggcagcggagaaacgggacccggacgagtggcgcctggagaagtacgtgggagccctagaggacatgttgcaggccctgaaggtccacgcgagcaaaccggcctctgaggtgatcaatgaatattcctggaaggtggattttctgaaggggatgctgcaagccgagaagctgacctcctcctcagagaaagcactggccaaccagttcctggcccctggccgtgtgccaaccacagccagagagcgagtgcccgccacaaagacggtgcatctgcagtcacgggcgcggtacaccagcgagatgcggagtgagctactaggcacggactctgcagagcctgagatggacgtaaggaagagaactggagtggcagggtcccagccagtgagtgagaagcagttggcagctgagctagacctcgtcctgcagcgacatcagaacctccaggaaaagctggcggaagagatgctaggactggcccggagcctcaagaccaataccctggccgcccagagtgtcatcaagaaggacaaccagaccctgtcacactcactgaaaatggcggaccagaacctggagaaactgaagacggagtcagagcgtctggagcagcacacgcagaagtcagtcaactggctgctctgggccatgctcattatcgtctgcttcatcttcattagcatgatcctcttcattcgaatcatgcctaaactcaaataaagacccccgcccacct

SEQ ID NO: 198794 - DNA, 441 bp, Artificial Sequence
  derived and/or modified sequence
atggccgccagcagactggagctgaacctggtgagactgctgagcagatgcgaggccatggccgccgagaagagagaccccgacgagtggagactggagaagtacgtgggcgccctggaggacatgctgcaggccctgaaggtgcacgccagcaagcccgccagcgaggtgatcaacgagtacagctggaaggtggacttcctgaagggcatgctgcaggccgagaagctgaccagcagcagcgagaaggccctggccaaccagttcctggcccccggcagagtgcccaccaccgccagagagagagtgcccgccaccaagaccgtgcacctgcagagcagagccagatacaccagcgagatgagaagcgagctgctgggcaccgccgaggccgagcccgagatggacgtgagaaagagaaccccctgccacacccactag

SEQ ID NO: 198795 - DNA, 780 bp, Artificial Sequence
  derived and/or modified sequence
atggccgccagcagactggagctgaacctggtgagactgctgagcagatgcgaggccatggccgccgagaagagagaccccgacgagtggagactggagaagtacgtgggcgccctggaggacatgctgcaggccctgaaggtgcacgccagcaagcccgccagcgaggtgatcaacgagtacagctggaaggtggacttcctgaagggcatgctgcaggccgagaagctgaccagcagcagcgagaaggccctggccaaccagttcctggcccccggcagagtgcccaccaccgccagagagagagtgcccgccaccaagaccgtgcacctgcagagcagagccagatacaccagcgagatgagaagcgagctgctgggcaccgccgaggccgagcccgagatggacgtgagaaagagaaccggcgtggccggcagccagcccgtgagcgagaagcagctggccgccgagctggacctggtgctgcagagacaccagaacctgcaggagaagctggccgaggagatgctgggcctggccagaagcctgaagaccaacaccctggccgcccagagcgtgatcaagaaggacaaccagaccctgagccacagcctgaagatggccgaccagaacctggagaagctgaagaccgagagcgagagactggagcagcacacccagaagagcgtgaactggctgctgtgggccatgctgatcatcgtgtgcttcatcttcatcagcatgatcctgttcatcagaatcatgcccaagctgaagtag

SEQ ID NO: 198796 - DNA, 441 bp, Artificial Sequence
  derived and/or modified sequence
atggctgcaagccgactggagttaaacctcgtgcggctcctgtctagatgcgaagccatggcagccgaaaagcgcgaccctgatgaatggagactggagaagtatgtgggggcactggaggacatgctgcaggccttaaaggtgcacgcgtctaagccggcatccgaggtgattaacgagtactcctggaaggtcgacttccttaaaggcatgcttcaagccgagaaactgacctctagcagtgagaaggctttagccaatcagttcttggcccccggccgtgtccctacgacagccagggaaagggtgcctgccactaaaactgtgcatcttcagtcaagagctaggtatacatccgagatgcggtcggaactcctgggaaccgcagaagctgagcctgagatggacgtgcggaaaagaactccttgtcatacccattag

SEQ ID NO: 198797 - DNA, 780 bp, Artificial Sequence
  derived and/or modified sequence
atggccgcctccaggctcgagttgaaccttgtacggctgttgtcacgctgtgaggctatggctgctgaaaagagggaccctgacgagtggagactcgaaaagtatgtcggggcactggaagacatgctacaagcactaaaggtccacgcatctaaaccggcctcagaggtcattaacgaatattcctggaaagtcgacttcctgaaagggatgctccaggctgagaagctgacctcatcaagcgagaaggccctcgcaaatcagttcttggccccaggcagagtccctaccaccgctcgggagcgcgttcccgctaccaaaacagtgcatctgcagagccgcgcgcggtacactagcgaaatgcgctccgaactcctgggtacagccgaggcggagcccgagatggatgtcagaaaacgtaccggagttgctggaagccagcctgtgtccgagaagcaactggccgccgagctggatctggtcctgcaaagacatcagaatcttcaggagaagctggccgaggagatgttggggcttgcccgatcattaaagacaaataccctggcggcccaatctgttatcaagaaggataaccagaccctcagccattccctgaaaatggccgaccagaatctggaaaaactgaagaccgagagcgagaggctggagcaacacacccagaaaagcgtgaattggctgctctgggccatgcttataattgtttgcttcatctttattagcatgatcctgttcattcggataatgcccaagttgaagtag

SEQ ID NO: 198798 - DNA, 441 bp, Artificial Sequence
  derived and/or modified sequence
atggccgccagccggctggagctgaacctggtgcggctgctgagccgctgtgaggccatggctgctgagaagagggaccctgatgagtggaggctggagaagtatgtgggcgccctggaggacatgctgcaggccctgaaggtgcacgccagcaagccagccagcgaggtgatcaatgagtacagctggaaggtggacttcctgaagggcatgctgcaggccgagaagctgaccagcagcagcgagaaggccctggccaaccagttcctggcccctggccgggtgcccaccacagcccgggagcgggtgcctgccaccaagacagtgcacctgcagagccgggcccgctacaccagcgagatgaggtctgagctgctgggcacagctgaggccgagcctgagatggatgtgaggaagaggaccccctgccacacccactag

SEQ ID NO: 198799 - DNA, 780 bp, Artificial Sequence
  derived and/or modified sequence
atggccgccagccggctggagctgaacctggtgcggctgctgagccgctgtgaggccatggctgctgagaagagggaccctgatgagtggaggctggagaagtatgtgggcgccctggaggacatgctgcaggccctgaaggtgcacgccagcaagccagccagcgaggtgatcaatgagtacagctggaaggtggacttcctgaagggcatgctgcaggccgagaagctgaccagcagcagcgagaaggccctggccaaccagttcctggcccctggccgggtgcccaccacagcccgggagcgggtgcctgccaccaagacagtgcacctgcagagccgggcccgctacaccagcgagatgaggtctgagctgctgggcacagctgaggccgagcctgagatggatgtgaggaagaggactggagtggccggcagccagcctgtgtctgagaagcagctggccgctgagctggacctggtgctgcagaggcaccagaacctgcaggagaagctggccgaggagatgctgggcctggcccggagcctgaagaccaacaccctggccgcccagagcgtcatcaagaaggacaaccagaccctgagccacagcctgaagatggctgaccagaacctggagaagctgaagacagaaagtgagcggctggagcagcacacccagaagtctgtgaactggctgctgtgggccatgctgatcatcgtgtgcttcatcttcatctccatgatcctcttcatccgcatcatgcccaagctgaagtag

SEQ ID NO: 198800 - DNA, 441 bp, Artificial Sequence
  derived and/or modified sequence
atggccgccagccggctggagctgaacctggtgcggctgctgagcagatgtgaggcaatggccgctgagaagagagaccccgacgagtggcggctggagaaatacgtcggcgcactggaagacatgttacaggccctgaaggtccatgcctctaagcccgcttcagaagttatcaacgagtattcttggaaggtggacttcctaaagggaatgttgcaggctgagaagctaacgtcttcgtccgagaaggcactggctaaccagttcctcgcccccggcagagtgcctaccacagctcgtgaaagagttcccgccacaaagaccgtccacctgcagtcgagagcgcgctatacaagtgaaatgagatctgaactgctcgggacagctgaggccgaacctgagatggacgtcagaaaacgcacgccttgtcatactcactag

SEQ ID NO: 198801 - DNA, 780 bp, Artificial Sequence
  derived and/or modified sequence
atggccgccagccggctggagctgaacctggtgcggctgctgagccgctgtgaagcaatggctgccgagaaacgtgaccccgatgagtggcgcctggaaaagtacgttggcgccttggaggatatgctgcaggccctgaaggtccatgcgagtaaacccgcctccgaggtcattaatgagtatagttggaaggttgatttcctcaaggggatgctccaagcagaaaaattgacatcctccagcgagaaggctctggctaaccagtttctcgctccggggcgggtgccaacgaccgccagagagcgggtacccgcgaccaagactgtacacctgcagagtcgagccaggtacaccagcgagatgcgatctgagttacttggcactgccgaagcagaaccagagatggacgtcagaaaacgcacaggcgttgctggctctcaaccagtctctgagaagcagctggcagccgagcttgacctggtcctgcaaagacaccaaaacctacaggagaagttggctgaggaaatgctaggactggccagatcactcaaaacgaatacgctggccgcccagagcgtcattaagaaggataaccagactttatcccacagcttgaaaatggcagaccagaaccttgagaaattgaaaacggagtccgagcgcctggagcaacacacccagaagtctgtaaactggctgctgtgggccatgcttatcatagtatgttttatatttatttcaatgatcttgtttatccgtataatgccaaagctgaaatag

SEQ ID NO: 198802 - DNA, 441 bp, Artificial Sequence
  derived and/or modified sequence
atggccgcttcccggctcgaattgaacctggtgcgtctgctgagccgttgcgaagctatggcagccgaaaaaagagatcccgacgagtggagactagagaagtatgttggcgctctggaggacatgcttcaggctctcaaggtgcacgcatcgaagcccgcaagtgaggtaatcaatgaatattcctggaaggttgacttcctcaaagggatgctgcaggccgagaagttgacctcaagcagtgaaaaggcactcgccaatcaatttctcgctccgggtagagttcccacgactgccagggaacgggtacccgcaactaagacagtccacctgcagagccgcgctcggtacacatccgagatgcgttccgaactcttaggaacagcagaggctgagcctgaaatggatgtgcgcaagcggaccccctgtcatacacactag

SEQ ID NO: 198803 - DNA, 780 bp, Artificial Sequence
  derived and/or modified sequence
atggctgctagcagacttgagctgaacctcgttaggttactgtctcggtgcgaggccatggccgctgaaaaacgggatccagatgaatggagactggaaaagtacgtaggggctcttgaggatatgctgcaggcgctgaaggtccacgcttcaaaacccgctagcgaggttattaacgaatacagctggaaagtagacttcctcaaggggatgttacaggccgagaagctgacaagttcttccgagaaagccctggccaaccaatttctagcccctggtagagtgcctacaaccgcccgagaaagagtgcccgctacaaaaaccgtccatttacaatcacgagctcggtacaccagcgagatgcgaagcgaactgctaggcactgcagaggctgagccagagatggacgtgagaaaaaggacgggcgtcgcaggcagtcagccggtgtcagagaagcagctcgcagccgaactagacctcgtcttgcaacggcaccagaacttgcaggagaaattggcggaagagatgctagggctggccaggtcgttaaagactaatactctcgccgcacagagcgtgataaagaaggataaccagacattgtcccatagtctcaagatggcggaccagaaccttgagaagcttaagaccgagtcagaaagattagagcagcacactcagaagtctgtcaattggctcctttgggcaatgctcattattgtgtgcttcatattcatctcgatgattctgttcatcaggataatgccgaaactgaagtag

SEQ ID NO: 198804 - DNA, 629 bp, Artificial Sequence
  derived and/or modified sequence
gggcgataatggcggcgtcgaggctggagctaaacctggtgcggctgctatcccgctgcgaggcgatggcagcggagaaacgggacccggacgagtggcgcctggagaagtacgtgggagccctagaggacatgttgcaggccctgaaggtccacgcgagcaaaccggcctctgaggtgatcaatgaatattcctggaaggtggattttctgaaggggatgctgcaagccgagaagctgacctcctcctcagagaaagcactggccaaccagttcctggcccctggccgtgtgccaaccacagccagagagcgagtgcccgccacaaagacggtgcatctgcagtcacgggcgcggtacaccagcgagatgcggagtgagctactaggcacggctgaggcagagcctgagatggacgtaaggaagagaacaccctgtcacactcactgaaaatggcggaccagaacctggagaaactgaagacggagtcagagcgtctggagcagcacacgcagaagtcagtcaactggctgctctgggccatgctcattatcgtctgcttcatcttcattagcatgatcctcttcattcgaatcatgcctaaactcaaataaagacccccgcccacct

SEQ ID NO: 198805 - DNA, 856 bp, Artificial Sequence
  derived and/or modified sequence
gcacttccgccctctcttaacatggagccggcggaaggggtggtgtagggccgggcgataatggcggcgtcgaggctggagctaaacctggtgcggctgctatcccgctgcgaggcgatggcagcggagaaacgggacccggacgagtggcgcctggagaagtacgtgggagccctagaggacatgttgcaggccctgaaggtccacgcgagcaaaccggcctctgaggtgatcaatgaatattcctggaaggtggattttctgaaggggatgctgcaagccgagaagctgacctcctcctcagagaaagcactggccaaccagttcctggcccctggccgtgtgccaaccacagccagagagcgagtgcccgccacaaagacggtgcatctgcagtcacgggcgcggtacaccagcgagatgcggagtgagctactaggcacggctgaggcagagcctgagatggacgtaaggaagagaactggagtggcagggtcccagccagtgagtgagaagcagttggcagctgagctagacctcgtcctgcagcgacatcagaacctccaggaaaagctggcggaagagatgctaggactggcccggagcctcaagaccaataccctggccgcccagagtgtcatcaagaaggacaaccagaccctgtcacactcactgaaaatggcggaccagaacctggagaaactgaagacggagtcagagcgtctggagcagcacacgcagaagtcagtcaactggctgctctgggccatgctcattatcgtctgcttcatcttcattagcatgatcctcttcattcgaatcatgcctaaactcaaataaagacccccgcccacct

SEQ ID NO: 198806 - protein, 426 aa, Artificial Sequence
  derived and/or modified sequence
MPPKKQAQAGGSKKAEQKKKEKIIEDKTFGLKNKKGAKQQKFIKAVTHQVKFGQQNPRQVAQSEAEKKLKKDDKKKELQELNELFKPVVAAQKISKGADPKSVVCAFFKQGQCTKGDKCKFSHDLTLERKCEKRSVYIDARDEELEKDTMDNWDEKKLEEVVNKKHGEAEKKKPKTQIVCKHFLEAIENNKYGWFWVCPGGGDICMYRHALPPGFVLKKDKKKEEKEDEISLEDLIERERSALGPNVTKITLESFLAWKKRKRQEKIDKLEQDMERRKADFKAGKALVISGREVFEFRPELVNDDDEEADDTRYTQGTGGDEVDDSVSVNDIDLSLYIPRDVDETGITVASLERFSTYTSDKDENKLSEASGGRAENGERSDLEEDNEREGTENGAIDAVPVDENLFTGEDLDELEEELNTLDLEE

SEQ ID NO: 198807 - protein, 392 aa, Artificial Sequence
  derived and/or modified sequence
MPPKKQAQAGGSKKAEQKKKEKIIEDKTFGLKNKKGAKQQKFIKAVTHQVKFGQQNPRQVAQSEAEKKLKKDDKKKELQELNELFKPVVAAQKISKGADPKSVVCAFFKQGQCTKGDKCKFSHDLTLERKCEKRSVYIDARDEELEKDTMDNWDEKKLEEVVNKKHGEAEKKKPKTQIVCKHFLEAIENNKYGWFWVCPGGGDICMYRHALPPGFVLKKDKKKEEKEDEISLEDLIERERSALGPNVTKITLESFLAWKKRKRQEKIDKLEQDMERRKADFKAGKALVISGREVFEFRPELVNDDDEEADDTRYTQGTGGDEVDDSVSVNDIDLSLYIPRDVDETGITVASLERFSTYTSDKDENKLSEASGGRAENGERSDLEEDNERHVL

SEQ ID NO: 198808 - protein, 74 aa, Artificial Sequence [sequence omitted]

SEQ ID NO: 198809 - DNA, 1281 bp, Artificial Sequence
  derived and/or modified sequence
atgccccccaagaagcaggcccaggccggcggcagcaagaaggccgagcagaagaagaaggagaagatcatcgaggacaagaccttcggcctgaagaacaagaagggcgccaagcagcagaagttcatcaaggccgtgacccaccaggtgaagttcggccagcagaaccccagacaggtggcccagagcgaggccgagaagaagctgaagaaggacgacaagaagaaggagctgcaggagctgaacgagctgttcaagcccgtggtggccgcccagaagatcagcaagggcgccgaccccaagagcgtggtgtgcgccttcttcaagcagggccagtgcaccaagggcgacaagtgcaagttcagccacgacctgaccctggagagaaagtgcgagaagagaagcgtgtacatcgacgccagagacgaggagctggagaaggacaccatggacaactgggacgagaagaagctggaggaggtggtgaacaagaagcacggcgaggccgagaagaagaagcccaagacccagatcgtgtgcaagcacttcctggaggccatcgagaacaacaagtacggctggttctgggtgtgccccggcggcggcgacatctgcatgtacagacacgccctgccccccggcttcgtgctgaagaaggacaagaagaaggaggagaaggaggacgagatcagcctggaggacctgatcgagagagagagaagcgccctgggccccaacgtgaccaagatcaccctggagagcttcctggcctggaagaagagaaagagacaggagaagatcgacaagctggagcaggacatggagagaagaaaggccgacttcaaggccggcaaggccctggtgatcagcggcagagaggtgttcgagttcagacccgagctggtgaacgacgacgacgaggaggccgacgacaccagatacacccagggcaccggcggcgacgaggtggacgacagcgtgagcgtgaacgacatcgacctgagcctgtacatccccagagacgtggacgagaccggcatcaccgtggccagcctggagagattcagcacctacaccagcgacaaggacgagaacaagctgagcgaggccagcggcggcagagccgagaacggcgagagaagcgacctggaggaggacaacgagagagagggcaccgagaacggcgccatcgacgccgtgcccgtggacgagaacctgttcaccggcgaggacctggacgagctggaggaggagctgaacaccctggacctggaggagtag

SEQ ID NO: 198810 - DNA, 1179 bp, Artificial Sequence
  derived and/or modified sequence
atgccccccaagaagcaggcccaggccggcggcagcaagaaggccgagcagaagaagaaggagaagatcatcgaggacaagaccttcggcctgaagaacaagaagggcgccaagcagcagaagttcatcaaggccgtgacccaccaggtgaagttcggccagcagaaccccagacaggtggcccagagcgaggccgagaagaagctgaagaaggacgacaagaagaaggagctgcaggagctgaacgagctgttcaagcccgtggtggccgcccagaagatcagcaagggcgccgaccccaagagcgtggtgtgcgccttcttcaagcagggccagtgcaccaagggcgacaagtgcaagttcagccacgacctgaccctggagagaaagtgcgagaagagaagcgtgtacatcgacgccagagacgaggagctggagaaggacaccatggacaactgggacgagaagaagctggaggaggtggtgaacaagaagcacggcgaggccgagaagaagaagcccaagacccagatcgtgtgcaagcacttcctggaggccatcgagaacaacaagtacggctggttctgggtgtgccccggcggcggcgacatctgcatgtacagacacgccctgccccccggcttcgtgctgaagaaggacaagaagaaggaggagaaggaggacgagatcagcctggaggacctgatcgagagagagagaagcgccctgggccccaacgtgaccaagatcaccctggagagcttcctggcctggaagaagagaaagagacaggagaagatcgacaagctggagcaggacatggagagaagaaaggccgacttcaaggccggcaaggccctggtgatcagcggcagagaggtgttcgagttcagacccgagctggtgaacgacgacgacgaggaggccgacgacaccagatacacccagggcaccggcggcgacgaggtggacgacagcgtgagcgtgaacgacatcgacctgagcctgtacatccccagagacgtggacgagaccggcatcaccgtggccagcctggagagattcagcacctacaccagcgacaaggacgagaacaagctgagcgaggccagcggcggcagagccgagaacggcgagagaagcgacctggaggaggacaacgagagacacgtgctgtag

SEQ ID NO: 198811 - DNA, 489 bp, Artificial Sequence
  derived and/or modified sequence
atgtacagacacgccctgccccccggcttcgtgctgaagaaggacaagaagaaggaggagaaggaggacgagatcagcctggaggacctgatcgagagagagagaagcgccctgggccccaacgtgaccaagatcaccctggagagcttcctggcctggaagaagagaaagagacaggagaagatcgacaagctggagcaggacatggagagaagaaaggccgacttcaaggccggcaaggccctggtgatcagcggcagagaggtgttcgagttcagacccgagctggtgaacgacgacgacgaggaggccgacgacaccagatacacccagggcaccggcggcgacgaggtgagaggcagcttcgtgccccacctgctgatgctgatcgagagaaacaacagaaagtaccacaacatggtgaagagccaccagcaccagagccacagcgcctgggtgcagatcctgacccccaccatgggcaactag

SEQ ID NO: 198812 - DNA, 1281 bp, Artificial Sequence
  derived and/or modified sequence
atgccaccaaagaagcaagctcaggctggcggcagtaagaaggcagagcagaaaaagaaagaaaaaatcattgaagataagaccttcgggctcaagaacaagaagggtgctaaacaacagaagtttattaaagcggtgacgcatcaggtgaagttcggtcagcaaaacccccgtcaagtcgcccagagcgaggcggaaaagaagttaaaaaaagatgacaagaaaaaggaactgcaggagttgaacgagctattcaaacccgtggtggccgcacagaaaataagcaaaggcgcagatcctaaatcagtggtttgcgccttttttaagcagggccaatgcacaaaaggcgacaaatgcaaattttcgcacgacctgacacttgagcgtaagtgcgagaaacggtccgtttatattgacgcgcgcgacgaagagctcgaaaaagacacaatggacaactgggacgagaagaagcttgaagaagtagtaaataaaaagcatggcgaggccgagaagaagaagcccaaaacccagatagtatgtaaacatttcttagaagccattgagaataataagtatggatggttttgggtgtgcccgggtggtggagacatctgtatgtaccggcatgctttgccacctggattcgttctgaagaaggataagaaaaaggaagaaaaggaggacgagatctcacttgaagacctgatagaaagggaaagatccgccctgggacctaatgtgactaaaataacgctggagtctttcctagcctggaagaaaagaaagcggcaggagaagatcgataaactcgaacaggacatggaaaggaggaaggccgactttaaggcaggtaaagcactagtgatttccggcagggaggtgttcgagtttaggccagaactggtcaacgacgatgacgaggaagccgatgacaccaggtacactcagggcactggtggcgatgaggtggatgacagtgtgagcgtgaatgatattgatctctctttatatattcctcgggatgtggacgagactggtattacagtggcttctttagaacgcttcagcacttatacgtccgacaaagacgagaataaactgtcggaggcatccggaggtagagcggaaaacggggagagatcagatctggaagaggacaacgaacgggagggaacagagaatggggccattgatgcagtcccagtggatgaaaacctttttactggagaggatctcgatgagctggaggaagagctgaataccctggacctggaggaatag

SEQ ID NO: 198813 - DNA, 1179 bp, Artificial Sequence
  derived and/or modified sequence
atgccgcctaaaaaacaagcccaggccggcggttctaaaaaagcggaacagaagaagaaagaaaaaattatcgaagataaaacctttggcttgaaaaacaaaaagggagccaaacaacagaagttcatcaaggctgttactcatcaggtgaaatttggacagcaaaatccacgccaggtcgcccagtccgaagccgagaaaaagctcaaaaaagatgataagaagaaggaactgcaggaactgaacgagttgttcaagcccgttgtggcggcccagaagattagtaaaggagcagatcccaaatccgtcgtctgcgcctttttcaaacaagggcagtgtactaagggcgacaaatgcaaattttcgcacgacctcaccctggagcggaagtgtgagaaacgatcggtgtatatcgatgcccgcgatgaagagttagagaaggatacaatggataactgggatgaaaaaaaactcgaggaagtggtcaataaaaaacacggcgaggccgagaaaaaaaagcctaaaacccaaattgtctgcaaacattttcttgaggcaattgaaaacaataagtacggctggttttgggtctgtcctgggggtggtgacatatgtatgtaccggcatgccctgcctccaggattcgtgctcaagaaggacaagaaaaaagaagagaaggaggacgagatctccctagaggatttgatcgagcgcgagaggtctgcccttggtccgaacgttaccaagatcacgttggaaagtttcctagcgtggaaaaaacgcaaacggcaggagaaaattgacaaactggaacaagatatggaaagacgtaaggccgattttaaggccgggaaggcattagtcatcagcgggcgcgaagtgtttgagttcaggcctgagttagttaacgatgacgacgaggaagcggatgacacacgatacacgcagggcaccggaggagacgaggtcgacgatagcgtgtcagtcaatgacattgatctgtctctgtacattccaagagacgtcgacgagacaggtattactgttgcgagcctggagagattctcgacatacacttccgacaaagatgagaacaagctgtcagaagcttccggagggagagcagaaaatggagagagaagcgaccttgaggaggacaatgagcggcacgttctctag

SEQ ID NO: 198814 - DNA, 489 bp, Artificial Sequence
  derived and/or modified sequence
atgtacaggcacgccctgccacccggtttcgtactcaagaaagataagaaaaaggaagaaaaagaagacgaaataagtttagaagatctgatcgagagggaaaggagtgccctgggacctaacgtgacaaagataacgctggagtcattcttggcctggaagaagcgcaaacgtcaggaaaaaatcgacaagctggagcaggacatggaacggaggaaagccgacttcaaagccggtaaggctttggtgatatcaggccgggaagtgtttgaatttagacccgagctggtgaatgacgacgatgaagaggctgacgacacaagatatacccagggcactggtggcgacgaagtcagaggttcattcgttccccaccttctgatgttaatcgaacggaacaacagaaaataccacaatatggtgaagtctcatcaacatcagtcccattccgcctgggtgcagatactgactcctactatggggaattag

SEQ ID NO: 198815 - DNA, 1281 bp, Artificial Sequence
  derived and/or modified sequence
atgccacccaagaagcaggcccaggccggcggcagcaagaaggccgagcagaagaagaaggagaagatcatcgaggacaagaccttcggcctgaagaacaagaagggggccaagcagcagaagttcatcaaggctgtgacccaccaggtgaagtttggccagcagaacccccggcaggtggcccagagcgaggccgagaagaagctgaagaaggatgacaagaagaaggagctgcaggagctgaatgagctgttcaagcctgtggtggccgcccagaagatcagcaaaggagctgaccccaagtctgtggtgtgtgccttcttcaagcagggccagtgcaccaagggggacaagtgcaagttcagccatgacctgaccctggagaggaaatgtgagaagaggtctgtgtacattgatgccagagatgaggagctggagaaggacaccatggacaactgggatgagaagaagctggaggaggtggtgaacaagaagcacggggaggccgagaagaagaagcccaagacccagatcgtgtgcaagcacttcctggaggccatcgagaacaacaagtatggctggttctgggtgtgccctgggggcggggacatctgcatgtacagacatgccctgcccccaggctttgtgctgaagaaggacaagaagaaggaggagaaggaggatgagatcagcctggaggacctgattgaaagagagaggtctgccctgggccccaacgtgaccaagatcaccctggagagcttcctggcctggaagaagaggaagaggcaggagaagattgacaagctggagcaggacatggagaggaggaaggctgacttcaaggccggcaaggccctggtgatcagcggccgggaggtgtttgagttccggcctgagctggtgaatgatgatgatgaggaggctgatgacacccgctacacccagggcactggaggagatgaggtggatgacagcgtgtctgtgaatgacatcgacctgagcctgtacatccccagagatgtggatgaaacaggcatcaccgtggccagcctggagcgcttcagcacctacaccagtgacaaggatgagaacaagctgtctgaggccagcggcggccgggcagaaaatggagagaggagtgacctggaggaggacaatgaaagagagggcacagaaaatggagccattgatgctgtgcctgtggatgagaacctcttcaccggggaggacctggatgagctggaggaggagctgaacaccctggacctggaggagtag

SEQ ID NO: 198816 - DNA, 1179 bp, Artificial Sequence
  derived and/or modified sequence
atgccacccaagaagcaggcccaggccggcggcagcaagaaggccgagcagaagaagaaggagaagatcatcgaggacaagaccttcggcctgaagaacaagaagggggccaagcagcagaagttcatcaaggctgtgacccaccaggtgaagtttggccagcagaacccccggcaggtggcccagagcgaggccgagaagaagctgaagaaggatgacaagaagaaggagctgcaggagctgaatgagctgttcaagcctgtggtggccgcccagaagatcagcaaaggagctgaccccaagtctgtggtgtgtgccttcttcaagcagggccagtgcaccaagggggacaagtgcaagttcagccatgacctgaccctggagaggaaatgtgagaagaggtctgtgtacattgatgccagagatgaggagctggagaaggacaccatggacaactgggatgagaagaagctggaggaggtggtgaacaagaagcacggggaggccgagaagaagaagcccaagacccagatcgtgtgcaagcacttcctggaggccatcgagaacaacaagtatggctggttctgggtgtgccctgggggcggggacatctgcatgtacagacatgccctgcccccaggctttgtgctgaagaaggacaagaagaaggaggagaaggaggatgagatcagcctggaggacctgattgaaagagagaggtctgccctgggccccaacgtgaccaagatcaccctggagagcttcctggcctggaagaagaggaagaggcaggagaagattgacaagctggagcaggacatggagaggaggaaggctgacttcaaggccggcaaggccctggtgatcagcggccgggaggtgtttgagttccggcctgagctggtgaatgatgatgatgaggaggctgatgacacccgctacacccagggcactggaggagatgaggtggatgacagcgtgtctgtgaatgacatcgacctgagcctgtacatccccagagatgtggatgaaacaggcatcaccgtggccagcctggagcgcttcagcacctacaccagtgacaaggatgagaacaagctgtctgaggccagcggcggccgggcagaaaatggagagaggagtgacctggaggaggacaatgaaagacatgtgctgtag

SEQ ID NO: 198817 - DNA, 489 bp, Artificial Sequence
  derived and/or modified sequence
atgtacagacatgccctgcccccaggctttgtgctgaagaaggacaagaagaaggaggagaaggaggatgagatcagcctggaggacctgattgagcgggagaggtctgccctgggccccaacgtgaccaagatcaccctggagagcttcctggcctggaagaagaggaagaggcaggagaagattgacaagctggagcaggacatggagaggaggaaggctgacttcaaggccggcaaggccctggtgatcagcggccgggaggtgtttgagttccggcctgagctggtgaatgatgatgatgaggaggctgatgacacccgctacacccagggcactggaggagatgaggtgcggggcagctttgtgccccacctgctgatgctgattgaaagaaacaacaggaagtaccacaacatggtgaagagccaccagcaccagagccacagcgcctgggtgcagatcctgacccccaccatgggcaactag

SEQ ID NO: 198818 - DNA, 1281 bp, Artificial Sequence
  derived and/or modified sequence
atgccccccaagaagcaggcccaggccggcggcagcaagaaggccgagcagaaaaagaaagaaaagattatcgaagacaagactttcggcctgaagaataaaaagggcgccaaacagcagaagtttatcaaggcagttacccatcaggtgaagtttgggcagcagaacccacgccaagtcgcacagtccgaagcggaaaaaaagctgaagaaagatgacaagaaaaaagaactccaggaactcaacgagctatttaagcctgtcgtcgccgctcagaagatctctaagggcgcggaccctaaatccgttgtctgtgcgtttttcaagcagggccaatgcacaaagggcgataaatgcaagttctctcatgatctcacactcgaacgaaagtgcgagaagcggagtgtgtatatcgacgcccgtgacgaagagctggagaaagacacgatggataactgggacgagaagaagcttgaggaagttgtcaataagaaacacggggaggcggagaaaaagaagcccaaaactcagatcgtgtgcaagcattttctggaggccattgaaaataacaaatatggatggttctgggtgtgccctggtgggggcgatatttgtatgtataggcatgccttgcctcctggctttgtgcttaagaaagataaaaagaaggaagagaaggaagacgaaatctcgcttgaagaccttatcgagcgggagaggagtgctctgggtcccaatgttaccaagattacactggagtctttcctggcctggaaaaagcggaagcggcaagaaaaaattgacaagctagaacaagacatggaacgcaggaaggctgacttcaaggcggggaaagccctggtgataagtggccgcgaggtgttcgagtttagacccgagctcgtcaacgatgacgatgaggaagccgacgacacacgatacacacagggtactggaggggatgaagtcgatgactcagtgtccgttaatgacattgacctgagcctgtacatacccagggacgtggatgaaaccgggattaccgtggcatccctcgagcgattctcaacctacacctctgataaggacgagaacaagctaagcgaggccagcggcggcagggccgagaatggagaacggtcggatttagaggaagacaacgaacgggagggtacggaaaatggagcgattgatgcagtgccagtggatgagaatctttttacaggagaggatctggacgagctggaagaggaacttaatacgctcgatttggaggagtag

SEQ ID NO: 198819 - DNA, 1179 bp, Artificial Sequence
  derived and/or modified sequence
atgccccccaagaagcaggcccaggccggcggcagcaagaaggccgaacagaagaaaaaagagaaaataatcgaggacaaaacattcggcttgaaaaataagaaaggggccaaacagcagaaattcatcaaagcggtgactcaccaggttaagttcggccagcagaatcctagacaggtggcccagtcagaggctgaaaaaaagctgaaaaaagacgacaagaagaaagagctgcaggaactgaacgagctgttcaaacccgttgtagcagcccaaaaaatttccaagggtgccgaccccaagagcgtggtttgtgcgtttttcaagcagggacagtgtaccaagggagacaagtgcaaattctcccatgacctaacacttgagcgcaaatgcgaaaaaaggtcagtgtatattgatgctcgggacgaagagctggagaaggatactatggacaattgggacgaaaagaaactggaggaggtggtcaacaagaagcacggagaggccgagaaaaagaagcctaaaactcagatcgtgtgtaagcacttcttggaagcaatcgagaataacaagtacggatggttctgggtatgtcccggcggaggcgatatttgtatgtacagacatgccctgccccctgggtttgtgctgaagaaggataaaaaaaaagaagagaaggaggacgagatctcactggaagatctgatcgagagagagcggagcgcgctcggtcccaacgtaaccaaaatcacgctggagagtttccttgcttggaagaaaagaaaaaggcaggaaaaaatcgataaacttgagcaggacatggagcggcgcaaggcagacttcaaggctgggaaagccctggtgatctctggcagggaagtgttcgaattccgtcctgagttggttaacgatgacgacgaggaggctgatgatactcgatacacccagggaactgggggagacgaggtggatgatagtgttagtgttaacgatattgatctcagcctgtacatccctcgcgatgtagatgaaaccggaatcaccgtggcctcactggagagattctccacttatacatcagacaaggacgaaaataaattgtctgaggcttccggcggccgtgctgagaacggggagagaagcgacctagaagaggacaatgagagacatgtgctctag

SEQ ID NO: 198820 - DNA, 489 bp, Artificial Sequence
  derived and/or modified sequence
atgtaccggcacgccctgccccccggcttcgtgctgaagaaggacaagaagaaagaagaaaaagaggacgagatttctttggaagacctgattgaacgggagcgttctgctctggggcccaacgtgacgaagatcaccctcgaaagttttctggcatggaaaaaacggaaaagacaggaaaaaattgataaactcgaacaggatatggaacgccgtaaggccgactttaaggccgggaaggctctggtaataagcggtagggaagtttttgaattccgacccgagctagttaacgatgatgacgaggaggccgacgatacgcggtatacccaaggaaccggaggggatgaggtgaggggatcattcgtgcctcatctgctcatgcttattgagcgcaataatcggaaataccacaatatggtaaagagccaccagcaccaatctcactcagcatgggtccaaattttgacccctaccatgggaaactag

SEQ ID NO: 198821 - DNA, 1281 bp, Artificial Sequence
  derived and/or modified sequence
atgccacccaaaaaacaggctcaggcgggtggcagtaaaaaagctgagcagaagaaaaaagagaagattatcgaggataagacttttggcctgaaaaataaaaaaggtgcgaaacagcaaaagttcatcaaggcggtgactcaccaagtgaagtttggccagcagaatccaagacaggtagcccaatccgaagccgaaaagaagctgaaaaaagacgataaaaaaaaggaactgcaggagctgaacgagctctttaagcctgtagtggccgcacagaagattagtaagggtgcagacccaaagtcagtagtgtgtgctttcttcaaacagggacagtgcactaaaggtgataagtgcaagttctctcacgacctgaccctggaaagaaagtgtgagaaaaggtctgtatacattgatgccagagatgaggagctggagaaggataccatggacaactgggatgaaaagaagctcgaggaagtggtgaataaaaagcacggcgaggccgagaagaaaaagcccaagacccagatcgtgtgtaaacatttcttggaggccatcgaaaacaataagtacggatggttttgggtgtgccccggaggaggcgacatctgcatgtaccgccacgccctgccccctggattcgtcctgaagaaggacaaaaagaaagaggaaaaggaggatgagattagtctcgaagacttaatcgagcgggaacggtctgccttagggccaaacgtcactaaaatcactctggagtcgttcctagcatggaaaaaacgtaagcgacaagaaaaaatcgataagctggaacaggatatggagagacgcaaggccgactttaaagctggcaaggcactggtgatcagcggcagagaggttttcgaatttcggccagagctcgtcaacgacgacgacgaagaggctgatgatacgcggtatacccagggaaccggcggtgatgaggtggatgactccgtctcagtaaatgacattgacctgtccttgtatatccccagggacgtggatgagacgggcatcaccgtagcgtccctagagcggtttagcacttacacctccgataaagatgaaaacaagctgtccgaagcgagcggcggacgagccgagaacggcgagagatctgacttggaagaggacaatgagcgagaggggactgaaaatggtgccattgacgcagtccccgtggacgaaaatctattcacgggagaggatctagacgaactagaagaggaactcaacactcttgacctcgaagagtag

SEQ ID NO: 198822 - DNA, 1179 bp, Artificial Sequence
  derived and/or modified sequence
atgccaccgaagaaacaagctcaggcaggcggttcaaagaaagctgaacagaagaaaaaagaaaaaataatcgaggataaaacttttggcttaaaaaacaagaagggcgctaagcaacagaagttcattaaggccgtgactcatcaggtcaaatttgggcagcagaacccacgtcaggtggctcagtctgaagccgaaaagaagctaaaaaaggatgacaagaagaaagagctacaggagctcaatgagctttttaagcccgtcgtcgcagcgcagaagattagcaaaggcgcagacccgaaatcggttgtatgtgccttctttaagcagggccaatgtactaaaggcgacaagtgcaagttctcgcacgacctaacactggagagaaaatgcgagaagcggagtgtttacattgacgctcgggacgaagagctggagaaggatactatggataactgggatgaaaagaaactagaggaggtcgtgaataagaagcatggtgaagcagaaaaaaagaagcccaagactcaaatcgtgtgcaaacactttctagaggcgatcgagaacaacaagtatgggtggttttgggtgtgtcctggtgggggagacatatgcatgtataggcatgctttgcccccaggctttgtgctgaagaaggacaagaaaaaagaagaaaaggaggacgagattagcttagaggatttaatcgaaagggaacgctcggcacttgggccaaacgtcaccaagatcactctcgagtcattcctggcgtggaaaaagaggaagcgccaggagaaaatcgataaacttgaacaagatatggaaagacggaaggccgactttaaagcgggtaaggctcttgtcatctccggacgggaggtgttcgaattccgaccagagctggtcaacgatgatgacgaggaggccgatgacacacgttacacgcagggcaccgggggagacgaagtcgacgatagcgtgtcagtcaatgatattgatctgagtctgtacatacccagagacgtcgacgagacgggcatcacagtggccagcttagagagattcagcacctacacaagcgacaaggacgagaacaaactttccgaagcctccggcggaagagctgaaaacggagagcgctctgacctggaggaggacaacgaaaggcatgtcctgtag

SEQ ID NO: 198823 - DNA, 489 bp, Artificial Sequence
  derived and/or modified sequence
atgtataggcacgccctgcccccaggttttgtgctaaaaaaggacaagaagaaggaggagaaagaagacgaaatctcactcgaggatcttattgaaagggagagatccgccttgggaccgaacgtaaccaaaattaccctggaatccttcctggcttggaaaaagcgcaaaagacaggaaaaaattgacaaactagaacaggacatggaacgcaggaaggcagactttaaggcagggaaagccctagtgatctccgggagggaggtgttcgagtttagacctgagttagttaatgatgacgatgaagaggccgacgatacacgttatactcaggggaccggaggcgacgaggtccggggatctttcgtgcctcaccttttaatgctcatcgaacggaataaccggaagtaccataatatggttaagagtcaccaacaccaatcgcatagtgcatgggtccagattctgacccccaccatgggtaattag

SEQ ID NO: 198824 - DNA, 2138 bp, Artificial Sequence
  derived and/or modified sequence
tgggcgcgcacgcgcagctccgcttccgggagccgctcctcgctacccactatgctctgcgacatcgacctgtcgcaaaggccgcgtttgcggggccaatgagcgactcgctttccgtgcggtgcggcgagtgaggccccggtcttcctcctcgtcctgccgcagggccagaacccctgacggtattcagctgcgcgtaagtctggccggtgccatctgtctccgcaatgccccccaagaaacaggctcaggccgggggcagcaaaaaggcggagcaaaaaaagaaggagaagattatcgaagacaaaactttcggtttgaagaataagaaaggagcaaagcaacagaagtttatcaaggctgtcacacatcaagttaaatttggtcaacaaaatccacgtcaggtagcacagagtgaagctgaaaagaaattgaagaaggatgacaagaagaaagaattgcaggagctaaatgagctgttcaaacctgtagttgctgctcaaaaaataagtaaaggtgcagatcccaagtctgtagtatgtgcattcttcaagcaaggacagtgtactaaaggagataagtgtaagttctcccatgacttgactctggagagaaaatgtgaaaagcgaagtgtttacattgatgcaagagatgaagaacttgaaaaagatactatggataattgggatgagaaaaagctggaagaagtagtgaacaagaagcacggtgaggcggaaaagaaaaaaccaaaaactcaaatagtgtgcaagcatttcctggaagctattgaaaacaacaagtatggctggttttgggtatgccctggagggggtgatatttgcatgtatcgtcatgcacttcctcctggatttgtgttgaaaaaagataaaaagaaagaagagaaagaagatgaaatttcattagaagatctaattgagagagagcgttctgccctaggtccaaatgttaccaaaatcactctagaatcttttcttgcctggaagaaaaggaaaagacaagaaaagattgataaacttgaacaagatatggaaagaaggaaagctgacttcaaagcagggaaagcactagtgatcagtggtcgtgaagtgtttgaatttcgtcctgaactggtcaatgatgatgatgaggaagcagatgatacccgctacacccagggaacaggtggtgatgaggttgatgattcagtgagtgtaaatgacatagatttaagcctgtacatcccaagagatgtagatgaaacaggtattactgtagccagtcttgaaagattcagcacatatacttcagataaagatgaaaacaaattaagtgaagcttctggaggtagggctgaaaatggtgaaagaagtgacttggaagaggacaacgagagggagggaacggaaaatggagccattgatgctgttcctgttgatgaaaatcttttcactggagaggatttggatgaactagaagaagaattaaatacacttgatttagaagaatgacaccaaacacatcgctgaaaaaattaagtcagctcagcacgagttgaaattgactacattaatttctttccacctagaatcaacaggatgtttatttcctatgctgattctggaggagttaacctcctgcaaaaaaggcatcttgtccctacatcttctcttctgactttggctacatctcatagtaagttcagagtagttcatgataaattgaaaatataatggtcattgcagaaaatgattgatgttgtaactgtccacccaagtaagaagtgtatctgcctttccatcttttggttttcatttgggcatgtgctattaccagaaacaacaaacttatatttaaaatacccttcatttgacacagtttttaatgagtgatttaatttcctctgtatttgtatgtttagaagactgcctaaaacatgagcactgtacttcataaaggaaactgcgtatgcagattcagtattgtgtatctttggacaattagatggacatttaaaatggaacttcttttatctgacaggatcagctacaatgccctgtgttaaattgtttaaaagtttcccttttcttttttgccaataaagttgtaaataaagaccatcatacattaaaatccaaata

SEQ ID NO: 198825 - DNA, 1299 bp, Artificial Sequence
  derived and/or modified sequence
gactcgctttccgtgcggtgcggcgagtgaggccccggtcttcctcctcgtcctgccgcagggccagaacccctgacggtattcagctgcgcgtaagtctggccggtgccatctgtctccgcaatgccccccaagaaacaggctcaggccgggggcagcaaaaaggcggagcaaaaaaagaaggagaagattatcgaagacaaaactttcggtttgaagaataagaaaggagcaaagcaacagaagtttatcaaggctgtcacacatcaagttaaatttggtcaacaaaatccacgtcaggtagcacagagtgaagctgaaaagaaattgaagaaggatgacaagaagaaagaattgcaggagctaaatgagctgttcaaacctgtagttgctgctcaaaaaataagtaaaggtgcagatcccaagtctgtagtatgtgcattcttcaagcaaggacagtgtactaaaggagataagtgtaagttctcccatgacttgactctggagagaaaatgtgaaaagcgaagtgtttacattgatgcaagagatgaagaacttgaaaaagatactatggataattgggatgagaaaaagctggaagaagtagtgaacaagaagcacggtgaggcggaaaagaaaaaaccaaaaactcaaatagtgtgcaagcatttcctggaagctattgaaaacaacaagtatggctggttttgggtatgccctggagggggtgatatttgcatgtatcgtcatgcacttcctcctggatttgtgttgaaaaaagataaaaagaaagaagagaaagaagatgaaatttcattagaagatctaattgagagagagcgttctgccctaggtccaaatgttaccaaaatcactctagaatcttttcttgcctggaagaaaaggaaaagacaagaaaagattgataaacttgaacaagatatggaaagaaggaaagctgacttcaaagcagggaaagcactagtgatcagtggtcgtgaagtgtttgaatttcgtcctgaactggtcaatgatgatgatgaggaagcagatgatacccgctacacccagggaacaggtggtgatgaggttgatgattcagtgagtgtaaatgacatagatttaagcctgtacatcccaagagatgtagatgaaacaggtattactgtagccagtcttgaaagattcagcacatatacttcagataaagatgaaaacaaattaagtgaagcttctggaggtagggctgaaaatggtgaaagaagtgacttggaagaggacaacgagaggcatgtgcta

SEQ ID NO: 198826 - DNA, 1101 bp, Artificial Sequence
  derived and/or modified sequence
aatgagcgactcgctttccgtgcggtgcggcgagtgaggccccggtcttcctcctcgtcctgccgcagggccagaacccctgacggtattcagctgcgcgtaagtctggccggtgccatctgtctccgcaatgccccccaagaaacaggctcaggccgggggcagcaaaaaggcggagcaaaaaaagaaggagaagattatcgaagacaaaactttcggtttgaagaataagaaaggagcaaagcaacagaagtttatcaaggctgtcacacatcaagttaaatttggtcaacaaaatccacgtcaggtagcacagagtgaagctgaaaagaaattgaagaaggatgacaagaagaaagaattgcaggagctaaatgagctgttcaaacctgtagttgctgctcaaaaaataagtaaaggtgtgcaagcatttcctggaagctattgaaaacaacaagtatggctggttttgggtatgccctggagggggtgatatttgcatgtatcgtcatgcacttcctcctggatttgtgttgaaaaaagataaaaagaaagaagagaaagaagatgaaatttcattagaagatctaattgagagagagcgttctgccctaggtccaaatgttaccaaaatcactctagaatcttttcttgcctggaagaaaaggaaaagacaagaaaagattgataaacttgaacaagatatggaaagaaggaaagctgacttcaaagcagggaaagcactagtgatcagtggtcgtgaagtgtttgaatttcgtcctgaactggtcaatgatgatgatgaggaagcagatgatacccgctacacccagggaacaggtggtgatgaggtaagaggaagctttgtgcctcatctccttatgttaattgaaagaaacaatagaaaataccacaacatggttaagagccaccaacatcagagccacagtgcctgggttcaaatccttactccaaccatgggaaattaatctaggcctccaccctcatctaatatggacataatgattatctctacatcatagtttgtgagaattaatcgagttcatgaattagtagttctttatacagcttaggacagtg

SEQ ID NO: 198827 - DNA, 225 bp, Artificial Sequence
  derived and/or modified sequence
agaggcagcagaggcagacaccactggagcggcggcgccgccgtgagcagcggctaccccagcaacatcgagaagaaggagtaccaggagcagagcgtgctgagctgctgcagcgagagaaaggacgccaaccccaagagcgtggtgtgcagcttcttcatgcaggagcagtgcaccaagggcgagaagcaggccgtggtgatcagcgacttcggcgagagctag

SEQ ID NO: 198828 - DNA, 225 bp, Artificial Sequence
  derived and/or modified sequence
cgaggcagtcgaggacgacaccactggtcgggaggcgccgcagtgagttccggctatccctcgaatattgagaagaaagagtatcaggaacaatcggtgctcagttgctgttctgaacgtaaagacgcaaatcctaagtcagtcgtgtgctcctttttcatgcaggaacagtgcaccaaaggagagaagcaggcggtcgtgatctcagatttcggcgaaagctag

SEQ ID NO: 198829 - DNA, 225 bp, Artificial Sequence
  derived and/or modified sequence
cggggcagccggggccgccaccactggagcggcggcgctgctgtgagcagcggctaccccagcaacatcgagaagaaggagtaccaggagcagagcgtgctgagctgctgcagcgagaggaaggatgccaaccccaagtctgtggtgtgcagcttcttcatgcaggagcagtgcaccaagggggagaagcaggccgtggtgatcagtgactttggagagagctag

SEQ ID NO: 198830 - DNA, 225 bp, Artificial Sequence
  derived and/or modified sequence
cggggcagccggggccggcaccactggagcggcggcgccgccgtgtcatctggctacccatccaatattgagaaaaaggaataccaggaacaaagcgtgctttcttgctgctctgagaggaaggatgccaatccaaagtctgtggtgtgtagtttctttatgcaagaacagtgtacgaagggggaaaagcaagccgtcgtgattagcgattttggcgagagctag

SEQ ID NO: 198831 - DNA, 225 bp, Artificial Sequence
  derived and/or modified sequence
cgcggatctcgtggacggcaccactggtccggaggggctgccgtgagcagcggatacccctcaaacattgagaaaaaagagtatcaagaacagtccgtgctgtcttgctgctcagaacgcaaggatgccaaccccaaatcggttgtttgctccttcttcatgcaggagcaatgtacaaagggggagaaacaggctgtcgttatttctgattttggtgagtcgtag

SEQ ID NO: 198832 - DNA, 225 bp, Artificial Sequence
  derived and/or modified sequence
agaggatcgagaggccggcatcactggagtggtggcgcagctgtttcctccggatatccatcaaatattgagaagaaagaatatcaggagcaaagtgttctaagttgctgttcagaacgtaaagatgcgaaccccaaatcagtggtttgttcattcttcatgcaagagcaatgcactaaaggagagaagcaagctgtggtgatcagtgactttggtgaaagctaa

SEQ ID NO: 198833 - protein, 140 aa, Artificial Sequence
  derived and/or modified sequence
MTSMTQSLREVIKAMTKARNFERVLGKITLVSAAPGKVICEMKVEEEHTNAIGTLHGGLTATLVDNISTMALLCTERGAPGVSVDMNITYMSPAKLGEDIVITAHVLKQGKTLAFTSVDLTNKATGKLIAQGRHTKHLGN

SEQ ID NO: 198834 - DNA, 715 bp, Artificial Sequence
  derived and/or modified sequence
aaagtcagtgagcaaatcgcggaccaccggggctgccagctcgcctgactcccggcctcttgcgctcctaggggcggagaagggtgcgggctcttcgccctttgtgtcctccttctttcactaacttctggactttccagctcttccgaagttcgttcttgcgcaaagcccaaaggctggaaaaccgtccacgatgaccagcatgactcagtctctgcgggaggtgataaaggccatgaccaaggctcgcaattttgagagagttttgggaaagattactcttgtctctgctgctcctgggaaagtgatttgtgaaatgaaagtagaagaagagcataccaatgcaataggcactctccacggcggtttgacagccacgttagtagataacatatcaacaatggctctgctatgcacggaaaggggagcacccggagtcagtgtcgatatgaacataacgtacatgtcacctgcaaaattaggagaagatatagtgattacagcacatgttctgaagcaaggaaaaacacttgcatttacctctgtggatctgaccaacaaggccacaggaaaattaatagcacaaggaagacacacaaaacacctgggaaactgagagaacagcagaatgacctaaagaaacccaacaatgaatatcaagtatagatttgactcaaacaattgtaatttttgaaataaactagcaaaaccagaa

SEQ ID NO: 198835 - DNA, 423 bp, Artificial Sequence
  derived and/or modified sequence
atgacaagcatgacccagtcccttagggaggtgataaaggcgatgacgaaagctcggaacttcgaacgggttttgggcaaaattactctggtatcagccgcccccggcaaagtgatctgcgaaatgaaagtggaagaagagcacacaaacgccatagggacgctgcacgggggtctgacggccactctggtggacaatatcagtaccatggcccttctctgtactgagcggggagccccaggggtgagtgttgatatgaacatcacctatatgagcccagccaagctgggagaggacatagtcatcacagcgcatgttctgaaacaaggcaaaaccctcgcatttacatcagtagacctgactaataaagccaccggtaagctgatcgcccaaggtagacatactaaacatttgggcaattag

SEQ ID NO: 198836 - DNA, 423 bp, Artificial Sequence
  derived and/or modified sequence
atgacctccatgacccagagcctgcgggaggtgatcaaggccatgaccaaggccaggaactttgagcgggtgctgggcaagatcaccctggtgtctgctgcccctgggaaggtgatctgtgagatgaaggtggaggaggagcacaccaatgccatcggcaccctgcacggcggcctgacagccaccctggtggacaacatcagcaccatggccctgctgtgcacagagcggggggcccctggggtgtctgtggacatgaacatcacctacatgagccctgccaagctgggggaggacatcgtcatcacagcccacgtgctgaagcagggcaagaccctggccttcacctctgtggacctgaccaacaaggccaccgggaagctgattgcccagggccgccacaccaagcacctgggcaactag

SEQ ID NO: 198837 - DNA, 423 bp, Artificial Sequence
  derived and/or modified sequence
atgaccagcatgacccagagcctgcgggaggtgatcaaggccatgaccaaggcacgcaacttcgagcgcgtgctggggaagatcactctggtgtccgctgcccctgggaaggtgatatgcgaaatgaaagtcgaagaagaacataccaacgctattggtaccctgcacggaggccttaccgctaccttggtagacaacatctccaccatggcgttactctgcacggaacgaggtgcgccaggcgtttccgtagatatgaatatcacgtatatgtcccctgcgaagctcggcgaggacatagtgatcaccgcccacgttctgaagcagggaaaaacactggcctttacaagcgtggacttaaccaataaagctacaggtaagttgatcgcccaaggtcgtcatactaaacatctgggaaactag

SEQ ID NO: 198838 - DNA, 423 bp, Artificial Sequence
  derived and/or modified sequence
atgacgtctatgacacagtcgttgcgggaagtcataaaagctatgactaaggccagaaatttcgagcgagtgctagggaaaattactctcgtcagcgcagcgccaggcaaggtgatttgtgagatgaaggtcgaggaggagcacactaatgcaattggcactctgcacggagggctgacagctacgctggtggataatattagtacaatggcactgctgtgtactgaaagaggggcaccaggcgtgagcgtggatatgaacattacatacatgtcccctgccaaactgggcgaggacatagtaattacagcccatgtcctgaagcagggaaaaacactggccttcaccagtgtggatctaaccaataaggctacagggaagctcatagcccagggcagacatacaaaacacctcggtaactag

SEQ ID NO: 198839 - DNA, 423 bp, Artificial Sequence
  derived and/or modified sequence
atgaccagcatgacccagagcctgagagaggtgatcaaggccatgaccaaggccagaaacttcgagagagtgctgggcaagatcaccctggtgagcgccgcccccggcaaggtgatctgcgagatgaaggtggaggaggagcacaccaacgccatcggcaccctgcacggcggcctgaccgccaccctggtggacaacatcagcaccatggccctgctgtgcaccgagagaggcgcccccggcgtgagcgtggacatgaacatcacctacatgagccccgccaagctgggcgaggacatcgtgatcaccgcccacgtgctgaagcagggcaagaccctggccttcaccagcgtggacctgaccaacaaggccaccggcaagctgatcgcccagggcagacacaccaagcacctgggcaactag

SEQ ID NO: 198840 - protein, 324 aa, Artificial Sequence
  derived and/or modified sequence
MAAAAPGNGRASAPRLLLLFLVPLLWAPAAVRAGPDEDLSHRNKEPPAPAQQLQPQPVAVQGPEPARVEKIFTPAAPVHTNKEDPATQTNLGFIHAFVAAISVIIVSELGDKTFFIAAIMAMRYNRLTVLAGAMLALGLMTCLSVLFGYATTVIPRVYTYYVSTVLFAIFGIRMLREGLKMSPDEGQEELEEVQAELKKKDEEFQRTKLLNGPGDVETGTSITVPQKKWLHFISPIFVQALTLTFLAEWGDRSQLTTIVLAAREDPYGVAVGGTVGHCLCTGLAVIGGRMIAQKISVRTVTIIGGIVFLAFAFSALFISPDSGF

SEQ ID NO: 198841 - protein, 261 aa, Artificial Sequence
  derived and/or modified sequence
MEIPMQKIFTPAAPVHTNKEDPATQTNLGFIHAFVAAISVIIVSELGDKTFFIAAIMAMRYNRLTVLAGAMLALGLMTCLSVLFGYATTVIPRVYTYYVSTVLFAIFGIRMLREGLKMSPDEGQEELEEVQAELKKKDEEFQRTKLLNGPGDVETGTSITVPQKKWLHFISPIFVQALTLTFLAEWGDRSQLTTIVLAAREDPYGVAVGGTVGHCLCTGLAVIGGRMIAQKISVRTVTIIGGIVFLAFAFSALFISPDSGF

SEQ ID NO: 198842 - DNA, 975 bp, Artificial Sequence
  derived and/or modified sequence
atggccgccgccgcccccggcaacggcagagccagcgcccccagactgctgctgctgttcctggtgcccctgctgtgggcccccgccgccgtgagagccggccccgacgaggacctgagccacagaaacaaggagccccccgcccccgcccagcagctgcagccccagcccgtggccgtgcagggccccgagcccgccagagtggagaagatcttcacccccgccgcccccgtgcacaccaacaaggaggaccccgccacccagaccaacctgggcttcatccacgccttcgtggccgccatcagcgtgatcatcgtgagcgagctgggcgacaagaccttcttcatcgccgccatcatggccatgagatacaacagactgaccgtgctggccggcgccatgctggccctgggcctgatgacctgcctgagcgtgctgttcggctacgccaccaccgtgatccccagagtgtacacctactacgtgagcaccgtgctgttcgccatcttcggcatcagaatgctgagagagggcctgaagatgagccccgacgagggccaggaggagctggaggaggtgcaggccgagctgaagaagaaggacgaggagttccagagaaccaagctgctgaacggccccggcgacgtggagaccggcaccagcatcaccgtgccccagaagaagtggctgcacttcatcagccccatcttcgtgcaggccctgaccctgaccttcctggccgagtggggcgacagaagccagctgaccaccatcgtgctggccgccagagaggacccctacggcgtggccgtgggcggcaccgtgggccactgcctgtgcaccggcctggccgtgatcggcggcagaatgatcgcccagaagatcagcgtgagaaccgtgaccatcatcggcggcatcgtgttcctggccttcgccttcagcgccctgttcatcagccccgacagcggcttctag

SEQ ID NO: 198843 - DNA, 786 bp, Artificial Sequence
  derived and/or modified sequence
atggagatccccatgcagaagatcttcacccccgccgcccccgtgcacaccaacaaggaggaccccgccacccagaccaacctgggcttcatccacgccttcgtggccgccatcagcgtgatcatcgtgagcgagctgggcgacaagaccttcttcatcgccgccatcatggccatgagatacaacagactgaccgtgctggccggcgccatgctggccctgggcctgatgacctgcctgagcgtgctgttcggctacgccaccaccgtgatccccagagtgtacacctactacgtgagcaccgtgctgttcgccatcttcggcatcagaatgctgagagagggcctgaagatgagccccgacgagggccaggaggagctggaggaggtgcaggccgagctgaagaagaaggacgaggagttccagagaaccaagctgctgaacggccccggcgacgtggagaccggcaccagcatcaccgtgccccagaagaagtggctgcacttcatcagccccatcttcgtgcaggccctgaccctgaccttcctggccgagtggggcgacagaagccagctgaccaccatcgtgctggccgccagagaggacccctacggcgtggccgtgggcggcaccgtgggccactgcctgtgcaccggcctggccgtgatcggcggcagaatgatcgcccagaagatcagcgtgagaaccgtgaccatcatcggcggcatcgtgttcctggccttcgccttcagcgccctgttcatcagccccgacagcggcttctag

SEQ ID NO: 198844 - DNA, 975 bp, Artificial Sequence
  derived and/or modified sequence
atggccgccgcagccccgggcaacggccgtgcttccgctcccaggctcctattgctgttcttggtgcctcttctgtgggccccggctgcggtgagggccggtccagacgaggacctgagtcacaggaataaggagccccccgcccccgcccagcagctccaaccgcagcctgtcgcggtccaggggcccgaacctgcaagggtcgagaagatttttactccggccgcccctgtccacacaaacaaagaggatccggcaacacagacgaatttagggttcattcatgccttcgtcgcagcaattagcgtgataattgtcagcgagttaggcgataaaaccttttttatagctgcaattatggctatgcggtacaatcgcctgacggtcttagcaggcgccatgttagcgctgggcctcatgacctgcctatccgtcctgtttggttatgccaccaccgtcattccaagagtttatacttactatgtgtctacggttctcttcgccatattcggtattagaatgctcagagagggcctcaaaatgagccctgacgaaggtcaggaagaacttgaagaagtccaggctgagctaaagaaaaaggacgaggaattccaaagaaccaaactactgaacggaccaggagatgtggagacaggtacctccatcacagtgccccaaaagaaatggctgcactttattagtcccatttttgtgcaagccctgaccttgacattcttggcagagtggggtgacagatcacagctgactactattgtcttggccgcacgtgaggatccgtatggcgtggccgtgggagggactgtcggccactgtctctgcactggtctggctgtaataggcggtcggatgatcgcccagaaaatcagtgtgcggaccgtaaccattattggggggatcgttttcctggcttttgcatttagcgctctcttcatcagcccagacagcggcttctag

SEQ ID NO: 198845 - DNA, 786 bp, Artificial Sequence
  derived and/or modified sequence
atggaaatccccatgcaaaaaatatttactcccgcagctccagttcatactaataaagaggatcccgccacccagacgaacctcggctttatccatgccttcgtcgccgctatatccgttataatcgtcagcgagctgggcgataagactttttttatcgcagccattatggctatgaggtacaatcgcctcactgttttggcaggtgcaatgctggcactaggcttgatgacttgtttatccgtactctttggatatgcgacaacagtgatccctagggtgtacacttattatgtcagcaccgtgttgtttgctattttcggcattcgcatgcttcgggaaggcttgaaaatgagccctgatgaggggcaggaggaactggaggaggtgcaggctgaactgaagaagaaggatgaagaatttcagcggaccaagctgttgaatggcccaggcgacgtggagaccggaacatccatcacagtgccacaaaagaaatggctgcatttcatctcccccatttttgtgcaggctctgaccctgacatttctggccgaatggggggaccggtcacagctcacaacaattgtgctcgccgcccgagaggatccttacggcgtggccgtcggcgggacggtcggacattgcctatgcactggtctcgccgttatcggaggtaggatgatagcacagaaaatttcggtaaggactgtaaccatcatcgggggcatcgtgttccttgcattcgcattcagtgccttattcattagtcctgacagcggattctag

SEQ ID NO: 198846 - DNA, 975 bp, Artificial Sequence
  derived and/or modified sequence
atggctgctgctgcccctggaaatggccgggccagcgccccccggctgctgctgctcttcctggtgcccctgctgtgggccccagctgctgtgcgggccggcccagatgaggacctgagccacaggaacaaggagcccccagccccagcccagcagctgcagccccagcctgtggccgtgcagggccctgagcccgcccgggtggagaagatcttcaccccagctgcccctgtgcacaccaacaaggaggaccctgccacccagaccaacctgggcttcatccacgcctttgtggccgccatcagcgtcatcatcgtgtctgagctgggggacaagaccttcttcatcgccgccatcatggccatgagatacaaccggctgactgtgctggccggggccatgctggccctgggcctgatgacctgcctgtctgtgctgtttggctacgccaccaccgtcatcccccgggtgtacacctactacgtgtccacagtgctgtttgccatcttcggcatccgcatgctgcgggagggcctgaagatgagcccagatgagggccaggaggagctggaggaggtgcaggccgagctgaagaagaaggatgaggagttccagaggaccaagctgctgaatggacctggagatgtggagaccggcaccagcatcaccgtgccccagaagaagtggctgcacttcatcagccccatctttgtgcaggccctgaccctgaccttcctggccgagtggggagacaggagccagctgaccaccatcgtgctggccgcccgggaggacccctatggagtggccgtgggcggcaccgtgggccactgcctgtgcaccggcctggccgtcatcggcggccgcatgattgcccagaagatctctgtgaggacagtgaccatcattggaggcatcgtgttcctggcctttgccttcagcgccctcttcatcagcccagacagcggcttctag

SEQ ID NO: 198847 - DNA, 786 bp, Artificial Sequence
  derived and/or modified sequence
atggagatccccatgcagaagatcttcaccccagctgcccctgtgcacaccaacaaggaggaccctgccacccagaccaacctgggcttcatccacgcctttgtggccgccatcagcgtcatcatcgtgtctgagctgggggacaagaccttcttcatcgccgccatcatggccatgagatacaaccggctgactgtgctggccggggccatgctggccctgggcctgatgacctgcctgtctgtgctgtttggctacgccaccaccgtcatcccccgggtgtacacctactacgtgtccacagtgctgtttgccatcttcggcatccgcatgctgcgggagggcctgaagatgagcccagatgagggccaggaggagctggaggaggtgcaggccgagctgaagaagaaggatgaggagttccagaggaccaagctgctgaatggacctggagatgtggagaccggcaccagcatcaccgtgccccagaagaagtggctgcacttcatcagccccatctttgtgcaggccctgaccctgaccttcctggccgagtggggagacaggagccagctgaccaccatcgtgctggccgcccgggaggacccctacggcgtggccgtgggcggcaccgtgggccactgcctgtgcaccggcctggccgtgattggaggccgcatgattgcccagaagatctctgtgaggacagtgaccatcatcggcggcatcgtgttcctggcctttgccttcagcgccctcttcatcagcccagattctggcttctag

SEQ ID NO: 198848 - DNA, 975 bp, Artificial Sequence
  derived and/or modified sequence
atggccgccgccgcccccggcaacggccgggccagcgccccccggctgctcctgctgttcctggtacccttgttatgggcccccgctgctgtccgtgcgggccccgacgaagacctgagtcaccgaaataaggaaccccccgctccagctcagcagctacagcctcaaccagttgctgttcaggggccggaacctgcccgtgttgagaagatctttaccccagcagctcccgtccacacaaacaaagaggatcccgcgacccagacaaatctggggttcatccacgccttcgtggctgccatcagtgtgataattgttagcgagttgggtgacaaaactttctttatagcagccatcatggctatgcggtacaaccggttgaccgtgcttgcaggcgccatgctggccctgggtcttatgacctgcctgtccgtgctgttcggctacgcaaccactgtgataccccgcgtgtatacttactatgtgtccaccgttttgtttgctatctttggaatccgcatgctcagggagggcctgaagatgtcaccggatgaaggccaggaagaactggaggaggtgcaggccgagttaaagaagaaggacgaggaattccaacggacaaagctgctgaatggaccgggcgacgtggagactgggaccagcataacagtgcctcagaaaaagtggctgcactttatttcccctattttcgtccaggccctgacattgacttttcttgccgagtggggcgaccgttcccaactgaccacaatcgtcctggccgcccgcgaagacccttatggagtggctgtgggcggcacagtgggccactgcttgtgtaccggtctggcggtgatcggtggacgtatgattgcacaaaaaatcagtgtccgaaccgtgaccatcatcgggggaattgtattccttgccttcgcattctcagctctctttatatccccagatagcgggttttag

SEQ ID NO: 198849 - DNA, 786 bp, Artificial Sequence
  derived and/or modified sequence
atggagatccccatgcagaagatcttcacccccgccgcccccgtgcacaccaataaggaagatcctgccacacaaacaaacctcggcttcatccatgcttttgttgcagctattagcgtgataattgtgagcgagctgggagataaaacattttttatcgctgccatcatggccatgcgatacaaccggttgactgtgctggccggtgcaatgttggccctcggtttgatgacctgtctgagtgtgttattcggatatgctaccacagttatcccacgtgtttacacgtattacgtgtctactgtgctgtttgcaatatttggaattcgcatgcttcgagagggcctcaaaatgtcacctgacgaaggccaggaggaactggaggaggtccaagccgaactgaagaagaaagacgaggaattccagcggacaaaactgctgaatggtcctggcgatgtggagaccgggacaagtatcaccgtgcctcagaaaaaatggcttcacttcatatctccaatctttgtgcaggcattgacgctgaccttcctcgccgagtggggtgacagatctcagctcacaacaattgtcctggctgccagagaggatccctacggcgtggctgtggggggaacagttggccactgcctttgcacgggactggcagtgattgggggccgtatgatcgcccaaaagatctcagtccgtaccgtcaccattatcggaggcattgtttttctcgcctttgccttttcagccctgttcatatccccagacagcgggttctag

SEQ ID NO: 198850 - DNA, 975 bp, Artificial Sequence
  derived and/or modified sequence
atggctgccgcagctcctggaaacgggagagcatccgcccctcgtttgctcttactgtttttagtccccctcctctgggcccctgctgctgtccgggctggaccagacgaggacttgtcacataggaataaggagccacctgcacctgcccagcagctgcaaccacaacccgtggctgtccaaggtccggagcccgctagagtggaaaaaattttcaccccggctgctcccgtgcatactaacaaggaagacccagctacgcagacaaacttaggtttcattcatgccttcgtggccgctatatcagtgattatcgtatctgaactcggagacaagactttctttattgccgcaatcatggccatgaggtacaataggctaactgtcttggctggagcgatgctcgctctcggcttaatgacatgcctgagcgttctatttggctacgccacaacagtgatccctagagtttacacatactacgtgagcacagtcttattcgcaatatttggcatcagaatgcttcgtgaaggattgaaaatgtctcccgacgagggccaagaggagctcgaggaggtccaggctgaacttaagaaaaaagacgaggagttccagaggaccaaactgcttaacggcccaggggatgttgaaaccgggacgtccataacagttcctcaaaaaaagtggttgcattttatttccccaatctttgtgcaggcgttgactttaacattcctagctgagtggggcgataggtctcagcttaccaccattgtgctggctgcgagggaggacccctacggggtcgcggttggcggaactgtgggccattgcctgtgtacaggtctggcagtgatagggggacgcatgatcgctcagaagatctctgtgcgaacggttactatcattggtggtattgtgtttttagctttcgcattcagtgctctttttatttcgccagattccggattttag

SEQ ID NO: 198851 - DNA, 786 bp, Artificial Sequence
  derived and/or modified sequence
atggagattcctatgcaaaagattttcacgccagcagcccctgtccatacaaacaaggaagatcctgccacccagaccaatcttgggttcatccacgcctttgttgccgctatctctgtcattatcgtttccgaacttggcgacaagaccttctttatagctgcgattatggccatgagatacaacagactgacagtgctcgcaggagccatgttggctctgggccttatgacttgcctgagcgtgttgttcggctatgccaccaccgtaatacccagagtgtatacttactatgtgagcacagttctgttcgcaatttttggcattaggatgttgcgggagggcctgaagatgtctcctgatgaggggcaggaagaactggaagaagttcaggccgaattgaagaaaaaggatgaggaatttcagcgtaccaaactccttaacggccctggagacgttgaaacaggcactagtatcaccgtaccacagaagaaatggttgcactttattagtcccatcttcgtgcaagcgttaaccttgacgttcctcgccgagtggggagaccgctcccagctcactactatagtgcttgctgcaagggaggacccatacggcgtcgccgttggcggtactgtgggccactgtctctgtactgggctggccgtcatcggtggtagaatgatcgcgcaaaaaattagcgtgcgcactgtgactatcataggcggtattgtctttctggcctttgcatttagcgcgctgtttataagtcccgatagtggcttctag

SEQ ID NO: 198852 - DNA, 1928 bp, Artificial Sequence
  derived and/or modified sequence
gactccagtttagccgccgccggagaggacgggcgccgagccggggctgcggacttcggcctgcccctcacctcactcccgctgcttgcacctcccggatggtgctgactgctccctaagcggcggcggcggcgagtcgtgaggacgcgccgcggaggctgttcggggtcgaggcttcccgtcgccggcacttcctcttgcggcgcccgtgcgcggccggcccggcaggcgggatggcggccgcggctccagggaacggccgcgcatcggcgccccggctgcttctgctctttctggttccgctgctgtgggccccggctgcggtccgggccggcccagatgaagaccttagccaccggaacaaagaaccgccggcgccggcccagcagctgcagccgcagcctgtggctgtgcagggccccgagccggcccgggtcgagaaaatatttacaccagcagctccagttcataccaataaagaagatcctgctacccaaactaatttgggatttatccatgcatttgtcgctgccatatcagttattattgtatctgaattgggtgataagacattttttatagcagccatcatggcaatgcgctataaccgcctgaccgtgctggctggtgcaatgcttgccttgggactaatgacatgcttgtcagttttgtttggctatgccaccacagtcatccccagggtctatacatactatgtttcaactgtattatttgccatttttggcattagaatgcttcgggaaggcttaaagatgagccctgatgagggtcaagaggaactggaagaagttcaagctgaattaaagaagaaagatgaagaatttcaacgaaccaaacttttaaatggaccgggagatgttgaaacgggtacaagcataacagtacctcagaaaaagtggttgcattttatttcacccatttttgttcaagctcttacattaacattcttagcagaatggggtgatcgctctcaactaactacaattgtattggcagctagagaggacccctatggtgtagccgtgggtggaactgtggggcactgcctgtgcacgggattggcagtaattggaggaagaatgatagcacagaaaatctctgtcagaactgtgacaatcataggaggcatcgtttttttggcgtttgcattttctgcactatttataagccctgattctggtttttaacaagctgtttgttcatctatatttagtttaaaataggtagtattatctttctgtacatagtgtacattacaactaaaagtgatggaaaaatactgtattttgtagcactgattttgtgagtttgacccattattatgtctgagatataatcattgattctatttgtaacaaggagttttaaaagaaacctgacttctaagtgtgggtttttcttctctccaacataattatgttaatatggtcctcatttttcttttggtgcagaaccgttgtgcagtggggtctaccatgcaattttctttcagcactgacccctttttaaggaatacaaattttctccttcatcacttaggtgttttaagatgtttaccttaaagtttttcttggggaaagaatgaattaatttctatttcttaaaacatttccctgagccagtaaacagtagtttaatcattggtcttttcaaaactaggtgtttaaaaaaagagacatatatgatattgctgttatatcaataacatggcacaacaagaactgtctgccaggtcattcttcctcttttttttttaattgggtaggacacccaatataaaaacagtcaatatttgacaatgtggaattaccaaattaaaagagaatactatgaatgtattcatattttttctatattgaataaacaatgtaacatagataacaatataaataaaagtggtatgacca

SEQ ID NO: 198853 - DNA, 1657 bp, Artificial Sequence
  derived and/or modified sequence
agtttagccgccgccggagaggacgggcgccgagccggggctgcggacttcggcctgcccctcacctcactcccgctgcttgcacctcccggatggtgctgactgctccctaagcggcggcggcggcgagtcgtgaggacgcgccgcggaggctgttcggggtcgaggcttcccgtcgccggcacttcctcttgcggcgcccgtgcgcggccggcccggcaggcgggatggcggccgcggctccagggaacggccgcgcatcggcgccccggctgcttctgctctttctggttccgctgctgtgggccccggctgcggtccgggccggcccagatgaagaccttagccaccggaacaaagaaccgccggcgccggcccagcagctgcagccgcagcctgtggctgtgcagggccccgagccggcccgggtcgagggacatcagtttttttcttggtagcaagctgtagattttgtttcaaggaaagcatcttcatcttctctagtttcatcatgtatagatggagattccgatgcagaaaatatttacaccagcagctccagttcataccaataaagaagatcctgctacccaaactaatttgggatttatccatgcatttgtcgctgccatatcagttattattgtatctgaattgggtgataagacattttttatagcagccatcatggcaatgcgctataaccgcctgaccgtgctggctggtgcaatgcttgccttgggactaatgacatgcttgtcagttttgtttggctatgccaccacagtcatccccagggtctatacatactatgtttcaactgtattatttgccatttttggcattagaatgcttcgggaaggcttaaagatgagccctgatgagggtcaagaggaactggaagaagttcaagctgaattaaagaagaaagatgaagaatttcaacgaaccaaacttttaaatggaccgggagatgttgaaacgggtacaagcataacagtacctcagaaaaagtggttgcattttatttcacccatttttgttcaagctcttacattaacattcttagcagaatggggtgatcgctctcaactaactacaattgtattggcagctagagaggacccctatggtgtagccgtgggtggaactgtggggcactgcctgtgcacgggattggcagtaattggaggaagaatgatagcacagaaaatctctgtcagaactgtgacaatcataggaggcatcgtttttttggcgtttgcattttctgcactatttataagccctgattctggtttttaacaagctgtttgttcatctatatttagtttaaaataggtagtattatctttctgtacatagtgtacattacaactaaaagtgatggaaaaatactgtattttgtagcactgattttgtgagtttgacccattattatgtctgagatataatcattgattctatttgtaacaaggagttttaaaagaaacctgacttctaagtgtgggtttttcttctctccaacataattatgttaatatggtcctcatttttcttttggtgcagaaccgttgtgcagtggggtctaccatgcaattttctttcagcactgacccctttttaaggaatacaaattttctccttcatcacttag

SEQ ID NO: 198854 - protein, 125 aa, Artificial Sequence
  derived and/or modified sequence
MESKEKRAVNSLSMENANQENEEKEQVANKGEPLALPLDAGEYCVPRGNRRRFRVRQPILQYRWDMMHRLGEPQARMREENMERIGEEVRQLMEKLREKQLSHSLRAVSTDPPHHDHHDEFCLMP

SEQ ID NO: 198855 - DNA, 378 bp, Artificial Sequence
  derived and/or modified sequence
atggagtctaaagagaaacgcgcagttaattccttgtcaatggagaatgcaaatcaggaaaatgaggaaaaggaacaggtagctaataagggggaacctctcgccctgcctctcgatgcgggcgagtactgtgtgcctcggggtaacaggaggcgttttagggtcagacagccgatccttcagtatagatgggatatgatgcataggctgggggaaccccaggccaggatgcgagaggagaatatggagcgaattggcgaggaggtaaggcagctcatggagaagctgagagagaagcagctgtcgcacagtctacgggctgtatccacagatcctcctcatcacgatcatcacgatgaattttgcctgatgccttag

SEQ ID NO: 198856 - DNA, 378 bp, Artificial Sequence
  derived and/or modified sequence
atggagagcaaggagaagagagctgtgaacagcctgtccatggagaatgccaaccaggagaatgaggagaaggagcaggtggccaacaagggggagcccctggccctgcccctggatgctggggagtactgtgtgccccggggcaacagaagacgcttccgggtgcggcagcccatcctgcagtaccgctgggacatgatgcaccggctgggggagccccaggccaggatgagggaggagaacatggagagaattggagaggaggtgcggcagctgatggagaagctgcgggagaagcagctgagccacagcctgcgggctgtgtccacagaccccccccaccacgaccaccatgatgagttctgcctgatgccctag

SEQ ID NO: 198857 - DNA, 378 bp, Artificial Sequence
  derived and/or modified sequence
atggagagcaaggagaagcgggccgtgaacagcctgagcatggagaatgctaaccaggaaaatgaagaaaaggagcaagtagctaacaagggcgagccactagccttgccattggatgccggtgaatattgcgtgcctagaggtaatagaaggcgcttccgggttcgccagcctatcctgcagtatagatgggacatgatgcatcggctgggcgaaccacaggcaagaatgcgcgaggagaacatggaaagaatcggggaggaggtgcggcagcttatggaaaagctgcgcgaaaagcagttatcccactccctgagagcagtctctactgatccgccccaccacgaccatcatgatgagttttgcctcatgccatag

SEQ ID NO: 198858 - DNA, 378 bp, Artificial Sequence
  derived and/or modified sequence
atggaaagcaaagaaaagcgcgctgtaaacagtctctcgatggagaacgccaaccaggaaaacgaggaaaaggaacaggtggcaaacaagggagaacccctagcactgcctctcgatgcgggtgagtactgcgtgcccaggggaaacaggagaagatttcgcgttcgacagcccatactgcaataccgctgggacatgatgcaccggttaggcgaaccccaggcaagaatgcgtgaagagaatatggagcgcattggtgaagaggtgcgacaattaatggaaaaactgcgcgagaaacagctgtctcattccctgagggcagtcagtacagatccacctcaccacgatcaccatgacgaattttgcctcatgccctag

SEQ ID NO: 198859 - DNA, 378 bp, Artificial Sequence
  derived and/or modified sequence
atggagagcaaggagaagagagccgtgaacagcctgagcatggagaacgccaaccaggagaacgaggagaaggagcaggtggccaacaagggcgagcccctggccctgcccctggacgccggcgagtactgcgtgcccagaggcaacagaagaagattcagagtgagacagcccatcctgcagtacagatgggacatgatgcacagactgggcgagccccaggccagaatgagagaggagaacatggagagaatcggcgaggaggtgagacagctgatggagaagctgagagagaagcagctgagccacagcctgagagccgtgagcaccgaccccccccaccacgaccaccacgacgagttctgcctgatgccctag

SEQ ID NO: 198860 - protein, 1129 aa, Artificial Sequence
  derived and/or modified sequence
MRSSASRLSSFSSRDSLWNRMPDQISVSEFIAETTEDYNSPTTSSFTTRLHNCRNTVTLLEEALDQDRTALQKVKKSVKAIYNSGQDHVQNEENYAQVLDKFGSNFLSRDNPDLGTAFVKFSTLTKELSTLLKNLLQGLSHNVIFTLDSLLKGDLKGVKGDLKKPFDKAWKDYETKFTKIEKEKREHAKQHGMIRTEITGAEIAEEMEKERRLFQLQMCEYLIKVNEIKTKKGVDLLQNLIKYYHAQCNFFQDGLKTADKLKQYIEKLAADLYNIKQTQDEEKKQLTALRDLIKSSLQLDQKEDSQSRQGGYSMHQLQGNKEYGSEKKGYLLKKSDGIRKVWQRRKCSVKNGILTISHATSNRQPAKLNLLTCQVKPNAEDKKSFDLISHNRTYHFQAEDEQDYVAWISVLTNSKEEALTMAFRGEQSAGENSLEDLTKAIIEDVQRLPGNDICCDCGSSEPTWLSTNLGILTCIECSGIHREMGVHISRIQSLELDKLGTSELLLAKNVGNNSFNDIMEANLPSPSPKPTPSSDMTVRKEYITAKYVDHRFSRKTCSTSSAKLNELLEAIKSRDLLALIQVYAEGVELMEPLLEPGQELGETALHLAVRTADQTSLHLVDFLVQNCGNLDKQTALGNTVLHYCSMYSKPECLKLLLRSKPTVDIVNQAGETALDIAKRLKATQCEDLLSQAKSGKFNPHVHVEYEWNLRQEEIDESDDDLDDKPSPIKKERSPRPQSFCHSSSISPQDKLALPGFSTPRDKQRLSYGAFTNQIFVSTSTDSPTSPTTEAPPLPPRNAGKGPTGPPSTLPLSTQTSSGSSTLSKKRPPPPPPGHKRTLSDPPSPLPHGPPNKGAVPWGNDGGPSSSSKTTNKFEGLSQQSSTSSAKTALGPRVLPKLPQKVALRKTDHLSLDKATIPPEIFQKSSQLAELPQKPPPGDLPPKPTELAPKPQIGDLPPKPGELPPKPQLGDLPPKPQLSDLPPKPQMKDLPPKPQLGDLLAKSQTGDVSPKAQQPSEVTLKSHPLDLSPNVQSRDAIQKQASEDSNDLTPTLPETPVPLPRKINTGKNKVRRVKTIYDCQADNDDELTFIEGEVIIVTGEEDQEWWIGHIEGQPERKGVFPVSFVHILSD

SEQ ID NO: 198861 - DNA, 3390 bp, Artificial Sequence
  derived and/or modified sequence
atgcgctcttcggcttccaggttaagctctttttcatcacgtgacagtttatggaatcgaatgcccgatcagatttcagtgtccgagtttatcgcagagactaccgaggattacaattctccaacaacctccagctttaccaccaggcttcacaattgtagaaacaccgtcactctgttagaagaggccttagaccaggaccggaccgccctgcagaaggttaagaaaagcgtcaaggcaatttacaactccggccaggaccacgtccagaatgaggagaactacgcccaggtgttggataagttcgggagtaattttctgtcaagggacaatccagatctcggcacggccttcgtaaagttcagcacattgaccaaggaactgagtacgcttctgaagaacttactgcagggcctgagtcataatgttatcttcaccctggacagcctgctgaagggagatctgaagggagtcaagggggatttgaagaaacctttcgacaaagcttggaaagactacgagactaagttcacaaaaattgagaaagagaaacgggaacacgcaaaacagcacggaatgatacgaacagagatcacaggtgccgagattgccgaggaaatggaaaaggaacgaagactattccaattgcagatgtgcgagtaccttattaaagtaaacgagattaaaaccaaaaaaggagtcgacctgctgcaaaacctgatcaagtactatcatgcacagtgcaacttctttcaagacggactgaagacagctgacaagcttaaacagtacattgagaagctggccgcggacctctacaatattaagcagacccaggacgaagaaaagaaacagctcactgccttaagggaccttataaagagcagcctacaacttgaccagaaagaagacagccagtcccggcagggaggatacagtatgcatcaattacaggggaacaaagagtacgggagtgagaagaaaggctatctcctgaaaaagtctgatggcattcgcaaagtctggcagcgtaggaaatgctcagtgaagaacggtattctcacaatttcacacgccacgtctaacagacagcccgcgaaactgaacctgctgacatgccaggtcaagcctaacgcggaagacaaaaaatccttcgacttaatctcccacaataggacgtaccacttccaagctgaggatgagcaagactacgttgcttggatttcagtgcttaccaatagcaaagaggaggctctcacaatggcgtttcggggtgagcagtctgctggagagaactccttggaagaccttactaaagccataattgaggacgtgcaacgtttaccaggaaacgacatatgttgcgactgtggttccagtgaacccacgtggctatctacgaatcttgggatactcacttgtatcgaatgttctgggattcacagagaaatgggagtccatatctctcggatacaaagcttggaactcgataaactcgggacttcagagttactgctggcaaagaacgttggaaataactctttcaacgacattatggaggctaatctaccatcaccaagtccaaagccaacccccagctctgatatgactgtgaggaaggagtacattactgcaaaatacgttgaccatagattctctagaaaaacttgttcgacaagctcagccaagcttaacgaactcctggaggcaatcaagtcacgggatctgttagcacttatccaggtatacgccgagggcgtggagctgatggagcctctgttggaaccaggccaagagctaggggaaactgctctccacctggcagtaaggaccgctgaccagacttctttgcatcttgtggattttctggtgcagaattgcgggaatctagacaaacagaccgctcttgggaatacggtactacattattgttcaatgtatagcaaacctgagtgcctgaaactcttgctccgctctaaaccgaccgtggatatcgtcaaccaggccggagaaaccgctctcgacattgccaaacggctcaaagcaacacagtgtgaggatcttctctctcaagccaagtccggcaagtttaacccacatgtgcacgtcgaatacgagtggaacctgaggcaggaggaaattgatgaatcagatgacgaccttgacgataagccaagccccattaagaaggagcgctctccaaggccacagagcttctgccatagtagcagcatttccccccaggacaagttagctctgcctggtttttcgactcctagagataaacagcgcctgtcctatggcgcgttcaccaaccagatatttgtgagtacatccaccgactccccaacatcacctaccaccgaagcaccccccctcccccctcgaaatgccgggaaggggcccaccgggccccccagcaccctgccactgtctacccagacgagttctggatcctctaccctgagcaaaaagcggccacctccacctccccccggacacaagcgaactctctcagatcctcctagccccctcccacatggtccacctaacaagggagcagttccctggggtaacgatggcggaccctctagcagctctaagacaaccaataagttcgagggtctatcccagcagagcagtacatcttctgctaagacggcattgggcccccgcgtcctccctaagctcccacagaaggtggctctcaggaaaacagatcacctaagtctggacaaggcaaccattcccccagaaattttccagaaaagctcgcaattagcagagctcccccaaaaaccgcctccaggtgacctgccacccaaacccaccgagcttgctcctaagccccagatcggcgacctgccacctaaacctggcgagctgcctcctaaacctcagcttggtgacttgcctcctaagccccagctatcggacctgcctcccaaaccacagatgaaggatttgcccccaaagccccaacttggcgatcttctggctaagtcacaaacaggagacgtgtctcccaaggctcagcagccttccgaagtgaccctcaagagtcatcctcttgacctctcacctaacgtgcagtcacgagacgcgattcagaaacaggcctctgaggacagcaacgacctgactcctacactgccagagaccccagtacccctgcccaggaagatcaatacggggaaaaacaaagtgaggagagtcaaaacaatctacgattgccaggccgataatgacgatgaactcacctttatagagggggaggtcatcatagttactggtgaggaagaccaggagtggtggatcgggcacatcgaaggtcaaccggagcgcaagggcgttttccctgtgtcgtttgtccacatcctatccgattag

SEQ ID NO: 198862 - DNA, 3390 bp, Artificial Sequence
  derived and/or modified sequence
atgcggtcctccgcatctcgactttcgtcatttagcagccgcgactcgctatggaatcggatgcccgaccagatctctgtgtctgagtttatcgctgagacaaccgaggattacaactcaccaaccacttctagctttactaccaggcttcacaactgtcgaaatacggtgacactgctggaagaagccctggatcaggatagaacagcattgcagaaggtcaaaaagtctgtcaaggccatctacaactcggggcaggatcatgtgcagaatgaagagaactatgctcaggtcctcgacaaatttggttcaaattttcttagcagagacaatcccgaccttgggaccgccttcgtgaaattttctacactgaccaaggagttgtccaccttactcaagaaccttttacagggattgtcacacaacgtcatttttactttagactccttattaaaaggtgacctgaagggcgtgaagggcgatctaaagaaaccattcgacaaggcatggaaagattacgaaacaaaattcacgaagatcgaaaaagagaagcgtgagcatgctaagcaacacggcatgatccgcacagagatcaccggagcagagatcgccgaagagatggagaaagaacgccgactcttccaactccagatgtgcgagtaccttattaaggtcaatgagatcaagactaagaagggcgtggacctacttcagaacctgataaaatactaccacgcccagtgcaatttcttccaggatgggcttaagaccgcagataaactgaagcagtacatagagaagcttgcagccgacctttacaacataaagcagactcaggatgaggagaagaaacaactgactgcccttagggatttaatcaagtcctccttgcagctggaccagaaggaggactcccaatctcgtcaaggaggctatagtatgcaccagttgcagggcaacaaagagtatggttctgaaaagaagggttacctgctgaaaaagagcgatggcatccgtaaggtgtggcagaggagaaaatgctcggtgaagaacggtatactcaccatatcgcacgctaccagtaacaggcaacctgccaagttgaatcttcttacatgtcaggtcaaacctaatgctgaggataagaaaagtttcgatcttatttcccacaacagaacataccactttcaagctgaggatgaacaagactatgtggcttggatcagcgtccttacgaacagcaaggaggaggccctcacgatggcctttaggggagagcagtccgctggtgaaaattcactggaggatctgacgaaagccatcattgaggacgttcagagattaccaggcaacgatatatgctgtgattgtggctcctcagagcccacatggctgtccacaaacctgggtatcttgacttgcatcgaatgtagtggcatacatagggagatgggggtacacatctctagaatccaatccttggagttggacaagcttggtacatctgagctgcttttagcaaagaatgtgggcaataactctttcaacgacattatggaagccaaccttccctctccttccccgaaaccaacaccctcttctgatatgactgttaggaaagagtacatcaccgcgaagtatgttgaccacagattctcccgcaaaacatgtagtacgtcctccgccaaactgaacgagctcctggaagcaatcaaatcacgagatctgctagccctgatccaggtgtatgcggagggtgtagagctcatggagcccctgcttgaacccggccaggagctaggcgaaacggcactgcacctggccgtgagaaccgctgaccaaacgtcactgcaccttgttgattttctagtccaaaactgtggtaatctggacaagcagaccgctcttggtaatactgtgctccactattgttccatgtattccaagcccgaatgtctgaagctgcttctgaggagtaaaccaacagtcgacattgtgaaccaagctggggaaacagccctggatatcgcaaagaggctcaaggcgacacagtgcgaagacctgttaagccaagcaaagtccggaaaattcaatcctcacgtccatgtcgagtacgaatggaatctgcgccaggaagaaatcgacgaatctgacgacgatctggatgataaaccctccccaattaagaaggaacgtagtcctcgacctcagtccttctgtcactcaagctctatttcaccacaggacaaattagcactgccaggcttcagcactcctcgggacaagcagcgcctgtcttacggagccttcactaatcaaatctttgtgtctacgagcactgattctcctacctcccccacaaccgaggcaccccctctcccacctaggaatgcagggaaggggccaaccgggccccctagcacattgccactgtcaacccagacctcatccgggtctagcactctatccaaaaagcgccctcctcctcctcctccaggtcataaaagaaccttatctgaccctccttcaccactacctcatggcccgccaaataaaggagctgtgccttggggtaacgatggggggccaagttcaagctctaaaactaccaacaagttcgagggactgtcgcaacaatcatcaacttcatccgctaaaaccgccctggggccccgtgtactgcccaagttgcctcagaaagtcgcactgcgcaaaactgaccatctgagtcttgacaaggccactattccacctgaaatttttcagaagtcaagccaactggccgagctaccccaaaaaccaccaccaggagatctaccacccaagcccacggagctggcacccaagccacagataggggatttacctccaaagccgggcgaactgcctcccaaaccacaactaggcgatctacctcccaaacctcagttgtcagacctcccccctaaaccacagatgaaggacctgccgccaaagcctcagcttggagacttgttggcaaagtctcaaactggtgatgtaagccctaaggctcaacagccttccgaggtcaccctaaagtcgcaccccctggacttgtcccctaatgtacagtcgagggatgcaatccagaaacaggcatcggaagactctaacgacttaacgcctacgttaccagaaacgcccgtccccctgccgagaaagatcaatacaggcaaaaataaggtcagaagggtgaagacaatctacgactgtcaggcagataacgatgatgagctgacatttattgagggggaggtcatcattgtgaccggagaggaagatcaggagtggtggatcggtcatattgagggccagcccgaacgtaagggcgtgttccccgtaagctttgttcacatactttctgactag

SEQ ID NO: 198863 - DNA, 3390 bp, Artificial Sequence
  derived and/or modified sequence
atgaggagcagcgccagccggctgagcagcttcagcagccgggacagcctgtggaacaggatgccagaccagatctctgtgtctgagttcatcgccgagaccacagaggactacaacagccccaccaccagcagcttcaccacccggctgcacaactgcaggaacacagtgaccctgctggaggaggccctggaccaggacagaacagccctgcagaaggtgaagaagtctgtgaaggccatctacaacagcggccaggaccacgtgcagaatgaagaaaattatgcccaggtgctggacaagtttggcagcaacttcctgagccgggacaacccagacctgggcacagcctttgtgaagttcagcaccctgaccaaggagctgagcaccctgctgaagaacctgctgcagggcctgagccacaacgtcatcttcaccctggacagcctgctgaagggggacctgaagggcgtgaagggggacctgaagaagccctttgacaaggcctggaaggactatgagaccaagttcaccaagattgagaaggagaagcgggagcacgccaagcagcacggcatgatcagaacagagatcactggagctgagattgctgaggagatggagaaggagaggaggctcttccagctgcagatgtgtgagtacctgatcaaggtgaatgagatcaagaccaagaagggcgtggacctgctgcagaacctgatcaagtactaccacgcccagtgcaacttcttccaggacggcctgaagacagctgacaagctgaagcagtacatcgagaagctggccgctgacctgtacaacatcaagcagacccaggatgaggagaagaagcagctgacagccctgcgggacctgatcaagagcagcctgcagctggaccagaaggaggacagccagagccggcagggcggctacagcatgcaccagctgcagggcaacaaggagtatggcagcgagaagaagggctacctgctgaagaagagtgatggcatcaggaaggtgtggcagaggaggaagtgcagcgtgaagaatggcatcctgaccatcagccacgccaccagcaaccggcagcctgccaagctgaacctgctgacctgccaggtgaagcccaatgctgaggacaagaagagctttgacctgatcagccacaacagaacctaccacttccaggctgaagatgagcaggactatgtggcctggatctctgtgctgaccaacagcaaggaggaggccctgaccatggccttccggggggagcagagcgctggggagaacagcctggaggacctgaccaaggccatcattgaagatgtgcagaggctgcctggaaatgacatctgctgtgactgtggcagcagcgagcccacctggctgagcaccaacctgggcatcctgacctgcatcgagtgcagcggcatccaccgggagatgggcgtgcacatcagccgcatccagagcctggagctggacaagctgggcaccagcgagctgctgctggccaagaatgtgggcaacaacagcttcaatgacatcatggaggccaacctgcccagccccagccccaagcccacccccagcagtgacatgacagtgaggaaggagtacatcacagccaagtatgtggaccaccgcttcagcaggaagacctgcagcaccagcagcgccaagctgaatgagctgctggaggccatcaagagccgggacctgctggccctgatccaggtgtatgcagagggcgtggagctgatggagcccctgctggagcccggccaggagctgggggagacagccctgcacctggccgtgaggacagctgaccagaccagcctgcacctggtggacttcctggtgcagaactgtggcaacctggacaagcagacagccctgggcaacacagtgctgcactactgcagcatgtacagcaagccagaatgtctgaagctgctgctgcggagcaagcccaccgtggacatcgtgaaccaggccggggagacagccctggacatcgccaagaggctgaaggccacccagtgtgaggacctgctgagccaggccaagagcggcaagttcaacccccacgtgcacgtggagtatgagtggaacctgcggcaggaggagattgatgaaagtgatgatgacctggatgacaagcccagccccatcaagaaggagaggagcccccggccccagagcttctgccacagcagcagcatcagcccccaggacaagctggccctgcccggcttcagcaccccccgggacaagcagaggctgtcctatggagccttcaccaaccagatctttgtgtccaccagcacagacagccccaccagccccaccacagaggccccacccctgcccccaagaaatgctgggaagggccccactggaccacccagcaccctgcccctgagcacccagaccagcagcggcagcagcaccctgagcaagaagaggcctcctcctcctcctcctggccacaagaggaccctgagtgacccccccagccccctgccccacggcccccccaacaagggagctgtgccctggggcaatgatggcggccccagcagcagcagcaagaccaccaacaagtttgagggcctgagccagcagagcagcaccagcagcgccaagacagccctgggcccccgggtgctgcccaagctgccccagaaggtggccctgaggaagacagaccacctgagcctggacaaggccaccatccccccagagatcttccagaagagcagccagctggccgagctgccccagaagcccccacctggggacctgccccccaagcccacagagctggcccccaagccccagatcggggacctgccccccaagccaggagagctgccccccaagccccagctgggggacctgccccccaagccccagctgagtgacctgccccccaagccccagatgaaggacctgccccccaagccccagctgggggacctgctggccaagagccagacaggagatgtgagccccaaggcccagcagcccagcgaggtgaccctgaagagccaccccctggacctgagccccaacgtgcagagcagagatgccatccagaagcaggccagcgaggacagcaatgacctgacccccaccctgcctgagacccctgtgcccctgcccaggaagatcaacacaggcaagaacaaggtgcggcgggtgaagaccatctatgactgccaggccgacaatgatgatgagctgaccttcattgaaggagaggtgatcatcgtgactggagaggaggaccaggagtggtggattggccacatcgagggccagcctgagaggaagggcgtcttccctgtgtcctttgtgcacatcctgagtgactag

SEQ ID NO: 198864 - DNA, 3390 bp, Artificial Sequence
  derived and/or modified sequence
atgcggagcagcgccagccggctgagcagcttcagcagccgggactcactctggaacaggatgcctgaccagatttctgtgagcgagtttatcgcggagacaacagaggattacaactcaccaactaccagcagttttacaacccgcttacacaattgccgcaacaccgtaacattgcttgaagaagccttggatcaagaccgtaccgcgctgcagaaggtcaagaagtccgtaaaggccatttacaactcgggccaggatcacgtacagaatgaagagaactacgcccaggtgctggacaagttcggctcgaattttctgtcaagagacaatcctgatcttggaaccgctttcgtcaagttctccactctcactaaggaactctctacattgctgaaaaatctgctgcaaggcctgagccacaatgtgatttttacactggatagtctgttgaaaggggatttgaagggcgtgaaaggtgatctaaagaagccttttgacaaggcatggaaggactatgagacgaagtttactaaaatagagaaagaaaaacgagagcacgctaagcagcacgggatgattcggaccgaaattacaggcgcagagattgctgaagaaatggagaaggaacggcgacttttccagctgcagatgtgcgagtacctgatcaaggtgaacgagatcaaaaccaagaagggcgtcgacctgcttcagaacttaatcaaatactaccacgcacagtgtaacttcttccaggacggcctgaaaaccgcagacaagctgaagcaatatatcgaaaaactcgccgccgatctttataatataaagcagacacaggacgaggaaaagaaacagctcactgccctgcgagatctgattaagtcttccttgcaactagaccagaaggaagactctcaatccagacagggtggatattccatgcaccaactccagggcaataaggagtacgggtctgagaagaaggggtacctactcaaaaagagtgatggcatccgcaaggtttggcagcgacgcaagtgcagcgtgaaaaacgggatccttacaatctctcatgccacatcaaatcgccagccagcaaaactgaacctattaacttgtcaggtcaaacccaatgctgaagacaagaaatcatttgacctgattagccacaatcgaacctaccacttccaagcagaagacgagcaagactatgttgcttggatttcagtactgaccaattctaaagaagaggctctgacaatggctttcagaggcgagcagtcagccggtgagaatagtctagaggatctcacgaaagcaataatcgaggacgtgcagcgactgccgggcaacgatatttgttgcgattgtgggtcaagtgaacccacatggctctccactaaccttgggatcctcacgtgcatagagtgcagcggtatacatagggaaatgggggtccacattagtagaattcagtctttggagcttgacaagctcggaactagcgaactgctcctggctaagaatgtaggcaataattcgtttaatgacatcatggaagcaaaccttccctctcctagccctaagccaacaccttcctctgatatgacagtccgtaaagagtacatcactgcaaagtacgtggaccatcgattctctagaaagacctgctccacatcctcagcaaagttgaacgagctcttagaagcgatcaagtccagagatttgctcgcgctgatacaagtctacgcagaaggcgtcgaattaatggagccacttctggagcccggccaggaactgggagaaaccgcactgcatctagccgtcagaacggccgaccagacatccctgcatctcgtcgacttccttgtgcagaactgtgggaatctggacaagcagaccgccttgggcaatacagtattacactactgttccatgtattcgaaaccagaatgtctgaagttgctgttaagatcaaagcccaccgtggatattgttaaccaagcaggggagactgcattggatatcgccaagcgccttaaggctactcagtgcgaagatcttctgtcacaggccaagtcgggcaaattcaatccgcacgtacatgttgaatatgaatggaatctgcgccaggaggagattgacgaaagcgatgatgacctagatgataagccgagcccaatcaagaaggagcggtcccccaggcctcagtcgttctgtcacagctcctctatatctcctcaagacaagttggcgttaccaggtttctccaccccgagagacaaacagcgtctcagctatggcgcattcacaaaccagatattcgtgtccacgtctacagactctcccacgagccccacaacagaggcccctcctttaccaccgaggaacgccgggaagggcccaaccgggcctccatcgaccctgcccctcagcacacaaacatcgagcggcagctctaccttaagtaagaagcgaccaccgccaccccccccggggcataaaagaactctgtctgatcccccaagcccacttccacacgggccaccaaacaagggggccgtcccgtggggaaatgacggagggccttcgagtagttctaaaaccactaataagtttgaaggccttagtcagcaatcctccaccagtagcgctaaaacagccttgggcccgagagttttgcctaaattaccacaaaaggtggccttgaggaagaccgaccacctgagcctcgataaagcaaccattccgcctgaaatcttccaaaagtcttcgcagctggccgaactgcctcagaaaccaccccccggcgacctgcctccaaagccaacagaacttgcacctaaacctcagattggagacctgccacctaagcccggggaactgccacctaagccgcagctaggagacctccctcccaagccacaactcagtgacctgcctccgaagccccagatgaaggaccttccacccaagccacaacttggcgatctgcttgcgaaaagccagacaggagatgtgtcacctaaggcccagcagccaagcgaagtgacactcaagtcccaccctctggatctgagcccaaacgtgcaatctagagatgccatccagaagcaagcatctgaggactccaacgatttgacccccacactgcccgaaacgcccgtgccacttccccgaaaaattaacacagggaagaacaaggtgcgccgcgtgaaaacaatttatgattgtcaggccgacaatgatgatgagctgacctttatcgaaggggaggtgatcattgtgacgggagaggaagatcaagagtggtggatagggcatatcgagggtcagccggagcgcaagggagtcttccctgtgagcttcgtgcatatcttaagtgactag

SEQ ID NO: 198865 - DNA, 3390 bp, Artificial Sequence
  derived and/or modified sequence
atgcggagcagcgccagccggctgagcagcttcagcagccgggacagcttgtggaatagaatgcctgatcagatctctgtgtctgaattcattgcagagacgaccgaagattacaactcccctacaacttcttcctttaccactcggttacataactgcaggaatacagtcacactgttggaggaagccctagaccaggatcgtacagcgctgcagaaagtgaagaaatctgtcaaagccatttacaactcaggccaggatcatgttcagaatgaggagaattacgctcaggtgctggacaagttcggatcaaattttctcagtcgggataatccggatctggggaccgcctttgtaaaattctcgacactgaccaaagagctgagcactctcttgaagaacctgttacagggtttgagccataacgtcatctttacgctagatagcctgcttaaaggcgatctgaagggcgtgaaaggggatctgaaaaaaccctttgataaagcttggaaggattatgagacaaagtttaccaagatcgaaaaagagaagcgcgaacacgctaaacagcatggaatgattaggaccgagattaccggagcagaaatcgccgaggagatggagaaggaaagaaggctgttccagctgcagatgtgtgagtacctgatcaaagtcaatgagatcaaaaccaagaagggggtggatctgctgcagaacctgataaaatactaccatgcacagtgtaatttctttcaggacgggctgaagaccgccgataagctgaaacagtatatcgagaagctggccgccgatctatacaacatcaagcagacacaggatgaggaaaaaaagcagctgacagctctgagagacctgataaagtcatcgttacagttggaccagaaagaagatagtcaatcaagacagggcggatattcgatgcaccagcttcagggcaataaggaatatggctctgagaagaaaggctatctgctcaaaaagagcgatggtattagaaaggtgtggcaaagaaggaaatgttctgtcaagaatggcatactgacaatatcccatgccactagtaacagacaaccggccaagttaaaccttctgacttgccaagttaagcctaacgccgaagacaagaaaagtttcgacctcataagccacaatcggacttaccatttccaggccgaggacgaacaggattacgtggcctggattagtgtcctcaccaattccaaggaagaagcgctaacgatggcgtttagaggggagcagtcggcaggcgaaaacagtctggaagatctcactaaagctattattgaagacgtacagcgcctgcctgggaacgacatctgctgtgactgtggtagctctgaacccacgtggctcagcaccaacctgggaatcctcacatgtattgagtgcagcggtatccaccgagagatgggcgttcacatttctaggatccaatcactcgaactagataagctggggacctcagagttactgttagccaagaacgtcggcaacaacagcttcaacgacattatggaagctaacctgccctctccctcacctaagcccacgccgagttcagatatgaccgtgcgtaaggagtatatcactgccaaatacgtcgaccatcggttttcaaggaaaacttgttccacatccagtgccaaactaaacgagctgctggaggccatcaagtcccgggaccttttagcactgatccaggtgtacgcagagggtgtggaactgatggaacctctgctggagcccggacaagaactgggagagaccgcactccacttagccgtaagaacagcagaccaaacttctcttcacctggtggatttccttgttcaaaactgcggtaatctcgataagcagactgcccttggtaacacagttctgcactactgttccatgtattccaaacctgaatgtctgaaactcctgctgaggtccaaacctactgtcgacatcgtcaatcaggccggcgagacagctctggacattgccaaacgcctcaaagccacgcagtgtgaggacctgctgtctcaggccaagtctgggaagttcaatccccacgtgcacgtggagtacgagtggaaccttcggcaggaagagatcgacgaaagtgacgatgatttggacgacaagcccagcccgatcaagaaagaaaggtcaccacgccctcagtccttttgccattcatcctccatcagccctcaggacaagttggccctccctggattctccactcccagagataaacagcgtctctcctatggagcttttactaaccaaatattcgtctctacgtctacagactcaccaacgtccccaacaaccgaggctcccccccttccgccgaggaacgccggcaagggtcccactggccctccctccactctcccccttagtactcagacatcaagcggtagtagtacactttctaaaaagcgtccccctcctcctccaccaggccacaagagaacactgtctgatcccccaagcccactgccccatggcccacctaacaagggagctgttccctggggaaatgatggaggccccagctcttccagcaagacaacaaataagttcgaggggctgtcccagcagtcttcaacctccagtgccaagactgccttgggacctagggtgttaccaaagctgccccagaaggtggctttgcgcaaaactgatcacctgagcctggataaggcaaccattccgcctgaaatttttcagaaatccagtcagctggccgaactgccccagaaacccccccctggcgatttgccgcccaagccaactgagttggctccaaagcctcagataggagacctgcctcctaagcctggcgaactgccccctaagcctcagctgggagacctacccccaaaaccccagttgtctgacctgccgcccaagccccaaatgaaggacttgccccccaagccgcagctgggagacctgcttgcaaaatctcagaccggcgatgttagcccaaaggcacaacagccgtcggaggtgacattaaaaagtcaccccctggacctgtcccccaacgtgcagtccagggatgcaattcagaaacaggccagcgaggattcaaacgacctgacacctacccttcccgagacacccgttcccctgccaagaaagatcaacactggcaaaaataaggttagaagagtcaagaccatatatgattgccaagctgataacgatgacgaattaacctttatagagggggaggtgatcatcgttacaggagaggaggatcaagagtggtggatagggcatatagagggacaacccgagcgaaagggggtattccccgttagcttcgtgcacatactgtcagactag

SEQ ID NO: 198866 - DNA, 3390 bp, Artificial Sequence
  derived and/or modified sequence
atgaggagcagcgccagccggctgagctcttttagcagccgtgattctctttggaaccggatgccggaccagatatctgtgtccgagtttattgctgaaactaccgaagattacaatagcccaaccaccagctcgtttacaaccaggctccacaactgtcggaatactgttaccttactcgaagaagccctggatcaagatcgtacggcccttcagaaagttaaaaaatctgtgaaggctatatataatagcggccaggatcacgtgcaaaacgaggaaaactatgcccaggtgctcgacaagtttggtagcaatttcctttccagggacaaccccgatctgggtacagcctttgtaaagttctctacactgacaaaagaactttcgacgctactcaagaacctgctccagggcctctcacacaatgtgatcttcactctggacagtctcctgaaaggagacctgaagggcgttaagggcgaccttaagaagccttttgataaggcgtggaaggactacgaaacaaagttcactaagatcgagaaggaaaagagagaacatgctaagcaacatgggatgatccgcacggaaatcacaggggctgagattgcggaggagatggaaaaagaaaggcgcttgtttcagttgcagatgtgcgagtatctgattaaagttaatgaaattaagactaagaagggtgtggacctactgcagaatttaataaagtactatcacgcccaatgcaattttttccaagacgggctgaagacggctgacaagctaaagcagtacatcgagaaactagcggctgacctgtacaacattaaacaaacgcaggacgaagaaaagaaacaacttacagccctcagagatctcattaagtcttcactgcagctggaccaaaaagaggactcccagtccaggcaggggggatactccatgcatcagctccagggcaacaaggagtacggctctgagaagaaaggatatctgttgaaaaaatccgatggaattcgaaaggtgtggcaaaggagaaagtgttctgtgaaaaatgggatcctaactatttcccacgccacaagcaataggcagcccgctaagctgaaccttttgacttgccaggtaaaacccaatgctgaagacaagaagtccttcgatctgattagtcacaataggacataccactttcaggctgaggacgagcaggactatgttgcctggatctccgtcctgaccaactccaaggaggaggccttaaccatggcttttcgaggcgagcagtccgccggtgagaattctctggaagatctgaccaaggcgatcattgaagacgttcaaaggctccctggaaatgacatatgctgcgactgcggttcttctgagccaacttggcttagcacaaaccttggaattttaacgtgtatagagtgttccggcatccaccgcgagatgggcgttcacatatccagaatccaatctctggagctggataaactcggcacctctgagctgctccttgcaaagaacgtcggaaacaactcatttaatgatatcatggaggccaacctgcctagcccctctccaaagcccactcccagctcggacatgacagtcagaaaagaatatatcacagctaagtacgttgaccatagattctctaggaaaacgtgctctacgagcagtgcgaagctcaatgaactattagaggctataaagagcagagatctactggcattgatccaggtgtatgccgagggagtcgagctgatggaacccctgctggagccaggacaggagctgggggaaaccgccttacacctggctgtgcgcaccgcagaccagacatccctgcacctcgtggactttctggttcaaaattgtggtaacctggacaagcagacggcactcgggaacaccgtgctccactattgtagcatgtacagtaaacccgaatgcctgaaactgttacttaggtccaagccaactgtagacattgtgaaccaggctggcgagacagctttggacattgctaaaagactcaaagccacacagtgcgaggatttattgtctcaagccaaatcgggtaaatttaatcctcacgtccatgtggagtacgagtggaatctcagacaggaagagatcgatgaatccgatgacgacctcgatgataagccctcacctattaaaaaggagaggtcgcctagaccccagagcttttgtcatagcagctctattagtcctcaagacaaactcgccctccccggtttctcgacccctagagacaagcagcgattgtcatatggagcctttacaaaccagatttttgtttccacatccacagactctcctacaagcccgactaccgaagccccaccacttccaccgagaaatgcaggtaaaggcccaactggcccacccagtaccctgccgctgtctacccagacctcatccgggagcagcacgctctctaagaagcgacctcctccccctcctcccggacacaaaaggacacttagtgatccaccttcaccactgccacatggccctcctaacaagggggcagtaccgtggggaaatgatgggggaccaagcagttcctccaagaccaccaacaagttcgaggggctgtcccagcaaagctccactagcagtgcaaaaacggctctcggccctagagtcctgccaaagcttccccagaaagtggcactgcgtaagacagaccatttatccttagacaaagccacaattcctccggagatctttcagaaaagttctcagctcgcagagctgcctcagaagccccctccaggtgacctcccacctaagccgactgaacttgcgcctaaaccgcagatcggcgaccttccacccaaaccaggcgaattaccccctaagcctcaactcggtgatctccctccaaaaccccagctctctgatctccccccaaaaccccagatgaaggatctgcctccaaagcctcagttgggtgacttgcttgcgaagtctcagaccggggacgttagtcctaaggcccagcagccaagtgaggtgacccttaaatcccatccgttggatctgagtccaaatgtccagtctcgagacgccattcagaagcaggcctccgaggattccaacgatctcacgcccacccttcccgaaactccggtcccccttcctagaaaaatcaataccgggaaaaacaaagtgagaagggtcaagaccatctatgattgtcaggcagataacgacgacgagctcacgtttattgaaggcgaggttataattgttactggagaagaagaccaagaatggtggatcggacatatcgaaggccagcctgagagaaagggcgtattcccagtgagttttgttcatatactgtctgattag

SEQ ID NO: 198867 - DNA, 3390 bp, Artificial Sequence
  derived and/or modified sequence
atgcgatcctctgcttccagactctccagcttttcgagtcgggacagcttatggaataggatgcccgaccagatttcggtgtctgaattcatcgccgaaaccaccgaggactataatagccctactactagctccttcactacccgattgcataactgccgaaatacagtgacacttttggaagaggcgctggaccaggatcggacagccctccagaaggtcaagaagtcggttaaagccatttataacagcggccaggaccacgtccagaatgaggaaaattacgcccaggtgttggacaagtttgggtccaatttcctgtcaagggataaccctgatctgggcaccgcattcgtgaaattcagcacactaactaaagagctgagcaccctgctgaagaacctcctccaaggactaagccacaatgtcattttcacattggacagcttgctgaaaggggacttgaagggggtgaagggcgatctaaagaagccctttgataaggcgtggaaggactatgagaccaaattcacaaagatcgagaaggagaagagggaacacgctaaacagcatgggatgattcgcactgaaatcactggcgcagaaatcgccgaggagatggagaaagagcgtcgactcttccagctccagatgtgcgagtatctgatcaaggtgaatgagatcaaaacgaaaaagggcgtagaccttcttcagaatctcataaaatattaccatgcccagtgcaactttttccaggacggactcaagacagcagacaagttgaagcagtatattgaaaagctggcagctgacctgtataatatcaagcagacccaggatgaagagaagaagcagctcactgccctgagggatcttattaagtcctcactgcagcttgaccagaaagaggactcacagagcaggcaggggggttattctatgcatcaactgcaggggaacaaggagtacggttccgagaagaaggggtacttgctaaagaaatccgatggcatacgcaaggtttggcagcggagaaagtgctccgtcaaaaacgggattctcactatttctcacgcaacctctaaccgccaaccggcaaaactgaacctgctcacctgtcaggtgaagcctaacgcagaggataaaaagtctttcgatctaatctcccacaatcggacctaccattttcaggcggaggatgagcaagactacgtggcatggattagtgtgctgaccaactctaaggaggaggcccttaccatggccttcagaggtgaacagagcgctggcgagaacagtttagaggacctgacgaaggctatcatcgaggacgtccaacgcctgcccggaaacgatatttgctgcgactgcggatcatccgagcccacatggctgtctaccaacctcggcatactaacttgcattgaatgttcgggtattcacagagaaatgggggtgcacatttcccgcatccagtcgttagaactggacaaactcggcacctccgagctgctccttgccaaaaacgtggggaacaatagcttcaatgacattatggaggcgaatctgccctctccgagtcctaaacctaccccctcttcagatatgaccgtccgcaaagagtatatcactgctaaatatgttgaccaccgcttcagccgcaagacttgctccaccagctccgcgaaattgaatgaattactagaggccatcaaatctagggacctcttggctcttattcaagtgtatgcggagggggtggaactgatggaaccgttgttagaaccgggacaggagcttggagagaccgccttgcacctggccgtgcggaccgccgaccagactagtctgcatttggtcgactttctggtacaaaattgtgggaacctggacaaacagactgccctcgggaacacggttctgcactattgctcgatgtatagtaaacccgagtgcctcaaactcttgctgcgttccaaaccgacagtcgacatcgtcaatcaggcaggtgagacagccttagatatcgccaagaggctgaaggctacccagtgtgaggatctgctaagccaggccaaatccggaaaatttaacccccatgtgcacgtagagtacgagtggaaccttagacaggaggaaatcgatgaaagtgacgacgacctagatgacaagccgtctccaatcaagaaggagagatcccctcggccacagagcttctgccacagttccagtatatccccccaggataaattagcactaccagggttttccacacctagagacaagcagcggctttcgtatggtgcattcactaaccaaatctttgtctccacctctaccgatagtcccacgtcgcctactactgaggctcctccacttcctccccgtaatgccggaaagggtccaactgggcctccttctactctgcccctctcaactcagaccagtagcgggagctccacactctctaaaaaacgccctcccccaccaccaccaggacacaagcggaccctctctgatcccccatcaccacttccccacggaccaccaaacaaaggggcagtgccatgggggaacgacggcggaccaagcagttctagtaagacaactaataaattcgaggggttgtcacagcaaagcagcacctcatcagccaagaccgccctagggccacgggtgctgcccaaacttccccagaaggtcgcactgcggaagaccgaccacctaagtctcgataaagctaccatccctccagaaattttccaaaagagtagccagctggctgagttgcctcaaaagccccctccaggagatctgcccccaaagcctactgaactggcccctaaaccgcaaatcggcgacctcccacccaaaccaggtgaattgcccccaaagccgcagctcggggatttacccccaaaacctcagctctctgacctgccgcctaagccgcagatgaaggatctgccaccaaagccccaactgggcgatttactggcaaaaagccaaacaggagatgtcagccctaaagctcagcagcctagtgaggtgactctgaagtcccacccactcgacctctcaccaaacgtgcagtcaagagacgccattcagaaacaggcttcagaggatagcaacgacctgactcccacacttcctgagacacctgtgcccctcccaagaaaaatcaataccggaaagaataaagtccgcagggttaaaacaatttatgactgtcaggccgataacgatgacgaactcacatttatcgagggggaagtgatcattgtaactggagaggaggaccaagaatggtggatcggacatattgaaggccagcctgagaggaaaggagtattcccagtgagctttgtgcacatcctatccgactag

SEQ ID NO: 198868 - DNA, 6042 bp, Artificial Sequence
  derived and/or modified sequence
ggtcgttttctgatgtgacggctgagacatgagatcttcagcctccaggctctccagtttttcgtcgagagattcactatggaatcggatgccggaccagatctctgtctcggagttcatcgccgagaccaccgaggactacaactcgcccaccacgtccagcttcaccacgcggctgcacaactgcaggaacaccgtcacgctgctggaggaggctctagaccaagatagaacagcccttcagaaagtgaagaagtctgtaaaagcaatatataattctggtcaagatcatgtacaaaatgaagaaaactatgcacaagttcttgataagtttgggagtaattttttaagtcgagacaaccccgaccttggcaccgcgtttgtcaagttttctactcttacaaaggaactgtccacactgctgaaaaatctgctccagggtttgagccacaatgtgatcttcaccttggattctttgttaaaaggagacctaaagggagtcaaaggagatctcaagaagccatttgacaaagcctggaaagattatgagacaaagtttacaaaaattgagaaagagaaaagagagcacgcaaaacaacatgggatgatccgcacagagataacaggagctgagattgcggaagaaatggagaaggaaaggcgcctctttcagctccaaatgtgtgaatatctcattaaagttaatgaaatcaagaccaaaaagggtgtggatctgctgcagaatcttataaagtattaccatgcacagtgcaatttctttcaagatggcttgaaaacagctgataagttgaaacagtacattgaaaaactggctgctgatttatataatataaaacagacccaggatgaagaaaagaaacagctaactgcactccgagacttaataaaatcctctcttcaactggatcagaaagaagattctcagagccggcaaggaggatacagcatgcatcagctccagggcaataaggaatatggcagtgaaaagaaggggtacctgctaaagaaaagtgacgggatccggaaagtatggcagaggaggaagtgttcagtcaagaatgggattctgaccatctcacatgccacatctaacaggcaaccagccaagttgaaccttctcacctgccaagtaaaacctaatgccgaagacaaaaaatcttttgacctgatatcacataatagaacatatcactttcaggcagaagatgagcaggattatgtagcatggatatcagtattgacaaatagcaaagaagaggccctaaccatggccttccgtggagagcagagtgcgggagagaacagcctggaagacctgacaaaagccattattgaggatgtccagcggctcccagggaatgacatttgctgcgattgtggctcatcagaacccacctggctttcaaccaacttgggtattttgacctgtatagaatgttctggcatccatagggaaatgggggttcatatttctcgcattcagtctttggaactagacaaattaggaacttctgaactcttgctggccaagaatgtaggaaacaatagttttaatgatattatggaagcaaatttacccagcccctcaccaaaacccaccccttcaagtgatatgactgtacgaaaagaatatatcactgcaaagtatgtagatcataggttttcaaggaagacctgttcaacttcatcagctaaactaaatgaattgcttgaggccatcaaatccagggatttacttgcactaattcaagtctatgcagaaggggtagagctaatggaaccactgctggaacctgggcaggagcttggggagacagcccttcaccttgccgtccgaactgcagatcagacatctctccatttggttgacttccttgtacaaaactgtgggaacctggataagcagacggccctgggaaacacagttctacactactgtagtatgtacagtaaacctgagtgtttgaagcttttgctcaggagcaagcccactgtggatatagttaaccaggctggagaaactgccctagacatagcaaagagactaaaagctacccagtgtgaagatctgctttcccaggctaaatctggaaagttcaatccacacgtccacgtagaatatgagtggaatcttcgacaggaggagatagatgagagcgatgatgatctggatgacaaaccaagccctatcaagaaagagcgctcacccagacctcagagcttctgccactcctccagcatctccccccaggacaagctggcactgccaggattcagcactccaagggacaaacagcggctctcctatggagccttcaccaaccagatcttcgtttccacaagcacagactcgcccacatcaccaaccacggaggctccccctctgcctcctaggaacgccgggaaaggtccaactggcccaccttcaacactccctctaagcacccagacctctagtggcagctccaccctatccaagaagaggcctcctcccccaccacccggacacaagagaaccctatccgaccctcccagcccactacctcatgggcccccaaacaaaggcgcagttccttggggtaacgatgggggtccatcctcttcaagtaagactacaaacaagtttgagggactatcccagcagtcgagcaccagttctgcaaagactgcccttggcccaagagttcttcctaaactacctcagaaagtggcactaaggaaaacagatcatctctccctagacaaagccaccatcccgcccgaaatctttcagaaatcatcacagttggcagagttgccacaaaagccaccacctggagacctgcccccaaagcccacagaactggcccccaagccccaaattggagatttgccgcctaagccaggagaactgccccccaaaccacagctgggggacctgccacccaaaccccaactctcagacttacctcccaaaccacagatgaaggacctgccccccaaaccacagctgggagacctgctagcaaaatcccagactggagatgtctcacccaaggctcagcaaccctctgaggtcacactgaagtcacacccattggatctatccccaaatgtgcagtccagagacgccatccaaaagcaagcatctgaagactccaacgacctcacgcctactctgccagagacgcccgtaccactgcccagaaaaatcaatacggggaaaaataaagtgaggcgagtgaagaccatttatgactgccaggcagacaacgatgacgagctcacattcatcgagggagaagtgattatcgtcacaggggaagaggaccaggagtggtggattggccacatcgaaggacagcctgaaaggaagggggtctttccagtgtcctttgttcatatcctgtctgactagcaaaacgcagaaccttaagattgtccacatccttcatgcaagactgctgccttcatgtaaccctgggcacagtgtgtatatagctgctgttacagagtaagaaactcatggaagggccacctcaggagggggatataatgtgtgttgtaaatatcctgtggttttctgccttcaccagtatgagggtagcctcggacccggcgcgccttactggtttgccaaagccatccttggcatctagcacttacatctctctatgctgttctacaagcaaacaaacaaaaataggagtataggaactgctggctttgcaaatagaagtggtctccagcaaccgttgaaaggcatagaattgactctgttcctaacaatgcagtattctcaattgtgttactgaaaatgcaacattagcaaagaggtgggttctgttttccaggtgaaacttttagctccatgacagaccagcctgtagttatctgtgtacacagtttacagctacaaaaacctactttggtatttattacagaaaagtgctcagttaaatgtaagtgttattccttcagcaaaatattcactgacccaaaactctttatggcattttacaatgcacacagcctcatgcaagtttagacaagtggatttatactgtcttatgagtgcccgcccctgatatattacctcattatgcaaaaataacatatctttcatgactattttgacaaaagtttaaaacacatatgaagttcaaatttcaggaaccaaggactgccagaaaatattagcctctacattacgcatgcatttagaagcttacctgaaatctgccttttataaaggaatagtatggataagtggaattgtacattttttaaacttgattgccattaaagcagaaattataaggttgcaacaatatttgtttctaatcactggctttctcaagagtatggattgacatattgtgttatgaatgcacatctctcagatgtgttgaagcatccattgcatccattttttattattttcttagttttgttcttggacaaatttaaacttttaaaagattattcaagatgaatttaaaagtcaacccttcacacagtttccctactgtatgtagaatccaggtgctgaaaccaagtgtttcttttcccatgctctttgttaaaccccaattatagataatttttccagtcttaagctctgtccaccttcaagtcaattcataaccaagtttttgaacgctgctatgaattgcactgtgaaaagcactcttccctctcagttttcttttcatcccagccatgtttatcagatccttaagaacattgtatttcagtcttttacatcagtctgaattttggaaaagaatgcaatagttgtactccacagtcagtggaactgttccctgagtccgaggctcatgtgtcattctggcactacatttgcttaaattgctattttggcaacagcacagaaaactaatatttttaagcagagaatcttggcaatgagtgagagatgttaatttcacagaagcacaactcccaacccaacccttaggaaaagccctcttccatcgttacagtgctcagtgaatattaatttagttctgcttaagtggttgctatacaaactttgaatagccacctaataaataaaccttgcatgacaaacctgcaaaatattttatcagctgttattggaaagtgattttaagcaattgcttcctcagtgtcagggcacatgtgaatttccacaccaaacagagcatgaggaaccagttgacatgctgggttgtgactggcagctttagcagcctcggtactgaagccacaccagtgtccggatggaagtctgcatctgaggttgctcagtgtcccggtcattcatttacacattttaacttgcattaaagagctgttcttttctgtggcctagactcttttcactgatctcaaaataaactggtttttttcaaaaaaaaaaaaaaaacaaaaacaaaaaaaaaacacaaaagctgcatgtctaaaattacatggagttagtgtctattctttttccccttttgcagcaacttacacagcatttttaacaccttttttttctagtttttttgttcggttttgttttccatcaggaatttgagttctctctaacccagcttactgtgggacataggaaaactcagtagaaatacctttggtgatcttgttgagtttaagtctgatcttgatcttaaactcagtaagccactatctgcaattttgtacattatatagtattttgaagatatggaaccttatgaaaaaaaaatagcaaattagttctttttcccccagaggggaaagttatgttctgcaaatagtgtgtgtcttattttactgttgaacagcaattgctatttatttttttattgcctagaacttcaacatgttgtataggaatcctgtagtgccactagttaaatgccgaattctcatctggatgttaccatcaaacatcagtacacttgtcatttcacatgtgtttaatgtgacagtttttcagtactgtatgtgttaatttctactttttttaatatttaaaattgcttttaaataaacatattctcagttgatccc

SEQ ID NO: 198869 - DNA, 5507 bp, Artificial Sequence
  derived and/or modified sequence
cccttcctgcgccgcgctcggctcccgcgcctcgcctggcctggccgctgccgcgggcgagcactgtgcgctgggcagccccgggcccgcgcctcccgcccagccggcgcttcccggtcgcagttcgctttcccacccgagagccgcgagcgcccggccgaacccgcgatggaataatgcccagcggcccgccaggtcccggtcgttttctgatgtgacggctgagacatgagatcttcagcctccaggctctccagtttttcgtcgagagattcactatggaatcggatgccggaccagatctctgtctcggagttcatcgccgagaccaccgaggactacaactcgcccaccacgtccagcttcaccacgcggctgcacaactgcaggaacaccgtcacgctgctggaggaggctctagaccaagatagaacagcccttcagaaagtgaagaagtctgtaaaagcaatatataattctggtcaagatcatgtacaaaatgaagaaaactatgcacaagttcttgataagtttgggagtaattttttaagtcgagacaaccccgaccttggcaccgcgtttgtcaagttttctactcttacaaaggaactgtccacactgctgaaaaatctgctccagggtttgagccacaatgtgatcttcaccttggattctttgttaaaaggagacctaaagggagtcaaaggagatctcaagaagccatttgacaaagcctggaaagattatgagacaaagtttacaaaaattgagaaagagaaaagagagcacgcaaaacaacatgggatgatccgcacagagataacaggagctgagattgcggaagaaatggagaaggaaaggcgcctctttcagctccaaatgtgtgaatatctcattaaagttaatgaaatcaagaccaaaaagggtgtggatctgctgcagaatcttataaagtattaccatgcacagtgcaatttctttcaagatggcttgaaaacagctgataagttgaaacagtacattgaaaaactggctgctgatttatataatataaaacagacccaggatgaagaaaagaaacagctaactgcactccgagacttaataaaatcctctcttcaactggatcagaaagaagattctcagagccggcaaggaggatacagcatgcatcagctccagggcaataaggaatatggcagtgaaaagaaggggtacctgctaaagaaaagtgacgggatccggaaagtatggcagaggaggaagtgttcagtcaagaatgggattctgaccatctcacatgccacatctaacaggcaaccagccaagttgaaccttctcacctgccaagtaaaacctaatgccgaagacaaaaaatcttttgacctgatatcacataatagaacatatcactttcaggcagaagatgagcaggattatgtagcatggatatcagtattgacaaatagcaaagaagaggccctaaccatggccttccgtggagagcagagtgcgggagagaacagcctggaagacctgacaaaagccattattgaggatgtccagcggctcccagggaatgacatttgctgcgattgtggctcatcagaacccacctggctttcaaccaacttgggtattttgacctgtatagaatgttctggcatccatagggaaatgggggttcatatttctcgcattcagtctttggaactagacaaattaggaacttctgaactcttgctggccaagaatgtaggaaacaatagttttaatgatattatggaagcaaatttacccagcccctcaccaaaacccaccccttcaagtgatatgactgtacgaaaagaatatatcactgcaaagtatgtagatcataggttttcaaggaagacctgttcaacttcatcagctaaactaaatgaattgcttgaggccatcaaatccagggatttacttgcactaattcaagtctatgcagaaggggtagagctaatggaaccactgctggaacctgggcaggagcttggggagacagcccttcaccttgccgtccgaactgcagatcagacatctctccatttggttgacttccttgtacaaaactgtgggaacctggataagcagacggccctgggaaacacagttctacactactgtagtatgtacagtaaacctgagtgtttgaagcttttgctcaggagcaagcccactgtggatatagttaaccaggctggagaaactgccctagacatagcaaagagactaaaagctacccagtgtgaagatctgctttcccaggctaaatctggaaagttcaatccacacgtccacgtagaatatgagtggaatcttcgacaggaggagatagatgagagcgatgatgatctggatgacaaaccaagccctatcaagaaagagcgctcacccagacctcagagcttctgccactcctccagcatctccccccaggacaagctggcactgccaggattcagcactccaagggacaaacagcggctctcctatggagccttcaccaaccagatcttcgtttccacaagcacagactcgcccacatcaccaaccacggaggctccccctctgcctcctaggaacgccgggaaaggtccaactggcccaccttcaacactccctctaagcacccagacctctagtggcagctccaccctatccaagaagaggcctcctcccccaccacccggacacaagagaaccctatccgaccctcccagcccactacctcatgggcccccaaacaaaggcgcagttccttggggtaacgatgggggtccatcctcttcaagtaagactacaaacaagtttgagggactatcccagcagtcgagcaccagttctgcaaagactgcccttggcccaagagttcttcctaaactacctcagaaagtggcactaaggaaaacagatcatctctccctagacaaagccaccatcccgcccgaaatctttcagaaatcatcacagttggcagagttgccacaaaagccaccacctggagacctgcccccaaagcccacagaactggcccccaagccccaaattggagatttgccgcctaagccaggagaactgccccccaaaccacagctgggggacctgccacccaaaccccaactctcagacttacctcccaaaccacagatgaaggacctgccccccaaaccacagctgggagacctgctagcaaaatcccagactggagatgtctcacccaaggctcagcaaccctctgaggtcacactgaagtcacacccattggatctatccccaaatgtgcagtccagagacgccatccaaaagcaagcatctgaagactccaacgacctcacgcctactctgccagagacgcccgtaccactgcccagaaaaatcaatacggggaaaaataaagtgaggcgagtgaagaccatttatgactgccaggcagacaacgatgacgagctcacattcatcgagggagaagtgattatcgtcacaggggaagaggaccaggagtggtggattggccacatcgaaggacagcctgaaaggaagggggtctttccagtgtcctttgttcatatcctgtctgactagcaaaacgcagaaccttaagattgtccacatccttcatgcaagactgctgccttcatgtaaccctgggcacagtgtgtatatagctgctgttacagagtaagaaactcatggaagggccacctcaggagggggatataatgtgtgttgtaaatatcctgtggttttctgccttcaccagtatgagggtagcctcggacccggcgcgccttactggtttgccaaagccatccttggcatctagcacttacatctctctatgctgttctacaagcaaacaaacaaaaataggagtataggaactgctggctttgcaaatagaagtggtctccagcaaccgttgaaaggcatagaattgactctgttcctaacaatgcagtattctcaattgtgttactgaaaatgcaacattagcaaagaggtgggttctgttttccaggtgaaacttttagctccatgacagaccagcctgtagttatctgtgtacacagtttacagctacaaaaacctactttggtatttattacagaaaagtgctcagttaaatgtaagtgttattccttcagcaaaatattcactgacccaaaactctttatggcattttacaatgcacacagcctcatgcaagtttagacaagtggatttatactgtcttatgagtgcccgcccctgatatattacctcattatgcaaaaataacatatctttcatgactattttgacaaaagtttaaaacacatatgaagttcaaatttcaggaaccaaggactgccagaaaatattagcctctacattacgcatgcatttagaagcttacctgaaatctgccttttataaaggaatagtatggataagtggaattgtacattttttaaacttgattgccattaaagcagaaattataaggttgcaacaatatttgtttctaatcactggctttctcaagagtatggattgacatattgtgttatgaatgcacatctctcagatgtgttgaagcatccattgcatccattttttattattttcttagttttgttcttggacaaatttaaacttttaaaagattattcaagatgaatttaaaagtcaacccttcacacagtttccctactgtatgtagaatccaggtgctgaaaccaagtgtttcttttcccatgctctttgttaaaccccaattatagataatttttccagtcttaagctctgtccaccttcaagtcaattcataaccaagtttttgaacgctgctatgaattgcactgtgaaaagcactcttccctctcagttttcttttcatcccagccatgtttatcagatccttaagaacattgtatttcagtcttttacatcagtctgaattttggaaaagaatgcaatagttgtactccacagtcagtggaactgttccctgagtccgaggctcatgtgtcattctggcactacatttgcttaaattgctattttggcaacagcacagaaaactaatatttttaagcagagaatcttggcaatgagtgagagatgttaatttcacagaagcacaactcccaacccaacccttaggaaaagccctcttccatcgttacagtgctcagtgaatattaatttagttctgcttaagtggttgctatacaaactttgaatagccacctaataaataaaccttgcatgacaaacctgcaaaatattttatcagctgttattggaaagtgattttaagcaattgcttcctcagtgtcagggcacatgtgaatttccacaccaaacagagcatgaggaaccagttgacatgctgggttgtgactggcagctttagcagcctcggtactgaagccacaccagtgtccggatggaagtctgcatctgaggttgctcagtgtcccggtcat

SEQ ID NO: 198870 - DNA, 3390 bp, Artificial Sequence
  derived and/or modified sequence
atgagaagcagcgccagcagactgagcagcttcagcagcagagacagcctgtggaacagaatgcccgaccagatcagcgtgagcgagttcatcgccgagaccaccgaggactacaacagccccaccaccagcagcttcaccaccagactgcacaactgcagaaacaccgtgaccctgctggaggaggccctggaccaggacagaaccgccctgcagaaggtgaagaagagcgtgaaggccatctacaacagcggccaggaccacgtgcagaacgaggagaactacgcccaggtgctggacaagttcggcagcaacttcctgagcagagacaaccccgacctgggcaccgccttcgtgaagttcagcaccctgaccaaggagctgagcaccctgctgaagaacctgctgcagggcctgagccacaacgtgatcttcaccctggacagcctgctgaagggcgacctgaagggcgtgaagggcgacctgaagaagcccttcgacaaggcctggaaggactacgagaccaagttcaccaagatcgagaaggagaagagagagcacgccaagcagcacggcatgatcagaaccgagatcaccggcgccgagatcgccgaggagatggagaaggagagaagactgttccagctgcagatgtgcgagtacctgatcaaggtgaacgagatcaagaccaagaagggcgtggacctgctgcagaacctgatcaagtactaccacgcccagtgcaacttcttccaggacggcctgaagaccgccgacaagctgaagcagtacatcgagaagctggccgccgacctgtacaacatcaagcagacccaggacgaggagaagaagcagctgaccgccctgagagacctgatcaagagcagcctgcagctggaccagaaggaggacagccagagcagacagggcggctacagcatgcaccagctgcagggcaacaaggagtacggcagcgagaagaagggctacctgctgaagaagagcgacggcatcagaaaggtgtggcagagaagaaagtgcagcgtgaagaacggcatcctgaccatcagccacgccaccagcaacagacagcccgccaagctgaacctgctgacctgccaggtgaagcccaacgccgaggacaagaagagcttcgacctgatcagccacaacagaacctaccacttccaggccgaggacgagcaggactacgtggcctggatcagcgtgctgaccaacagcaaggaggaggccctgaccatggccttcagaggcgagcagagcgccggcgagaacagcctggaggacctgaccaaggccatcatcgaggacgtgcagagactgcccggcaacgacatctgctgcgactgcggcagcagcgagcccacctggctgagcaccaacctgggcatcctgacctgcatcgagtgcagcggcatccacagagagatgggcgtgcacatcagcagaatccagagcctggagctggacaagctgggcaccagcgagctgctgctggccaagaacgtgggcaacaacagcttcaacgacatcatggaggccaacctgcccagccccagccccaagcccacccccagcagcgacatgaccgtgagaaaggagtacatcaccgccaagtacgtggaccacagattcagcagaaagacctgcagcaccagcagcgccaagctgaacgagctgctggaggccatcaagagcagagacctgctggccctgatccaggtgtacgccgagggcgtggagctgatggagcccctgctggagcccggccaggagctgggcgagaccgccctgcacctggccgtgagaaccgccgaccagaccagcctgcacctggtggacttcctggtgcagaactgcggcaacctggacaagcagaccgccctgggcaacaccgtgctgcactactgcagcatgtacagcaagcccgagtgcctgaagctgctgctgagaagcaagcccaccgtggacatcgtgaaccaggccggcgagaccgccctggacatcgccaagagactgaaggccacccagtgcgaggacctgctgagccaggccaagagcggcaagttcaacccccacgtgcacgtggagtacgagtggaacctgagacaggaggagatcgacgagagcgacgacgacctggacgacaagcccagccccatcaagaaggagagaagccccagaccccagagcttctgccacagcagcagcatcagcccccaggacaagctggccctgcccggcttcagcacccccagagacaagcagagactgagctacggcgccttcaccaaccagatcttcgtgagcaccagcaccgacagccccaccagccccaccaccgaggccccccccctgccccccagaaacgccggcaagggccccaccggcccccccagcaccctgcccctgagcacccagaccagcagcggcagcagcaccctgagcaagaagagaccccccccccccccccccggccacaagagaaccctgagcgacccccccagccccctgccccacggcccccccaacaagggcgccgtgccctggggcaacgacggcggccccagcagcagcagcaagaccaccaacaagttcgagggcctgagccagcagagcagcaccagcagcgccaagaccgccctgggccccagagtgctgcccaagctgccccagaaggtggccctgagaaagaccgaccacctgagcctggacaaggccaccatcccccccgagatcttccagaagagcagccagctggccgagctgccccagaagcccccccccggcgacctgccccccaagcccaccgagctggcccccaagccccagatcggcgacctgccccccaagcccggcgagctgccccccaagccccagctgggcgacctgccccccaagccccagctgagcgacctgccccccaagccccagatgaaggacctgccccccaagccccagctgggcgacctgctggccaagagccagaccggcgacgtgagccccaaggcccagcagcccagcgaggtgaccctgaagagccaccccctggacctgagccccaacgtgcagagcagagacgccatccagaagcaggccagcgaggacagcaacgacctgacccccaccctgcccgagacccccgtgcccctgcccagaaagatcaacaccggcaagaacaaggtgagaagagtgaagaccatctacgactgccaggccgacaacgacgacgagctgaccttcatcgagggcgaggtgatcatcgtgaccggcgaggaggaccaggagtggtggatcggccacatcgagggccagcccgagagaaagggcgtgttccccgtgagcttcgtgcacatcctgagcgactag

SEQ ID NO: 198871 - protein, 550 aa, Artificial Sequence
  derived and/or modified sequence
MAFSKLLEQAGGVGLFQTLQVLTFILPCLMIPSQMLLENFSAAIPGHRCWTHMLDNGSAVSTNMTPKALLTISIPPGPNQGPHQCRRFRQPQWQLLDPNATATSWSEADTEPCVDGWVYDRSVFTSTIVAKWDLVCSSQGLKPLSQSIFMSGILVGSFIWGLLSYRFGRKPMLSWCCLQLAVAGTSTIFAPTFVIYCGLRFVAAFGMAGIFLSSLTLMVEWTTTSRRAVTMTVVGCAFSAGQAALGGLAFALRDWRTLQLAASVPFFAISLISWWLPESARWLIIKGKPDQALQELRKVARINGHKEAKNLTIEVLMSSVKEEVASAKEPRSVLDLFCVPVLRWRSCAMLVVNFSLLISYYGLVFDLQSLGRDIFLLQALFGAVDFLGRATTALLLSFLGRRTIQAGSQAMAGLAILANMLVPQDLQTLRVVFAVLGKGCFGISLTCLTIYKAELFPTPVRMTADGILHTVGRLGAMMGPLILMSRQALPLLPPLLYGVISIASSLVVLFFLPETQGLPLPDTIQDLESQKSTAAQGNRQEAVTVESTSL

SEQ ID NO: 198872 - DNA, 1653 bp, Artificial Sequence
  derived and/or modified sequence
atggcattctccaaattgctagagcaagccggcggggttggcctgtttcaaacactgcaggtacttacctttattctaccttgtctaatgattccttcacagatgctgctggaaaattttagcgcggccattccaggccacagatgttggactcatatgcttgataacggatcagccgttagtacaaacatgacccctaaagctttgcttacaatctctattccgccagggcccaatcagggaccccaccagtgtaggcgtttcagacaaccccagtggcagctcctcgatcctaatgcaacagctacgagttggtcagaggccgacacagagccctgtgtggatggatgggtgtacgacaggtccgtgtttaccagtacgatcgtggcaaagtgggacctggtctgctcatctcaagggctgaaacctctcagtcagagcatcttcatgtcaggcattctcgtgggatcctttatctgggggctcctgtcctaccgcttcggtaggaagccaatgctttcctggtgttgcctgcagctagctgttgccgggacctctacaatattcgccccgaccttcgtgatctattgcgggctgcggttcgtcgcagcctttggcatggccggcatcttcctttccagtctgacactgatggttgaatggacgaccactagccgtcgggcggtcaccatgactgtggttggctgcgctttctccgctggacaagcagcactcggcggcttggcattcgcactgagagactggcgcacactgcagctagcggcaagcgtgcccttctttgcaatctccctgatctcctggtggctccccgagtctgcacggtggctaatcattaaaggaaagccggatcaagcgctgcaagagctgagaaaggtggcacgaattaacgggcacaaagaagccaaaaatctgacaattgaggtcctcatgagttcggtgaaggaggaggtggcctcggccaaagaaccaagaagcgtcttagacttattttgcgtccccgtgctgagatggagatcatgtgctatgttggtggtgaacttctcgctcctgatcagttactacggcctggtgtttgacttgcagagcctggggcgcgacatcttcctcctccaggcacttttcggcgctgtggactttctcggccgggccactaccgccttgctgctctcttttcttgggagacgcaccattcaggcaggatctcaggccatggctggactggccatcctggctaacatgctggtgccacaggatttacagaccttgagggtagtatttgctgtactgggtaaggggtgtttcggaatctccctcacatgccttaccatctacaaagcagaactattccccacccctgttcggatgacagccgatggaattctccacaccgtgggcaggcttggcgccatgatgggccctctcattttgatgagccgccaggctttgccactgctgccacctctgctgtatggagtcatcagtatagccagttccctcgtggttctcttttttctgccggagacccagggactacctctccccgacaccattcaggatcttgagagtcagaagagtacagcagcacaaggcaaccgacaggaggccgtaaccgtggagagcaccagcctctag

SEQ ID NO: 198873 - DNA, 1653 bp, Artificial Sequence
  derived and/or modified sequence
atggccttcagcaagctgctggagcaggccggcggcgtgggcctcttccagaccctgcaggtgctgaccttcatcctgccctgcctgatgatccccagccagatgctgctggagaacttctctgctgccatccctggccaccgctgctggacccacatgctggacaatggcagcgctgtgtccaccaacatgacccccaaggccctgctgaccatcagcatccccccaggccccaaccagggcccccaccagtgccgccgcttccggcagccccagtggcagctgctggaccccaatgccacagccacctcctggagcgaggccgacacagagccctgtgtggatggctgggtgtatgacaggagcgtcttcaccagcaccatcgtggccaagtgggacctggtgtgcagcagccagggcctgaagcccctgagccagagcatcttcatgagcggcatcctggtgggcagcttcatctggggcctgctgagctacagatttggaaggaagcccatgctgtcctggtgctgcctgcagctggccgtggccggcaccagcaccatctttgcccccacctttgtgatctactgcggcctgcgctttgtggccgccttcggcatggccggcatcttcctgagcagcctgaccctgatggtggagtggaccaccaccagccggcgggctgtgaccatgacagtggtgggctgtgccttctctgctggccaggccgccctgggcggcctggcctttgccctgcgggactggaggaccctgcagctggccgcctctgtgcccttctttgccatcagcctcatctcctggtggctgcctgagagcgcccgctggctgatcatcaagggcaagccagaccaggccctgcaggagctgaggaaggtggcccgcatcaatggccacaaggaggccaagaacctgaccatcgaggtgctgatgagctctgtgaaggaggaggtggccagcgccaaggagcccaggtctgtgctggacctcttctgtgtgcctgtgctgcgctggaggagctgtgccatgctggtggtgaacttcagcctgctgatctcctactacggcctggtgtttgacctgcagagcctgggccgggacatcttcctgctgcaggccctgtttggagctgtggacttcctgggccgggccaccacagccctgctgctgtccttcctgggccgccgcaccatccaggccggcagccaggccatggccggcctggccatcctggccaacatgctggtgccccaggacctgcagaccctgcgggtggtgtttgctgtgctgggcaagggctgcttcggcatcagcctgacctgcctgaccatctacaaggccgagctgttccccacccctgtgaggatgacagcagatggcatcctgcacacagtgggccgcctgggcgccatgatgggccccctcatcctgatgagccggcaggccctgcccctgctgccccccctgctgtatggagtcatcagcatcgccagcagcctggtggtgctcttcttcctgcctgagacccagggcctgcccctgcctgacaccatccaggacctggagagccagaagagcacagctgcccagggcaaccggcaggaggccgtgacagtggagagcaccagcctgtag

SEQ ID NO: 198874 - DNA, 1653 bp, Artificial Sequence
  derived and/or modified sequence
atggccttcagcaagctgctggagcaggccggcggcgtgggcctgtttcaaacgctgcaggtgctgacctttatcctcccgtgcctgatgattcccagccagatgctcctggaaaacttttcggccgccatccctgggcaccggtgttggactcatatgctggacaacgggtccgcagtgtctaccaatatgacccctaaggcgctactaactatttccatccctccggggcccaaccagggaccacaccaatgcaggcggtttcggcagccccagtggcagctgctcgacccgaacgctacagctactagctggagtgaggcagataccgagccctgtgtggacggctgggtctatgatcgtagcgtgttcacttcaacaatcgtagcaaagtgggatctggtatgcagcagccagggactgaagccactctcccaatccatctttatgagcggcattctggtcggatccttcatttggggactactttcataccggttcggcagaaagccaatgttgtcttggtgctgcttacaactggccgttgccggtacctctaccatctttgcacctactttcgttatatactgtggccttcgcttcgtggctgcattcggcatggcaggcattttcctgtccagtctgacactgatggtggaatggactaccacctcccgccgcgccgttacgatgaccgtggtgggatgcgctttctctgctggccaggcggccctgggcggtctcgccttcgccctgcgagactggcgcacgttacagttagccgcctcagttcctttttttgctatctctctgatttcatggtggctaccggaatccgcaaggtggctcatcataaaagggaaacccgaccaggctctgcaggaattaagaaaggtggcacgcatcaacggtcacaaggaggccaagaaccttaccatagaggttctgatgtctagtgtgaaagaggaagtggcgagcgccaaagagcctcggtctgttctcgacttgttttgtgttcctgtcttgagatggcgctcctgtgctatgctcgtggtcaactttagtcttttaatcagctactatgggttagtctttgacctgcaaagcctagggcgggacatattcctgctgcaggctttatttggtgctgtggatttcctggggcgagctactacagcactgctgctgagtttcctgggcaggcggactattcaggctggctcacaagccatggccggactggccatactagcaaatatgcttgtaccacaggatctgcaaacactgcgagtggtttttgctgtcttgggtaaaggttgcttcggcatctctctcacttgtctgaccatctacaaagctgaactgtttccaacgccagtgagaatgactgccgatggcatcctgcacacagttgggcggttaggcgctatgatgggccctcttatccttatgtctaggcaggcactgccactcctgcccccgctgctgtacggtgtgatcagtatcgcgagcagtctggtggtattgttcttcctcccagagacacaaggactgccactgcccgacaccatccaggacctcgagtcccagaagtcgaccgccgctcagggcaatcgtcaggaggccgttacagtcgagagtacctcactgtag

SEQ ID NO: 198875 - DNA, 1653 bp, Artificial Sequence
  derived and/or modified sequence
atggctttttcaaagctcctggagcaggccggaggtgtagggttgttccagacactgcaggtgcttacctttattctaccgtgcctgatgatccctagtcaaatgctgctcgaaaatttctccgctgctatacccggtcacagatgttggactcacatgctggacaacggatcagccgtgagcacaaatatgacgccgaaagcattgttgactatctccattccccctggacctaaccaaggcccacaccaatgtagacggtttagacagccccagtggcaactcttagaccccaacgcaacggccaccagctggtctgaggctgatacagaaccatgcgtcgacggatgggtttacgaccgctctgtgttcacaagcacaatagtggctaagtgggacctggtgtgcagctctcagggtctcaagccgctctcccagtctatatttatgtctggaatcttggtgggctcatttatctggggtttgctctcatatagatttgggcgtaaacctatgctttcatggtgctgcctgcaattagctgtggcgggaacctcaactatatttgccccaactttcgtgatttactgcggattacgcttcgttgctgcatttggtatggcagggatctttcttagtagtctaacattgatggtggaatggacaacaacgagccgcagagccgtgaccatgaccgtggtgggatgcgccttcagcgccggtcaggcggcactgggtggattggcatttgccctcagggattggaggacactgcagctcgccgctagcgtgccattcttcgccatcagtctgatcagttggtggctgccggaaagcgctcggtggctgattatcaagggcaaacccgatcaggcccttcaggagctgcgcaaagtggctagaatcaacgggcataaggaagctaagaacttgacgatcgaggtactgatgtccagcgtgaaagaagaggtagcttcagccaaggaacctcgtagcgtgttagatcttttctgcgtgcccgtgttgcgttggcgctcttgtgccatgctagtggttaatttctctctcttaatttcctactatgggctggtctttgacctgcagtctctgggcagggatatttttttgttacaggccctattcggtgccgtggattttttgggcagggccacaaccgcactgctgcttagctttctgggtcgtagaacgatccaggcaggttcccaggctatggctggactcgccatcctcgccaatatgttagtgccccaggatctgcagactttaagggtagtttttgccgttttgggaaagggctgcttcggtatttccctcacctgcctgaccatttacaaggcggagctgttcccgactcctgttagaatgacagcggatggtattctccatacagtcggccgtctcggagcaatgatgggacccctgatcctcatgagcaggcaggcactgcccctcctgcctcctctcctgtatggggtgatcagtattgcctcctccctagtcgtactgtttttcctgccggaaactcagggattacctttaccggatacaatacaggatctggagagccagaagagcacagccgctcagggcaatcgacaagaagcagttacggtagagtcgacttcgttatag

SEQ ID NO: 198876 - DNA, 3860 bp, Artificial Sequence
  derived and/or modified sequence
atctgcctgactttcacttttggtgctggagaactcagaaggtggctcagccctctggtccacacttggtgggcagctcggatgccccaggcagcccgggcacagtgagcttagtccccttcaccccctccgcagagctctggggcatccgcacagtcactcctggacacaagataaggaggagtttccccgaggcatcacagggcttcccgggactgagggactgactcaactggttattggacagtgccccacccccaatccggctgaggggcaggaaggcagaaggtcttggtggccctggatcttgtggctgcaatcggttccaaacagcagttaggtcagcagtccgctcagccgaggcagctctgttcatggcgttctcgaagctcttggagcaagccggaggcgtgggcctcttccagaccctgcaggtgctcaccttcatcctcccctgcctcatgataccttcccagatgctcctggagaacttctcagccgccatcccaggccaccgatgctggacacacatgctggacaatggctctgcggtttccacaaacatgacccccaaggcccttctgaccatctccatcccgccaggccccaaccaggggccccaccagtgccgccgcttccgccagccacagtggcagctcttggaccccaatgccacggccaccagctggagcgaagctgacacggagccgtgtgtggacggctgggtctatgaccgcagcgtcttcacctccaccatcgtggccaagtgggacctggtgtgcagctcccagggcttgaagcccctaagccagtccatcttcatgtccgggatcctggtgggctcctttatctggggcctcctctcctaccggtttgggaggaagccgatgctgagctggtgctgcctgcagttggccgtggcgggcaccagcaccatcttcgccccaacattcgtcatctactgcggcctgcggttcgtggccgcttttgggatggccggcatctttctgagttcactgacactgatggtggagtggaccacgaccagcaggagggcggtcaccatgacggtggtgggatgtgccttcagcgcaggccaggcggcgctgggcggcctggcctttgccctgcgggactggaggactctccagctggcagcatcagtgcccttctttgccatctccctgatatcctggtggctgccagaatccgcccggtggctgattattaagggcaaaccagaccaagcacttcaggagctcagaaaggtggccaggataaatggccacaaggaggccaagaacctgaccatagaggtgctgatgtccagcgtgaaggaggaggtggcctctgcaaaggagccgcggtcggtgctggacctgttctgcgtgcccgtgctccgctggaggagctgcgccatgctggtggtgaatttctctctattgatctcctactatgggctggtcttcgacctgcagagcctgggccgtgacatcttcctcctccaggccctcttcggggccgtggacttcctgggccgggccaccactgccctcttgctcagtttccttggccgccgcaccatccaggcgggttcccaggccatggccggcctcgccattctagccaacatgctggtgccgcaagatttgcagaccctgcgtgtggtctttgctgtgctgggaaagggatgttttgggataagcctaacctgcctcaccatctacaaggctgaactctttccaacgccagtgcggatgacagcagatggcattctgcatacagtgggccggctgggggctatgatgggtcccctgatcctgatgagccgccaagccctgcccctgctgcctcctctcctctatggcgttatctccattgcttccagcctggttgtgctgttcttcctcccggagacccagggacttccgctccctgacactatccaggacctggagagccagaaatcaacagcagcccagggcaaccggcaagaggccgtcactgtggaaagtacctcgctctagaaattgtgcctgcatggagcccctttagtcaaagactcctggaaaggagttgcctcttctccaatcagagcgtggaggcgagttgggcgacttcaagggcctggcatggcagaggccaggcagccgtggccgagtggacagcgtggccgtctgctgtggctgaaggcagcttccacagctcactcctcttctccctgccctgatcagattccccaccttacccgggccctacaggagcctgtgcagatggccatgcccaaccaataacgagacggttcccctccctttccctgccaggctcatgtctttacaccttcactcagccacgccaaccagagactgggttccaatctcaccccaccacatacagagccctcatctgtgaaatgagaatgatcacgtgacccaccccccagggcaggtatcagggtgaactgatcttagcaccggccaaataaatggaacctgctgagagagctgccagatacaggtgtccaggttgtgcactggcccgaggcacgcagccaaggaggcgtgtggggtctgaaactcagccccggctacactggccccaccacccaccctagcaaaggctgtgtcctctccaaaaaaaggagctgttttaatcacttttcatttactcatcagtgagggagggcttccagccctatggttacgaagacggccaaacacaccaccaaacaccagacagaggaggctggcagcaggttaccacacacgtgcgcagagcccacgaagatgacgctgcactgaggcatggggcggggtgcactgaggatccgagcgagcagccagggctgcaggaaggcagctttggagcacaaagggggtggggcaactcctggcttctgcgggaaggtgtaatcagcttgtttcatcatgctgcaggctggcgagaaacggagccttacaagcgtagggataagaggaacccctcttggtcccctcgatgagggttgttgggccggggagcctcatccacagggcggagtgaaaggggagaaggggagctcacaggcaggcctgccaaggccttctggctttgccagatgtcaagggcagcacctaatactgaaccttaactttcggctttcaaccaaacggcacccttttgctgtttgttttctggaggggacaccttttcttgattcatgcccagacctcccttgtccaggccatgaaaactctgggatggtcgaggccggctgcccatctcagatgggcaaggaagcaaaagtgcagagtggtggaggggccagcttgcagaaacacggccgaacccggccctgatcctagcccagggctctttccagcacaggaggctcctagccctcgtctccaaccctccatgccactgatatctgtggccctgccacaaagttaccctcatgcccttccctggagaccccactctgggccacctcaatctcaggcccctcaactcacctctttcaccctgtgtacactgggtcaatcactcctgcctcctcacagctcccaaatccacctacttcccttcactctggctacaccctggttcacaccacggttgtagctccaaactggtccctgatgtctacattgcactctgcacaacagccaccatgcttattaagaaacgcaatccaaaccaaatccctccctgctgaaagccctccagtggctcacaataaggatcacacttctccccctgcctggtcaggcagccatgggaccccagcctttcctcccacttcggtaaattttaaaggattcggatcatacaaagaatgttcttgaaccagcatggaattaaattagaaatcaattatg

SEQ ID NO: 198877 - DNA, 1653 bp, Artificial Sequence
  derived and/or modified sequence
atggccttcagcaagctgctggagcaggccggcggcgtgggcctgttccagaccctgcaggtgctgaccttcatcctgccctgcctgatgatccccagccagatgctgctggagaacttcagcgccgccatccccggccacagatgctggacccacatgctggacaacggcagcgccgtgagcaccaacatgacccccaaggccctgctgaccatcagcatcccccccggccccaaccagggcccccaccagtgcagaagattcagacagccccagtggcagctgctggaccccaacgccaccgccaccagctggagcgaggccgacaccgagccctgcgtggacggctgggtgtacgacagaagcgtgttcaccagcaccatcgtggccaagtgggacctggtgtgcagcagccagggcctgaagcccctgagccagagcatcttcatgagcggcatcctggtgggcagcttcatctggggcctgctgagctacagattcggcagaaagcccatgctgagctggtgctgcctgcagctggccgtggccggcaccagcaccatcttcgcccccaccttcgtgatctactgcggcctgagattcgtggccgccttcggcatggccggcatcttcctgagcagcctgaccctgatggtggagtggaccaccaccagcagaagagccgtgaccatgaccgtggtgggctgcgccttcagcgccggccaggccgccctgggcggcctggccttcgccctgagagactggagaaccctgcagctggccgccagcgtgcccttcttcgccatcagcctgatcagctggtggctgcccgagagcgccagatggctgatcatcaagggcaagcccgaccaggccctgcaggagctgagaaaggtggccagaatcaacggccacaaggaggccaagaacctgaccatcgaggtgctgatgagcagcgtgaaggaggaggtggccagcgccaaggagcccagaagcgtgctggacctgttctgcgtgcccgtgctgagatggagaagctgcgccatgctggtggtgaacttcagcctgctgatcagctactacggcctggtgttcgacctgcagagcctgggcagagacatcttcctgctgcaggccctgttcggcgccgtggacttcctgggcagagccaccaccgccctgctgctgagcttcctgggcagaagaaccatccaggccggcagccaggccatggccggcctggccatcctggccaacatgctggtgccccaggacctgcagaccctgagagtggtgttcgccgtgctgggcaagggctgcttcggcatcagcctgacctgcctgaccatctacaaggccgagctgttccccacccccgtgagaatgaccgccgacggcatcctgcacaccgtgggcagactgggcgccatgatgggccccctgatcctgatgagcagacaggccctgcccctgctgccccccctgctgtacggcgtgatcagcatcgccagcagcctggtggtgctgttcttcctgcccgagacccagggcctgcccctgcccgacaccatccaggacctggagagccagaagagcaccgccgcccagggcaacagacaggaggccgtgaccgtggagagcaccagcctgtag

SEQ ID NO: 198878 - protein, 377 aa, Artificial Sequence
  derived and/or modified sequence
MEEPEEPADSGQSLVPVYIYSPEYVSMCDSLAKIPKRASMVHSLIEAYALHKQMRIVKPKVASMEEMATFHTDAYLQHLQKVSQEGDDDHPDSIEYGLGYDCPATEGIFDYAAAIGGATITAAQCLIDGMCKVAINWSGGWHHAKKDEASGFCYLNDAVLGILRLRRKFERILYVDLDLHHGDGVEDAFSFTSKVMTVSLHKFSPGFFPGTGDVSDVGLGKGRYYSVNVPIQDGIQDEKYYQICESVLKEVYQAFNPKAVVLQLGADTIAGDPMCSFNMTPVGIGKCLKYILQWQLATLILGGGGYNLANTARCWTYLTGVILGKTLSSEIPDHEFFTAYGPDYVLEITPSCRPDRNEPHRIQQILNYIKGNLKHVV

SEQ ID NO: 198879 - DNA, 2064 bp, Artificial Sequence
  derived and/or modified sequence
aaatggccccgtagggcaacaaggatggttagttttgaccctacttatttgtgccataaaaacaatcgatcctaattgacagctatttggacttttacatctgccaaacccttttccttgaactgtggtcactaaatgaggggagtctggtctgggaagtcccatccattccttcaataggatggggagcggtgatagtgtctccggcgatctcaagaataggagggaatgttgaccagggagcaccgctgcggccgatcagaggagcaggaactggaaccctggccgagtccgaaaaaagccagatctggaaggtggctgcggaacggttttaagcggaagatggaggagccggaggaaccggcggacagtgggcagtcgctggtcccggtttatatctatagtcccgagtatgtcagtatgtgtgactccctggccaagatccccaaacgggccagtatggtgcattctttgattgaagcatatgcactgcataagcagatgaggatagttaagcctaaagtggcctccatggaggagatggccaccttccacactgatgcttatctgcagcatctccagaaggtcagccaagagggcgatgatgatcatccggactccatagaatatgggctaggttatgactgcccagccactgaagggatatttgactatgcagcagctataggaggggctacgatcacagctgcccaatgcctgattgacggaatgtgcaaagtagcaattaactggtctggagggtggcatcatgcaaagaaagatgaagcatctggtttttgttatctcaatgatgctgtcctgggaatattacgattgcgacggaaatttgagcgtattctctacgtggatttggatctgcaccatggagatggtgtagaagacgcattcagtttcacctccaaagtcatgaccgtgtccctgcacaaattctccccaggatttttcccaggaacaggtgacgtgtctgatgttggcctagggaagggacggtactacagtgtaaatgtgcccattcaggatggcatacaagatgaaaaatattaccagatctgtgaaagtgtactaaaggaagtataccaagcctttaatcccaaagcagtggtcttacagctgggagctgacacaatagctggggatcccatgtgctcctttaacatgactccagtgggaattggcaagtgtcttaagtacatccttcaatggcagttggcaacactcattttgggaggaggaggctataaccttgccaacacggctcgatgctggacatacttgaccggggtcatcctagggaaaacactatcctctgagatcccagatcatgagtttttcacagcatatggtcctgattatgtgctggaaatcacgccaagctgccggccagaccgcaatgagccccaccgaatccaacaaatcctcaactacatcaaagggaatctgaagcatgtggtctagttgacagaaagagatcaggtttccagagctgaggagtggtgcctataatgaagacagcgtgtttatgcaagcagtttgtggaatttgtgactgcagggaaaatttgaaagaaattacttcctgaaaatttccaaggggcatcaagtggcagctggcttcctggggtgaagaggcaggcaccccagagtcctcaactggacctaggggaagaaggagatatcccacatttaaagttcttatttaaaaaaacacacacacacaaatgaaatttttaatctttgaaaattatttttaagcgaattggggaggggagtattttaatcatcttaaatgaaacagatcagaagctggatgagagcagtcaccagtttgtagggcaggaggcagctgacaggcagggtttgggcctcaggaccatccaggtggagccctgggagagagggtactgatcagcagactgggaggtggggagaagtccgctggtgttgttttagtgttatatatctttggtttttttaataaaatctttgaaaacctaaaaaaaaaaaaaaaaaaaaaaaaaaaaaaaaaaaaaaaaaaaaaaaaaaa

SEQ ID NO: 198880 - DNA, 1134 bp, Artificial Sequence
  derived and/or modified sequence
atggaggagcccgaggagcccgccgacagcggccagagcctggtgcccgtgtacatctacagccccgagtacgtgagcatgtgcgacagcctggccaagatccccaagagagccagcatggtgcacagcctgatcgaggcctacgccctgcacaagcagatgagaatcgtgaagcccaaggtggccagcatggaggagatggccaccttccacaccgacgcctacctgcagcacctgcagaaggtgagccaggagggcgacgacgaccaccccgacagcatcgagtacggcctgggctacgactgccccgccaccgagggcatcttcgactacgccgccgccatcggcggcgccaccatcaccgccgcccagtgcctgatcgacggcatgtgcaaggtggccatcaactggagcggcggctggcaccacgccaagaaggacgaggccagcggcttctgctacctgaacgacgccgtgctgggcatcctgagactgagaagaaagttcgagagaatcctgtacgtggacctggacctgcaccacggcgacggcgtggaggacgccttcagcttcaccagcaaggtgatgaccgtgagcctgcacaagttcagccccggcttcttccccggcaccggcgacgtgagcgacgtgggcctgggcaagggcagatactacagcgtgaacgtgcccatccaggacggcatccaggacgagaagtactaccagatctgcgagagcgtgctgaaggaggtgtaccaggccttcaaccccaaggccgtggtgctgcagctgggcgccgacaccatcgccggcgaccccatgtgcagcttcaacatgacccccgtgggcatcggcaagtgcctgaagtacatcctgcagtggcagctggccaccctgatcctgggcggcggcggctacaacctggccaacaccgccagatgctggacctacctgaccggcgtgatcctgggcaagaccctgagcagcgagatccccgaccacgagttcttcaccgcctacggccccgactacgtgctggagatcacccccagctgcagacccgacagaaacgagccccacagaatccagcagatcctgaactacatcaagggcaacctgaagcacgtggtgtag

SEQ ID NO: 198881 - DNA, 1134 bp, Artificial Sequence
  derived and/or modified sequence
atggaggagccggaggagcctgcagactccggccagtcattggtgccggtctatatttactcccccgaatatgtgtctatgtgcgacagtctggccaagatccctaaaagagcctcaatggtgcactctctgattgaggcctacgctcttcacaaacagatgagaatcgtcaaacccaaagttgcttctatggaggagatggcgacatttcataccgacgcctacctgcaacatctccaaaaggtgtcccaggaaggggatgacgaccatcctgacagtattgaatacggcctgggatacgattgtcctgccaccgagggcatcttcgattacgccgcagcaatcggcggagctacaattactgcagcgcaatgccttattgatggaatgtgcaaggtggccatcaattggagcggtggttggcaccatgctaagaaggacgaggccagtggcttttgctatctgaacgacgccgtactgggaattctccgcctgaggcgaaagttcgaacgaatcctctatgtcgacctagacctgcatcacggcgacggagtggaggacgcgtttagctttaccagcaaggtcatgacagtttccctgcacaaattctctccaggttttttccctggtaccggagacgtgtcagatgtcggactcggcaagggccggtattactcagtcaacgtgccgatccaagacggaatacaggatgagaaatattatcagatttgcgaatcagtactcaaggaggtgtaccaagcattcaacccaaaggctgtcgtactacagctgggtgctgacacaatcgctggcgaccctatgtgtagctttaatatgacccccgttgggatcgggaaatgtctaaaatatattttgcagtggcagctagcgacattgatcctgggcggggggggatataatttggcgaataccgcccggtgttggacttatctgacaggggtcatcttaggcaagactctgtcgtcagagatacctgatcatgagtttttcactgcctacggtccagattacgttttagagatcaccccaagctgtagacctgatcgaaatgagccacatcgaatccagcagatcctgaactatatcaaaggaaacctcaaacacgtggtgtag

SEQ ID NO: 198882 - DNA, 2014 bp, Artificial Sequence
  derived and/or modified sequence
aaatggccccgtagggcaacaaggatggttagttttgaccctacttatttgtgccataaaaacaatcgatcctaattgacagctatttggacttttacatctgccaaacccttttccttgaactgtggtcactaaatgaggggagtctggtctgggaagtcccatccattccttcaataggatggggagcggtgatagtgtctccggcgatctcaagaataggagggaatgttgaccagggagcaccgctgcggccgatcagaggagcaggaactggaaccctggccgagtccgaaaaaagccagatctggaaggtggctgcggaacggttttaagcggaagatggaggagccggaggaaccggcggacagtgggcagtcgctggtcccggtttatatctatagtcccgagtatgtcagtatgtgtgactccctggccaagatccccaaacgggccagtatggtgcattctttgattgaagcatatgcactgcataagcagatgaggatagttaagcctaaagtggcctccatggaggagatggccaccttccacactgatgcttatctgcagcatctccagaaggtcagccaagagggcgatgatgatcatccggactccatagaatatgggctaggttatgactgcccagccactgaagggatatttgactatgcagcagctataggaggggctacgatcacagctgcccaatgcctgattgacggaatgtgcaaagtagcaattaactggtctggagggtggcatcatgcaaagaaagatgaagcatctggtttttgttatctcaatgatgctgtcctgggaatattacgattgcgacggaaatttgagcgtattctctacgtggatttggatctgcaccatggagatggtgtagaagacgcattcagtttcacctccaaagtcatgaccgtgtccctgcacaaattctccccaggatttttcccaggaacaggtgacgtgtctgatgttggcctagggaagggacggtactacagtgtaaatgtgcccattcaggatggcatacaagatgaaaaatattaccagatctgtgaaagtgtactaaaggaagtataccaagcctttaatcccaaagcagtggtcttacagctgggagctgacacaatagctggggatcccatgtgctcctttaacatgactccagtgggaattggcaagtgtcttaagtacatccttcaatggcagttggcaacactcattttgggaggaggaggctataaccttgccaacacggctcgatgctggacatacttgaccggggtcatcctagggaaaacactatcctctgagatcccagatcatgagtttttcacagcatatggtcctgattatgtgctggaaatcacgccaagctgccggccagaccgcaatgagccccaccgaatccaacaaatcctcaactacatcaaagggaatctgaagcatgtggtctagttgacagaaagagatcaggtttccagagctgaggagtggtgcctataatgaagacagcgtgtttatgcaagcagtttgtggaatttgtgactgcagggaaaatttgaaagaaattacttcctgaaaatttccaaggggcatcaagtggcagctggcttcctggggtgaagaggcaggcaccccagagtcctcaactggacctaggggaagaaggagatatcccacatttaaagttcttatttaaaaaaacacacacacacaaatgaaatttttaatctttgaaaattatttttaagcgaattggggaggggagtattttaatcatcttaaatgaaacagatcagaagctggatgagagcagtcaccagtttgtagggcaggaggcagctgacaggcagggtttgggcctcaggaccatccaggtggagccctgggagagagggtactgatcagcagactgggaggtggggagaagtccgctggtgttgttttagtgttatatatctttggtttttttaataaaatctttgaaaaccta

SEQ ID NO: 198883 - DNA, 1316 bp, Artificial Sequence
  derived and/or modified sequence
agaggagcaggaactggaaccctggccgagtccgaaaaaagccagatctggaaggtggctgcggaacggttttaagcggaagatggaggagccggaggaaccggcggacagtgggcagtcgctggtcccggtttatatctatagtcccgagtatgtcagtatgtgtgactccctggccaagatccccaaacgggccagtatggtgcattctttgattgaagcatatgcactgcataagcagatgaggatagttaagcctaaagtggcctccatggaggagatggccaccttccacactgatgcttatctgcagcatctccagaaggtcagccaagagggcgatgatgatcatccggactccatagaatatgggctagagatgaagcatctggtttttgttatctcaatgatgctgtcctgggaatattacgattgcgacggaaatttgagcgtattctctacgtggatttggatctgcaccatggagatggtgtagaagacgcattcagtttcacctccaaagtcatgaccgtgtccctgcacaaattctccccaggatttttcccaggaacaggtgacgtgtctgatgttggcctagggaagggacggtactacagtgtaaatgtgcccattcaggatggcatacaagatgaaaaatattaccagatctgtgaaagtgtactaaaggaagtataccaagcctttaatcccaaagcagtggtcttacagctgggagctgacacaatagctggggatcccatgtgctcctttaacatgactccagtgggaattggcaagtgtcttaagtacatccttcaatggcagttggcaacactcattttgggaggaggaggctataaccttgccaacacggctcgatgctggacatacttgaccggggtcatcctagggaaaacactatcctctgagatcccagatcatgagtttttcacagcatatggtcctgattatgtgctggaaatcacgccaagctgccggccagaccgcaatgagccccaccgaatccaacaaatcctcaactacatcaaagggaatctgaagcatgtggtctagttgacagaaagagatcaggtttccagagctgaggagtggtgcctataatgaagacagcgtgtttatgcaagcagtttgtggaatttgtgactgcagggaaaatttgaaagaaattacttcctgaaaatttccaaggggcatcaagtggcagctggcttcctggggtgaagaggcaggcaccccagagtcctcaactggacctaggggaagaaggagatatcccacatttaaagttcttattt

SEQ ID NO: 198884 - DNA, 1134 bp, Artificial Sequence
  derived and/or modified sequence
atggaggagcctgaggagcctgctgacagcggccagagcctggtgcctgtgtacatctacagcccagaatatgtgtccatgtgtgacagcctggccaagatccccaagagggcctccatggtgcacagcctgattgaggcctatgccctgcacaagcagatgagaattgtgaagcccaaggtggcctccatggaggagatggccaccttccacacagatgcctacctgcagcacctgcagaaggtgtcccaggagggagatgatgaccacccagacagcattgaatatggcctgggctatgactgcccagccacagagggcatctttgattatgctgctgccatcggcggggccaccatcacagctgcccagtgcctgattgatggcatgtgcaaggtggccatcaactggagcggcggctggcaccacgccaagaaggatgaggccagcggcttctgctacctgaatgatgctgtgctgggcatcctgcggctgcggaggaagtttgagcgcatcctgtatgtggacctggacctgcaccacggagatggagtggaggatgccttctccttcaccagcaaggtgatgacagtgtccctgcacaagttcagccctggcttcttccctggcactggagatgtgtctgatgtgggcctgggcaagggccgctactacagcgtgaatgtgcccatccaggacggcatccaggatgagaagtactaccagatctgtgagagcgtgctgaaggaggtgtaccaggccttcaaccccaaggctgtggtgctgcagctgggcgctgacaccatcgccggggaccccatgtgcagcttcaacatgacccctgtgggcatcggcaagtgcctgaagtacatcctgcagtggcagctggccaccctcatcctgggcggcggcggctacaacctggccaacacagcccgctgctggacctacctgactggagtcatcctgggcaagaccctgagcagcgagatcccagaccacgagttcttcaccgcctacggccctgactatgtgctggagatcacccccagctgcaggccagacagaaatgagccccaccgcatccagcagatcctgaactacatcaagggcaacctgaagcacgtggtgtag

SEQ ID NO: 198885 - DNA, 1134 bp, Artificial Sequence
  derived and/or modified sequence
atggaggagcccgaggagcccgccgacagcggccagagcctggtgccagtgtatatctattctcctgaatacgtgagtatgtgtgatagtctagccaagattcctaaacgtgcgtctatggtccattccttaatcgaggcatatgctttacataaacaaatgcggatcgttaaacccaaggtggcgagtatggaggagatggctacttttcatactgacgcttacttgcagcacctgcagaaggtctcacaggagggcgatgatgatcatccagactctatcgagtacggactgggttacgactgcccggctactgaaggcatatttgactacgccgctgcaattggcggcgccaccattaccgcggcccaatgtctcatagatggtatgtgtaaggtggctataaattggagcggtggctggcatcatgccaaaaaagacgaggccagcggattctgctacctgaatgacgctgtactgggcatcctgagattgcggagaaagttcgagcgtatcctctacgttgatctggatctgcaccacggcgacggcgttgaagatgcattctcattcaccagtaaagtgatgaccgtcagtctgcataaattttcacctgggtttttcccgggcacaggggacgtatccgacgtgggcctgggaaagggacggtactacagtgtcaacgttcctattcaggacggcatccaagatgaaaagtattatcagatctgtgaaagcgtgctcaaggaagtgtatcaagctttcaatcctaaagctgtcgtcctgcaacttggagccgatactatcgcgggggatcccatgtgctccttcaacatgactccagttggcatcggaaaatgtctgaagtacatcctgcagtggcaactagctacattgattctgggtggaggtgggtacaatctggctaacactgcgcggtgctggacctacttaacaggagtgatactgggtaaaaccctgtcaagcgagatccctgatcatgagttttttacagcttatggtcccgattatgtattggaaattacaccgagctgtagacctgatagaaatgaaccccatcggatacagcaaatcctcaactatataaagggcaatctgaaacacgtggtctag

SEQ ID NO: 198886 - DNA, 1134 bp, Artificial Sequence
  derived and/or modified sequence
atggaggagcccgaagaaccagcagacagcggtcagtcactggtgccagtatatatctactccccagaatacgtctccatgtgcgactcattggccaaaatcccgaaaagagctagcatggttcattccctcatagaggcctacgctcttcacaagcagatgagaatcgtgaagcctaaggtagccagcatggaagaaatggctaccttccacactgacgcatacttacagcacttacagaaggtgtcacaggagggagatgatgatcacccagattccattgagtacggcctgggatacgactgtcccgctacagaggggatatttgattacgctgcagccatcggtggcgctactatcaccgccgcacaatgcctaatagacggcatgtgcaaggttgccataaactggtccgggggatggcaccatgccaagaaggacgaggccagtggattctgctatctgaacgacgcagtcctggggatcttacggctgagaaggaaatttgaaaggatactttacgttgatctggacctgcaccacggcgacggtgtggaggatgcattttcctttacttcaaaagtcatgacagtgagtcttcacaagttctctcccggtttttttcctgggacaggcgacgtgtctgacgtgggactcggaaaaggtcggtactactccgtgaatgtgcccatccaggatgggattcaggacgagaaatattaccagatttgcgaaagtgttttaaaagaagtctatcaggcattcaaccccaaagcggtggtcctgcagttgggcgctgataccattgcaggcgacccaatgtgttcatttaacatgactcccgttggcataggaaagtgcctgaagtatatattacagtggcagctcgccactctaatcctggggggtggcggatacaatctagccaatactgcacgttgttggacttacttaacgggtgtgattctcggaaaaaccctgagtagtgagatccccgatcatgagttttttaccgcctatgggcctgactacgtgctggaaatcacaccctcatgtagacctgataggaacgagccccaccggatccagcagatcctgaactacatcaagggcaatttgaaacacgttgtctag

SEQ ID NO: 198887 - protein, 545 aa, Artificial Sequence
  derived and/or modified sequence
MLQDKGLSESEEAFRAPGPALGEASAANAPEPALAAPGLSGAALGSPPGPGADVVAAAAAEQTIENIKVGLHEKELWKKFHEAGTEMIITKAGRRMFPSYKVKVTGMNPKTKYILLIDIVPADDHRYKFCDNKWMVAGKAEPAMPGRLYVHPDSPATGAHWMRQLVSFQKLKLTNNHLDPFGHIILNSMHKYQPRLHIVKADENNAFGSKNTAFCTHVFPETSFISVTSYQNHKITQLKIENNPFAKGFRGSDDSDLRVARLQSKEYPVISKSIMRQRLISPQLSATPDVGPLLGTHQALQHYQHENGAHSQLAEPQDLPLSTFPTQRDSSLFYHCLKRRDGTRHLDLPCKRSYLEAPSSVGEDHYFRSPPPYDQQMLSPSYCSEVTPREACMYSGSGPEIAGVSGVDDLPPPPLSCNMWTSVSPYTSYSVQTMETVPYQPFPTHFTATTMMPRLPTLSAQSSQPPGNAHFSVYNQLSQSQVRERGPSASFPRERGLPQGCERKPPSPHLNAANEFLYSQTFSLSRESSLQYHSGMGTVENWTDG

SEQ ID NO: 198888 - protein, 951 aa, Artificial Sequence
  derived and/or modified sequence
MPGPLGLLCFLALGLLGSAGPSGAAPPLCAAPCSCDGDRRVDCSGKGLTAVPEGLSAFTQALDISMNNITQLPEDAFKNFPFLEELQLAGNDLSFIHPKALSGLKELKVLTLQNNQLKTVPSEAIRGLSALQSLRLDANHITSVPEDSFEGLVQLRHLWLDDNSLTEVPVHPLSNLPTLQALTLALNKISSIPDFAFTNLSSLVVLHLHNNKIRSLSQHCFDGLDNLETLDLNYNNLGEFPQAIKALPSLKELGFHSNSISVIPDGAFDGNPLLRTIHLYDNPLSFVGNSAFHNLSDLHSLVIRGASMVQQFPNLTGTVHLESLTLTGTKISSIPNNLCQEQKMLRTLDLSYNNIRDLPSFNGCHALEEISLQRNQIYQIKEGTFQGLISLRILDLSRNLIHEIHSRAFATLGPITNLDVSFNELTSFPTEGLNGLNQLKLVGNFKLKEALAAKDFVNLRSLSVPYAYQCCAFWGCDSYANLNTEDNSLQDHSVAQEKGTADAANVTSTLENEEHSQIIIHCTPSTGAFKPCEYLLGSWMIRLTVWFIFLVALFFNLLVILTTFASCTSLPSSKLFIGLISVSNLFMGIYTGILTFLDAVSWGRFAEFGIWWETGSGCKVAGFLAVFSSESAIFLLMLATVERSLSAKDIMKNGKSNHLKQFRVAALLAFLGATVAGCFPLFHRGEYSASPLCLPFPTGETPSLGFTVTLVLLNSLAFLLMAVIYTKLYCNLEKEDLSENSQSSMIKHVAWLIFTNCIFFCPVAFFSFAPLITAISISPEIMKSVTLIFFPLPACLNPVLYVFFNPKFKEDWKLLKRRVTKKSGSVSVSISSQGGCLEQDFYYDCGMYSHLQGNLTVCDCCESFLLTKPVSCKHLIKSHSCPALAVASCQRPEGYWSDCGTQSAHSDYADEEDSFVSDSSDQVQACGRACFYQSRGFPLVRYAYNLPRVKD

SEQ ID NO: 198889 - DNA, 2856 bp, Artificial Sequence
  derived and/or modified sequence
atgcctggacccctcggactgctttgctttctcgccctcgggctcctgggctccgcaggccccagtggcgcagcccctccattgtgcgctgctccttgcagctgtgacggcgatcgacgagtggactgtagtggaaaaggactcaccgcagtgcctgaaggactttccgcctttacccaggcattggatattagtatgaataatatcacacagctgcctgaagacgccttcaaaaacttcccatttctggaggagctccaactcgccggaaacgaccttagctttatacaccctaaggcattaagcggacttaaagagctgaaggtactgactcttcaaaataaccaactgaagacagtgcctagcgaggccatccgcgggctctctgccctgcagtcactgcgtttggatgctaaccacataacttcagtcccagaggactcttttgagggcctggtccagctccgccatctgtggcttgatgacaatagtttgaccgaagtacccgttcatcccctgtctaacctcccgaccctgcaggcgctgacactggctctgaataagataagctccattcccgatttcgcatttactaacttatccagtctagtggttctgcatttacacaacaacaagatacgctcactatcgcagcactgctttgatggcctggacaacttggaaacactggatttaaattataacaaccttggtgaattcccccaagctatcaaggccttacctagcctcaaggaattggggttccactctaatagtatcagcgtgatccccgacggcgcctttgacggaaatcctctcctgcgtaccattcatctctatgataaccctctaagctttgtgggaaactcagcgtttcataatctgtctgatctccattcacttgttattcggggagcgagcatggtgcagcagttccctaacttgacaggcactgtgcatttagagtccctcactctcaccgggaccaaaatcagttcaatccctaacaatttatgtcaggaacaaaaaatgctaagaactttggacctatcatacaataacatcagagaccttccctccttcaacgggtgtcacgcattggaggaaattagtctgcagaggaatcagatctaccagatcaaggaagggactttccagggtctgattagcttacggattctggatttaagccgcaacttgatccatgagattcattctcgcgcttttgctaccctgggaccaatcaccaacttggacgtctccttcaatgaactgacttcttttcccacggagggtctgaacggtttgaaccagttaaagctggtcggaaactttaagctcaaggaagcccttgccgcgaaggactttgtcaacctgcggtcccttagcgtcccgtacgcttatcaatgctgcgccttctgggggtgtgactcctacgccaatctgaatactgaagataactctcttcaggaccacagcgtggcgcaggagaagggtacagccgacgcagccaacgttacttccacgctcgaaaacgaagaacacagccagatcattatccattgtaccccaagcacgggagctttcaaaccttgcgagtacctgcttggttcctggatgatcagacttaccgtgtggttcatcttcttggtggcattgttctttaacctcctggtgatactcaccactttcgcctcttgtacttcccttccaagctccaagctcttcatcggcttgataagcgtgtctaatttattcatgggaatttacaccggtatcttgaccttcttggacgccgtatcctggggccggtttgcggagtttgggatctggtgggagaccggttctggatgtaaggtggcggggttcttggccgtcttctcatctgagtcagcaatttttctcctaatgcttgctactgtggaaagaagtctgtctgcaaaggacatcatgaagaatgggaaatctaatcatttgaagcagtttcgggtcgccgccctcctcgcgttcctgggtgcaacggtggccggttgcttccccctgtttcatagaggtgagtattccgcatctcctttgtgcctgcctttcccgacgggcgaaaccccgtccctcggattcaccgtgacgctcgtcctgctgaatagcctggcctttctcctgatggccgtcatctatacgaagctttattgtaatctggaaaaggaggatctgtctgagaatagtcagtcctccatgattaagcacgtcgcatggttaatcttcaccaattgtatctttttttgtccggtcgctttctttagtttcgccccacttatcacagcaatttcgatctcgccagaaatcatgaaatctgttaccctcatttttttccctctgcctgcatgtctcaaccccgtgctttatgtgttttttaatcctaaattcaaggaagactggaaactgcttaaaagacgggtgacaaaaaaatcaggttccgtgtctgtgtctatatcgtcccaggggggctgcctcgaacaggacttctactatgattgcggtatgtatagccatctccagggtaacctcaccgtgtgtgactgctgcgagtcgtttctcctcacgaaacccgtctcctgcaaacacctgattaagtcccacagttgcccggcactggcggtggcaagctgccagagacctgagggatactggagtgattgtggaacccagtcagctcactcagactacgcggatgaggaggactccttcgtctctgactcatctgaccaagtccaggcctgtggcagggcttgcttctaccagtctagggggttccccctggtgcgatacgcttacaatctgcctcgcgtgaaagactag

SEQ ID NO: 198890 - DNA, 2856 bp, Artificial Sequence
  derived and/or modified sequence
atgcctggccccctgggcctgctgtgcttcctggccctgggcctgctgggcagcgctggccccagcggggccgccccacccctgtgtgccgccccctgcagctgtgatggagacagaagagtggactgcagcggcaagggcctgacagctgtgcctgagggcctgagcgccttcacccaggccctggacatctccatgaacaacatcacccagctgcctgaagatgccttcaagaacttccccttcctggaggagctgcagctggccggaaatgacctgtccttcatccaccccaaggccctgagcggcctgaaggagctgaaggtgctgaccctgcagaacaaccagctgaagacagtgcccagcgaggccatccggggcctgagcgccctgcagagcctgcggctggatgccaaccacatcacctctgtgcctgaggacagctttgagggcctggtgcagctgcggcacctgtggctggatgacaacagcctgacagaggtgcctgtgcaccccctgagcaacctgcccaccctgcaggccctgaccctggccctgaacaagatcagcagcatcccagactttgccttcaccaacctgagcagcctggtggtgctgcacctgcacaacaacaagatccgcagcctgagccagcactgctttgatggcctggacaacctggagaccctggacctgaactacaacaacctgggggagttcccccaggccatcaaggccctgcccagcctgaaggagctgggcttccacagcaacagcatcagcgtcatcccagatggagcctttgatggcaaccccctgctgcggaccatccacctgtatgacaaccccctgagctttgtgggcaacagcgccttccacaacctgagtgacctgcacagcctggtgatccggggggcctccatggtgcagcagttccccaacctgaccggcaccgtgcacctggagagcctgaccctgaccggcaccaagatcagcagcatccccaacaacctgtgccaggagcagaagatgctgcggaccctggacctgagctacaacaacatccgggacctgcccagcttcaacggctgccacgccctggaggagatcagcctgcagaggaaccagatctaccagatcaaggagggcaccttccagggcctcatcagcctgcgcatcctggacctgagcaggaacctgatccacgagatccacagccgggcctttgccaccctgggccccatcaccaacctggatgtgtccttcaatgagctgaccagcttccccacagagggcctgaatggcctgaaccagctgaagctggtgggcaacttcaagctgaaggaggccctggccgccaaggactttgtgaacctgcggagcctgtctgtgccctatgcctaccagtgctgtgccttctggggctgtgacagctatgccaacctgaacacagaggacaacagcctgcaggaccacagcgtggcccaggagaagggcacagcagatgctgccaacgtgaccagcaccctggagaatgaggagcacagccagatcatcatccactgcacccccagcactggagccttcaagccctgtgagtacctgctgggctcctggatgatccggctgactgtgtggttcatcttcctggtggccctcttcttcaacctgctggtgatcctgaccacctttgccagctgcaccagcctgcccagcagcaagctgttcatcggcctcatctctgtgagcaacctcttcatgggcatctacacaggcatcctgaccttcctggatgctgtgtcctggggccgctttgctgagtttggcatctggtgggagaccggcagcggctgcaaggtggccggcttcctggccgtgttcagcagcgagagcgccatcttcctgctgatgctggccaccgtggagaggagcctgagcgccaaggacatcatgaagaatggcaagagcaaccacctgaagcagttccgggtggccgccctgctggccttcctgggcgccaccgtggccggctgcttccccctcttccacagaggagagtacagcgccagccccctgtgcctgcccttccccaccggggagacccccagcctgggcttcaccgtgaccctggtgctgctgaacagcctggccttcctgctgatggccgtcatctacaccaagctgtactgcaacctggagaaggaggacctgtctgagaacagccagagctccatgatcaagcacgtggcctggctgatcttcaccaactgcatcttcttctgccctgtggccttcttctcctttgcccccctcatcacagccatcagcatcagccctgagatcatgaagtctgtgaccctcatcttcttccccctgcctgcctgcctgaaccctgtgctgtatgtgttcttcaaccccaagttcaaggaggactggaagctgctgaagagaagagtgaccaagaagagcggctctgtgtctgtgtccatcagcagccagggcggctgcctggagcaggacttctactatgactgtggcatgtacagccacctgcagggcaacctgactgtgtgtgactgctgtgagagcttcctgctgaccaagcctgtgtcctgcaagcacctgatcaagagccacagctgcccagccctggccgtggccagctgccagaggcctgagggctactggagcgactgtggcacccagagcgcccacagcgactatgcagatgaggaggacagctttgtgtctgacagcagtgaccaggtgcaggcctgtggccgggcctgcttctaccagagccggggcttccccctggtgcgctatgcctacaacctgccccgggtgaaggactag

SEQ ID NO: 198891 - DNA, 5206 bp, Artificial Sequence
  derived and/or modified sequence
ccgcggctgggagacagcgagccagagtctgggtgtttgtgcgagagccacggcgggggctggggcgagtggccggcatggctgaaggctgcgctctgcaaccttgaagagccgctgcattgagaggccagggacagggagaccggtgcgatggcagagcgcggcccccgccgctgcgccgggccggcccggctggcgtgagccgccggaggagcggggctgcctctgcgcgtccatggagcagcgggaagggcgaaactccggagcgccgcgtccctgcgccgctgcggcggactgctgaaggggccgagcccgcgcggaccgccgaggaagagacccccgctccagcccgcaggccggctgcccgggggcggcgggggacatcggagggcagcggagcgagcagcgccgcgggagaggccggcgcgggaggcggccgcagcaatgccgggcccgctagggctgctctgcttcctcgccctggggctgctcggctcggccgggcccagcggcgcggcgccgcctctctgcgcggcgccctgcagctgcgacggcgaccgtcgggtggactgctccgggaaggggctgacggccgtgcccgaggggctcagcgccttcacccaagcgctggatatcagtatgaacaacattactcagttgccagaagatgcatttaagaactttccttttctagaagagctacaattggcgggcaacgacctttcttttatccacccaaaggccttgtctgggttgaaagaactcaaagttctaacgctccagaataatcagttgaaaacagtacccagtgaagccattcgagggctgagtgctttgcagtctttgcgtttagatgccaaccatattacctcagtccccgaggacagttttgaaggacttgttcagttacggcatctgtggctggatgacaacagcttgacggaggtgcctgtgcaccccctcagcaatctgcccaccctacaggcgctgaccctggctctcaacaagatctcaagcatccctgactttgcatttaccaacctttcaagcctggtagttctgcatcttcataacaataaaattagaagcctgagtcaacactgttttgatggactagataacctggagaccttagacttgaattataataacttgggggaatttcctcaggctattaaagcccttcctagccttaaagagctaggatttcatagtaattctatttctgttatccctgatggagcatttgatggtaatccactcttaagaactatacatttgtatgataatcctctgtcttttgtggggaactcagcatttcacaatttatctgatcttcattccctagtcattcgtggtgcaagcatggtgcagcagttccccaatcttacaggaactgtccacctggaaagtctgactttgacaggtacaaagataagcagcatacctaataatttgtgtcaagaacaaaagatgcttaggactttggacttgtcttacaataatataagagaccttccaagttttaatggttgccatgctctggaagaaatttctttacagcgtaatcaaatctaccaaataaaggaaggcacctttcaaggcctgatatctctaaggattctagatctgagtagaaacctgatacatgaaattcacagtagagcttttgccacacttgggccaataactaacctagatgtaagtttcaatgaattaacttcctttcctacggaaggcctgaatgggctaaatcaactgaaacttgtgggcaacttcaagctgaaagaagccttagcagcaaaagactttgttaacctcaggtctttatcagtaccatatgcttatcagtgctgtgcattttggggttgtgactcttatgcaaatttaaacacagaagataacagcctccaggaccacagtgtggcacaggagaaaggtactgctgatgcagcaaatgtcacaagcactcttgaaaatgaagaacatagtcaaataattatccattgtacaccttcaacaggtgcttttaagccctgtgaatatttactgggaagctggatgattcgtcttactgtgtggttcattttcttggttgcattatttttcaacctgcttgttattttaacaacatttgcatcttgtacatcactgccttcgtccaaattgtttataggcttgatttctgtgtctaacttattcatgggaatctatactggcatcctaacttttcttgatgctgtgtcctggggcagattcgctgaatttggcatttggtgggaaactggcagtggctgcaaagtagctgggtttcttgcagttttctcctcagaaagtgccatatttttattaatgctagcaactgtcgaaagaagcttatctgcaaaagatataatgaaaaatgggaagagcaatcatctcaaacagttccgggttgctgcccttttggctttcctaggtgctacagtagcaggctgttttccccttttccatagaggggaatattctgcatcacccctttgtttgccatttcctacaggtgaaacgccatcattaggattcactgtaacgttagtgctattaaactcactagcatttttattaatggccgttatctacactaaactatactgcaacttggaaaaagaggacctctcagaaaactcacaatctagcatgattaagcatgtcgcttggctaatcttcaccaattgcatctttttctgccctgtggcgtttttttcatttgcaccattgatcactgcaatctctatcagccccgaaataatgaagtctgttactctgatattttttccattgcctgcttgcctgaatccagtcctgtatgttttcttcaacccaaagtttaaagaagactggaagttactgaagcgacgtgttaccaagaaaagtggatcagtttcagtttccatcagtagccaaggtggttgtctggaacaggatttctactacgactgtggcatgtactcacatttgcagggcaacctgactgtttgcgactgctgcgaatcgtttcttttaacaaagccagtatcatgcaaacacttgataaaatcacacagctgtcctgcattggcagtggcttcttgccaaagacctgagggctactggtccgactgtggcacacagtcggcccactctgattatgcagatgaagaagattcctttgtctcagacagttctgaccaggtgcaggcctgtggacgagcctgcttctaccagagtagaggattccctttggtgcgctatgcttacaatctaccaagagttaaagactgaactactgtgtgtgtaaccgtttcccccgtcaaccaaaatcagtgtttatagagtgaaccctattctcatctttcatctgggaagcacttctgtaatcactgcctggtgtcacttagaagaaggagaggtggcagtttatttctcaaaccagtcattttcaaagaacaggtgcctaaattataaattggtgaaaaatgcaatgtccaagcaatgtatgatctgtttgaaacaaatatatgacttgaaaaggatcttaggtgtagtagagcaatataatgttagttttttctgatccataagaagcaaatttatacctatttgtgtattaagcacaagataaagaacagctgttaatattttttaaaaatctattttaaaatgtgattttctataactgaagaaaatatcttgctaattttacctaatgtttcatccttaatctcaggacaacttactgcagggccaaaaaagggactgtcccagctagaactgtgagagtatacataggcattactttattatgttttcacttgccatccttgacataagagaactataaattttgtttaagcaatttataaatctaaaacctgaagatgtttttaaaacaatattaacagctgttaggttaaaaaaatagctggacatttgttttcagtcattatacattgctttggtccaatcagtaattttttcttaagtgttttgtgattacactactagaaaaaaagtaaaaggctaattgctgtgtgggtttagtcgatttggctaaactactaactaatgtgggggtttaatagtatctgagggatttggtggcttcatgtaatgttctcattaatgaatacttcctaatatcgttggctctactaatattttccaatttgctgggatgtcacctagcaatagcttggattatatagaaagtaaactgtggtcaatacttgcatttaattagacgaaacggggagtaattatgacacgaagtacttatgtttatttcttagtgagctggattatcttgaacctgtgctattaaatggaaatttccatacatcttccccatactattttttataaaagagcctattcaatagctcagaggttgaactctggttaaacaagataatatgttattaataaaaatagaagaagaaagaataaagcttagtcctgtgtctttaaaaattaaaaattttacttgattcccatctatgggctttagacctattactgggtggagtcttaaagttataattgttcaatatgttttttgaacagtgtgctaaatcaatagcaaacccactgccatattagttattctgaatatactaaaaaaatccagctagattgcagtttaataattaaactgtacatactgtgcatataatgaatttttatcttatgtaaattatttttagaacacaagttgggaaatgtggcttctgttcatttcgtttaattaaagctacctcctaaactatagtggctgccagtagcagactgttaaattgtggtttatatactttttgcattgtaaatagtctttgttgtacattgtcagtgtaataaaaacagaatctttgtatatcaaaatcatgtagtttgtataaaatgtgggaaggatttatttacagtgtgttgtaattttgtaaggccaactatttacaagttttaaaaattgctatcatgtatatttacacatctgataaatattaaatcataacttggtaagaaactcctaattaaaaggttttttccaaaattcaggttattgaaaacttttcattttattcatttaaaaactagaataacagatatataaaagtgttaatctttgtgctatatggtatgaaatacaatattgtactcagtgttttgaattattaaagtttctagaaagcaa

SEQ ID NO: 198892 - DNA, 2856 bp, Artificial Sequence
  derived and/or modified sequence
atgcccggccccctgggcctgctgtgcttcctggccctgggcctgctagggtccgccggaccttccggggctgctccccccctgtgcgccgcgccttgttcatgcgacggggatcgccgggtggactgcagtggaaaaggcttgactgccgtcccagaggggctgagtgcttttactcaggcattggacatcagcatgaacaacattacccagctgcccgaggacgccttcaagaacttccccttcctcgaggagttgcaactggctgggaatgaccttagctttattcatccaaaggctctgtcaggattgaaagagttgaaagtgctgacccttcaaaacaaccagttaaagacagtaccttccgaggctatccgcggactgtctgccttgcagtccctgcgcctggatgcaaatcacattaccagcgttccagaggattctttcgaaggactggtgcagttaaggcacctgtggttagacgacaattccctgaccgaggttcccgtccatcccctgagcaatttaccaaccctccaggcactaacacttgcacttaacaagatctcatcaatccctgacttcgcatttactaacttgtctagtctcgttgtcttacatctgcataacaataagattcgatccctttcacagcattgctttgacgggttggacaacctggagactctggatctgaactataataaccttggcgaattccctcaggcgatcaaggctcttccgagcctgaaggagttgggcttccacagcaactccatctccgttatccccgacggtgcattcgatggcaatcctctcctgcgcaccatccacctctacgacaatcctctgagcttcgtgggaaactccgcgttccataacttgtctgatctgcattcattagtgatacgaggggcctctatggtgcagcagtttccaaaccttacaggcacagttcatctcgagtcactcaccttaactggaactaaaatctcctccatccctaacaacctgtgtcaggaacaaaaaatgctgaggacactggatctgagttataacaatattcgtgatctgccatccttcaacggttgtcatgcccttgaagaaattagcctccagcggaaccagatttaccagattaaagagggaacatttcagggccttatctcccttagaattttggacctgtcccgcaacctgattcacgagattcattcacgtgcattcgcaacactggggccaattactaacctggatgtgagtttcaacgagctgacatccttcccaacagagggcctgaatggcctgaaccagctgaagctcgtcggcaacttcaagctcaaagaggccctggccgccaaagacttcgtgaatctgagatcattaagcgtgccctatgcctatcaatgttgcgccttttggggctgcgacagttacgcaaacctgaatactgaggacaatagtctgcaggatcattcagtggcccaggaaaagggtaccgccgacgcagcaaacgttacctccaccttggaaaatgaagagcattcccagatcataattcattgcaccccttccactggagccttcaagccttgcgagtacttgctcggcagctggatgatccgcctgaccgtctggtttatttttctggtcgcactctttttcaacctactcgtgatacttactaccttcgcctcctgtacaagtctccccagcagtaagctctttattgggctgatttcagtgtccaatttgtttatgggaatatacaccgggatattgaccttccttgacgcagtgtcttgggggagattcgccgagtttggaatttggtgggaaactgggtccggctgcaaggttgcaggatttttggccgtcttctccagcgaaagtgctatcttcctgctcatgttggcaactgtggagcgttctctgagcgctaaggacatcatgaagaacggtaaatccaaccacttgaaacagttccgcgtcgctgcccttctggcgttcctcggtgcaaccgtcgcaggctgcttccccctctttcacaggggtgagtactcagcttcccctctgtgcttgccttttccaacaggagaaactcccagcctgggtttcaccgtgacgcttgtattgcttaactccctggccttcctcctcatggcagtcatatataccaagttgtattgtaacttggagaaagaggacctctcagaaaattcacagagtagtatgataaaacatgtcgcgtggttgatctttacaaactgtattttcttttgtcctgtagcatttttttctttcgctccactcattacagcaatcagtattagccccgaaattatgaagtctgtgactctgattttcttccccctgccagcgtgtctgaatcctgtcctctacgtgttctttaatcccaagtttaaggaggactggaaactgttaaagcgcagagtgaccaaaaagtcgggctccgtgtctgttagtatctcctctcaaggcggctgcctcgaacaggatttctattacgattgtgggatgtacagccatttgcagggcaaccttacagtttgtgactgctgcgaatcatttctactgactaagccggtaagttgcaaacaccttattaaaagccattcctgtcctgccttggctgttgcgtcatgccagcgtcctgagggttactggtcggactgtggcacccagtcagctcactctgattatgctgatgaggaggattcttttgtgagcgactccagcgaccaggtgcaggcgtgcggacgagcctgtttctaccagagtaggggcttcccactggtccgctacgcttacaatctgccacgcgtgaaagattag

SEQ ID NO: 198893 - DNA, 2856 bp, Artificial Sequence
  derived and/or modified sequence
atgcctggtccactggggctgctttgctttctggctctggggctcctgggttcagccggtccgagtggcgctgcgccaccgttgtgcgcagccccatgctcctgtgacggtgatcgcagagtggactgtagcggaaaaggcctgaccgcagtgccagaaggcttgtctgctttcacacaggccctggatatcagtatgaataacatcacacaattgcctgaagacgctttcaagaatttcccattcctcgaggaattacagctcgctgggaacgacctgtccttcattcatcccaaagctctcagtggactcaaagagttaaaggtcctgaccctgcaaaacaatcagctaaaaaccgtgccatcagaagcaattcgagggctcagtgccttgcagagcttaaggctcgacgcgaaccacattacgtcagtgccggaagattcttttgaaggactagtccagctaagacacttgtggctggatgacaactcccttacggaggtgcccgttcaccccttgtccaatttgcccaccctacaggcgctcaccttggccctaaacaagatatcatccatcccggatttcgcattcactaacctgtcatctttggtggtgttgcatcttcataataataagatccgatctctgtcccaacactgtttcgatggactagataacctggaaacattggatctgaactacaataacctgggggaatttccccaggcgattaaagccctgccctcactcaaggagctcgggttccacagtaattctatcagtgtgatccccgacggggcatttgatggaaatcccctgttaaggacaattcatctctatgataatccactgtcattcgtgggaaattctgcctttcacaacctgagtgacttgcacagcctcgttatcagaggtgccagtatggtacagcagtttcctaacctgactggtaccgtgcatttagaaagcctcaccttgaccggcaccaagatcagcagtatcccaaacaacttatgccaggagcaaaagatgttaagaacattggatctttcatataataacatacgggacctgccaagtttcaacgggtgtcacgctttagaggagattagcttgcaacgaaaccagatctaccagatcaaagaagggactttccagggtctgatttccttgcgcatcttagatctgtcaaggaatttaatccatgaaatccatagccgagcatttgccacactaggcccaatcaccaatttagacgtgagcttcaatgaactaacgagtttccccaccgaagggctcaatggactgaaccaactgaaactggtcggtaactttaagttgaaggaagccctggccgcaaaggactttgtgaacctgcgctcgctgtctgttccctacgcctaccaatgctgtgcattctggggctgcgatagttacgcgaacttgaacacggaggacaactctctgcaggaccacagcgttgctcaagagaaggggacagcagatgcagccaacgtaacatccaccctcgagaacgaagagcacagtcagattataatacactgcacaccctcaaccggtgcattcaagccttgcgagtacttgctggggtcctggatgatccgtctcacggtctggtttatctttctggtcgctctgttcttcaacctgctggtgatactcaccacctttgcttcgtgcacttcgcttccctctagcaagctgttcataggactcatcagcgtctccaatctgtttatgggtatctacacgggtattctcaccttcctcgatgcagttagctggggcagattcgctgaatttgggatatggtgggagacagggtcaggctgtaaggtggctgggttcctagctgtgttctcctccgaatccgcaatctttctgttgatgctggcaacagtagaacgctccctgtccgctaaagatatcatgaaaaacggcaagtcaaaccatctcaaacagttccgggttgcagctttgctagccttcctgggggcaactgtggccggttgtttccctctgtttcacaggggcgaatactccgcctccccgctttgtctcccatttcctacaggcgagactccctcactgggtttcactgtgaccttagtcctcctcaacagccttgcttttctgctgatggcagtgatttataccaagctatactgcaatcttgagaaggaagacttatctgaaaacagccagtcctctatgattaaacacgtggcgtggctcattttcacaaactgtatctttttttgtcccgttgcgtttttcagcttcgccccactcattaccgccatcagtataagcccagagataatgaagtcagtgaccttgatcttctttcctctgcccgcatgtttaaaccccgtgctctacgtgttcttcaaccctaagtttaaagaagattggaagctacttaagcgtagagtcactaagaaaagcgggtccgtgtccgtaagcatctcatctcaaggcggatgcctggaacaggacttctattacgactgcggaatgtattcgcatttacagggcaatctcacggtctgcgactgttgcgagtctttcctgctcacaaagcccgtgagttgtaagcatctcatcaagagccactcatgtccagctctggccgtggcctcgtgtcaaagacccgaagggtactggtctgattgtgggacccagtcagcacattcggattatgcagatgaagaagatagttttgtgtccgacagtagtgaccaagtgcaggcatgtgggagggcatgcttctatcagagccgcggtttccctctcgtccgctatgcttacaatctcccacgagtgaaagactag

SEQ ID NO: 198894 - DNA, 2856 bp, Artificial Sequence
  derived and/or modified sequence
atgcccggccccctgggcctgctgtgcttcctggccctgggcctgctgggcagcgccggccccagcggcgccgccccccccctgtgcgccgccccctgcagctgcgacggcgacagaagagtggactgcagcggcaagggcctgaccgccgtgcccgagggcctgagcgccttcacccaggccctggacatcagcatgaacaacatcacccagctgcccgaggacgccttcaagaacttccccttcctggaggagctgcagctggccggcaacgacctgagcttcatccaccccaaggccctgagcggcctgaaggagctgaaggtgctgaccctgcagaacaaccagctgaagaccgtgcccagcgaggccatcagaggcctgagcgccctgcagagcctgagactggacgccaaccacatcaccagcgtgcccgaggacagcttcgagggcctggtgcagctgagacacctgtggctggacgacaacagcctgaccgaggtgcccgtgcaccccctgagcaacctgcccaccctgcaggccctgaccctggccctgaacaagatcagcagcatccccgacttcgccttcaccaacctgagcagcctggtggtgctgcacctgcacaacaacaagatcagaagcctgagccagcactgcttcgacggcctggacaacctggagaccctggacctgaactacaacaacctgggcgagttcccccaggccatcaaggccctgcccagcctgaaggagctgggcttccacagcaacagcatcagcgtgatccccgacggcgccttcgacggcaaccccctgctgagaaccatccacctgtacgacaaccccctgagcttcgtgggcaacagcgccttccacaacctgagcgacctgcacagcctggtgatcagaggcgccagcatggtgcagcagttccccaacctgaccggcaccgtgcacctggagagcctgaccctgaccggcaccaagatcagcagcatccccaacaacctgtgccaggagcagaagatgctgagaaccctggacctgagctacaacaacatcagagacctgcccagcttcaacggctgccacgccctggaggagatcagcctgcagagaaaccagatctaccagatcaaggagggcaccttccagggcctgatcagcctgagaatcctggacctgagcagaaacctgatccacgagatccacagcagagccttcgccaccctgggccccatcaccaacctggacgtgagcttcaacgagctgaccagcttccccaccgagggcctgaacggcctgaaccagctgaagctggtgggcaacttcaagctgaaggaggccctggccgccaaggacttcgtgaacctgagaagcctgagcgtgccctacgcctaccagtgctgcgccttctggggctgcgacagctacgccaacctgaacaccgaggacaacagcctgcaggaccacagcgtggcccaggagaagggcaccgccgacgccgccaacgtgaccagcaccctggagaacgaggagcacagccagatcatcatccactgcacccccagcaccggcgccttcaagccctgcgagtacctgctgggcagctggatgatcagactgaccgtgtggttcatcttcctggtggccctgttcttcaacctgctggtgatcctgaccaccttcgccagctgcaccagcctgcccagcagcaagctgttcatcggcctgatcagcgtgagcaacctgttcatgggcatctacaccggcatcctgaccttcctggacgccgtgagctggggcagattcgccgagttcggcatctggtgggagaccggcagcggctgcaaggtggccggcttcctggccgtgttcagcagcgagagcgccatcttcctgctgatgctggccaccgtggagagaagcctgagcgccaaggacatcatgaagaacggcaagagcaaccacctgaagcagttcagagtggccgccctgctggccttcctgggcgccaccgtggccggctgcttccccctgttccacagaggcgagtacagcgccagccccctgtgcctgcccttccccaccggcgagacccccagcctgggcttcaccgtgaccctggtgctgctgaacagcctggccttcctgctgatggccgtgatctacaccaagctgtactgcaacctggagaaggaggacctgagcgagaacagccagagcagcatgatcaagcacgtggcctggctgatcttcaccaactgcatcttcttctgccccgtggccttcttcagcttcgcccccctgatcaccgccatcagcatcagccccgagatcatgaagagcgtgaccctgatcttcttccccctgcccgcctgcctgaaccccgtgctgtacgtgttcttcaaccccaagttcaaggaggactggaagctgctgaagagaagagtgaccaagaagagcggcagcgtgagcgtgagcatcagcagccagggcggctgcctggagcaggacttctactacgactgcggcatgtacagccacctgcagggcaacctgaccgtgtgcgactgctgcgagagcttcctgctgaccaagcccgtgagctgcaagcacctgatcaagagccacagctgccccgccctggccgtggccagctgccagagacccgagggctactggagcgactgcggcacccagagcgcccacagcgactacgccgacgaggaggacagcttcgtgagcgacagcagcgaccaggtgcaggcctgcggcagagcctgcttctaccagagcagaggcttccccctggtgagatacgcctacaacctgcccagagtgaaggactag

SEQ ID NO: 198895 - protein, 307 aa, Artificial Sequence
  derived and/or modified sequence
MTKAGSKGGNLRDKLDGNELDLSLSDLNEVPVKELAALPKATILDLSCNKLTTLPSDFCGLTHLVKLDLSKNKLQQLPADFGRLVNLQHLDLLNNKLVTLPVSFAQLKNLKWLDLKDNPLDPVLAKVAGDCLDEKQCKQCANKVLQHMKAVQADQERERQRRLEVEREAEKKREAKQRAKEAQERELRKREKAEEKERRRKEYDALKAAKREQEKKPKKEANQAPKSKSGSRPRKPPPRKHTRSWAVLKLLLLLLLFGVAGGLVACRVTELQQQPLCTSVNTIYDNAVQGLRRHEILQWVLQTDSQQ

SEQ ID NO: 198896 - DNA, 924 bp, Artificial Sequence
  derived and/or modified sequence
atgaccaaggccggcagcaagggcggcaacctgagagacaagctggacggcaacgagctggacctgagcctgagcgacctgaacgaggtgcccgtgaaggagctggccgccctgcccaaggccaccatcctggacctgagctgcaacaagctgaccaccctgcccagcgacttctgcggcctgacccacctggtgaagctggacctgagcaagaacaagctgcagcagctgcccgccgacttcggcagactggtgaacctgcagcacctggacctgctgaacaacaagctggtgaccctgcccgtgagcttcgcccagctgaagaacctgaagtggctggacctgaaggacaaccccctggaccccgtgctggccaaggtggccggcgactgcctggacgagaagcagtgcaagcagtgcgccaacaaggtgctgcagcacatgaaggccgtgcaggccgaccaggagagagagagacagagaagactggaggtggagagagaggccgagaagaagagagaggccaagcagagagccaaggaggcccaggagagagagctgagaaagagagagaaggccgaggagaaggagagaagaagaaaggagtacgacgccctgaaggccgccaagagagagcaggagaagaagcccaagaaggaggccaaccaggcccccaagagcaagagcggcagcagacccagaaagcccccccccagaaagcacaccagaagctgggccgtgctgaagctgctgctgctgctgctgctgttcggcgtggccggcggcctggtggcctgcagagtgaccgagctgcagcagcagcccctgtgcaccagcgtgaacaccatctacgacaacgccgtgcagggcctgagaagacacgagatcctgcagtgggtgctgcagaccgacagccagcagtag

SEQ ID NO: 198897 - DNA, 924 bp, Artificial Sequence
  derived and/or modified sequence
atgaccaaggccggctccaaaggaggcaacctgagggacaaattagatgggaacgagttggatctcagtctgtcagatctgaacgaggtgcccgtgaaagagctggcagccctgcctaaagcaacgatacttgacctcagctgcaacaagctcaccacacttccgagtgacttctgcgggctgacccaccttgtgaagcttgatctgagcaaaaataagctgcagcagttgcctgcggattttggtaggctcgtcaacttgcagcacctagatctcctcaacaacaagttggtaactctgcctgtgagctttgcccagcttaaaaatctgaagtggttagatctgaaggataacccgttggatcccgtcctggccaaggtggcaggggactgcctcgatgagaagcagtgtaaacagtgcgcgaataaagtcctgcagcacatgaaggccgtgcaggctgaccaggaaagagaaagacagaggcgtttagaggtggagcgggaagccgagaaaaaacgtgaagccaaacagcgggccaaggaggcccaggaacgggaacttcgcaaacgggaaaaggcagaagagaaggagcgcaggaggaaagaatatgatgcactgaaagctgctaaacgcgaacaggagaagaagccgaagaaggaggctaaccaggcaccaaagagtaagagcggtagtaggccacgtaagccaccacctcggaagcatacacgtagctgggcagttcttaagctgctactgttattgttgctgttcggcgtggccggtggtttggttgcctgtagggtcacggagctacagcaacaacccttgtgtacctctgtcaacacaatctatgataatgcagtgcaggggctcagacgacatgagatcttgcagtgggtcctgcaaacggacagtcagcagtag

SEQ ID NO: 198898 - DNA, 2910 bp, Artificial Sequence
  derived and/or modified sequence
atctcagtggtcgcggaaggtgacgtggacacggaagtggtcgtcgtcgcggcaccggtgggagctaggcgcgaggctcggagtgcggccagcgggcggaggcggtctcgcatcggcggcgacggagggctcaggcgtcgtcgtttgggtggggggccgctgaactgacaagcgacatttcagctcctttcacccgccggaaccccggagccggggcccgctcagccggcgttaccatgaccaaggccggtagcaagggcgggaacctccgcgacaagctggacggcaacgaactggacctgagcctcagcgacctgaatgaggtcccggtgaaggagctggctgcccttccaaaggccaccatcctggatctgtcttgtaataaactgactactctaccgtcggatttctgtggcctcacacacctggtgaagctagacctgagtaagaacaagctgcagcagctgccagcagactttggccgtctggtcaacctccagcacctggatctcctcaacaacaagctggtcaccttgcctgtcagctttgctcagctcaagaacctgaagtggttggacctgaaggataaccccctggatcctgtcctggccaaggtggcaggtgactgcttggatgagaagcagtgtaagcagtgtgcaaacaaggtgttacagcacatgaaggccgtgcaggcagatcaggagcgggagaggcagcggcggctggaagtagaacgtgaggcagagaagaagcgtgaggctaagcagcgagctaaggaagctcaggagcgggaactgcggaagcgggagaaggcggaagagaaggagcgccggagaaaggagtatgatgccctcaaagcagccaagcgggagcaggagaagaaacctaagaaggaagcaaatcaggccccgaaatctaagtctggctcccgtccccgcaagccaccaccccggaagcacactcgttcctgggctgtgctgaagctgctgctgctgctgctgctatttggtgtggcgggagggctggttgcttgtcgggtgacagagctgcagcagcagcccctctgcaccagcgtgaacaccatctatgacaatgcggtccagggtctacgccgccatgagatcctccagtgggtcctccagaccgactctcagcagtgagcttgtccccagcacctgctgcctcccagccttggagtttggattcctatggaattgggttctgctggacacaacctctttttagcatcagacctacctgccatcatcaaatggctgcagattggtacatgagacctcctctttgtaggacttcttcattccttagtcagggttccctgaaggaatgaggagaaatgggaggtggcgggggggcgtggggggcagttacctgcatgcctaaaggagtaggcttgggggtggggagagagaaaacatagccttttctagttgttatataaagctgtgtaaaggcaaggctcgtttctactaaatggtcagctgtcactacatttatacttttgtatgccacaaaccctttcattcctccctgggaatcagggtagatcaggaggaactgggggggactagaacaccacgctcagtaaatccagtctaaactgggaggtaggggtattcctgttttctttaggacctcagagatgtaagcattttagcagccacacaaaatctctggctatgaaagggacttcatgaccatccagtccaatataacacttgcagacagagaaactgaggtcttccatgacttgcctagtctcccagctagtttgaggcaaaactggattcccactctggtattctttcttccctttacatcattttccctcctttataatgtcctgagagaccagaactcacaccagaatcgattattcctcaggtgaagcatagactctttcatggtagacagatttcacgactcagagatagaaatctcttgctatcatcaggtcacgggcagctcctgtggagtcctgcccaacttatgtggcttccataaaatggcaacagtccaggctccttgcctaattttagagcattaactccctaattgccagtaagcaaggaggtggatctctgcaaacctacactgtctatgacagctctagttgtacttggtgtgactaaatacctcaaaggcaacctgcttctgcaggttttgaagtgtcagcttcataagacactgaggtttagaattgtttgattctagaccataactgaagggcataaatggaaacaggatatgaagggaaacaagtagcatcatggagctgaaaagtggtgcatcacccaatggctagcacaaacaaggatcacactgtccattctcttgtctgctaaattaagcattttcttgcctcctttgcttcatcttttcacaacagctggatagagggatcagaaatgactgtgtcatggtgctcattcactgcaaactcccagttgcaagctccttggctcccccggagggagcaagaatctcatagttcagagacacagagggccttttagccctaatgaccttttggatgggactgcaactcatgactatcctgatattggaagaaaggactttgttaatcttctcccccatagctctgctgcgtaggtctacatcttactcagaatcactacacattcctttagtcttcctccaagctccagagccattggtacaaatgctttattgaaactaaatacataatacacacaatgagatgaagacaatatagaagtccgcatagtcatcataatcccgttccttggccggttgaggcagctcagtggctgagcccagtcaagccaacccgcagcttcactcacgacttcaagatttgatgctaattcttttggatttctacagttattaaataagtgtctgagtgga

SEQ ID NO: 198899 - DNA, 924 bp, Artificial Sequence
  derived and/or modified sequence
atgaccaaggccggcagcaaaggaggcaacctgcgggacaagctggatggaaatgagctggacctgagcctgagtgacctgaatgaggtgcctgtgaaggagctggccgccctgcccaaggccaccatcctggacctgagctgcaacaagctgaccaccctgcccagcgacttctgtggcctgacccacctggtgaagctggacctgagcaagaacaagctgcagcagctgcctgctgactttggccgcctggtgaacctgcagcacctggacctgctgaacaacaagctggtgaccctgcctgtgtcctttgcccagctgaagaacctgaagtggctggacctgaaggacaaccccctggaccctgtgctggccaaggtggccggggactgcctggatgagaagcagtgcaagcagtgtgccaacaaggtgctgcagcacatgaaggctgtgcaggccgaccaggagcgggagcggcagaggcggctggaggtggagcgggaggccgagaagaagcgggaggccaagcagagggccaaggaggcccaggagcgggagctgaggaagcgggagaaggccgaggagaaggagaggaggaggaaggagtatgatgccctgaaggccgccaagcgggagcaggagaagaagcccaagaaggaggccaaccaggcccccaagagcaagagcggcagccggcccaggaagcccccacccaggaagcacaccaggtcctgggccgtgctgaagctgctgctgctgctgctgctgtttggagtggccggcggcctggtggcctgccgggtgacagagctgcagcagcagcccctgtgcacctctgtgaacaccatctatgacaatgctgtgcagggcctgcggagacatgagatcctgcagtgggtgctgcagacagacagccagcagtag

SEQ ID NO: 198900 - DNA, 924 bp, Artificial Sequence
  derived and/or modified sequence
atgaccaaggccggcagcaagggcggcaacctgcgggacaagctggacggcaacgaactggacctgtccctgtctgaccttaatgaggtccccgtgaaggaactagccgccctcccaaaagcgacaatcttggacctatcatgtaacaaactcacgactttgcccagtgatttctgtggccttacacatctggtaaagctagacctgtcaaagaacaagctgcagcagcttccagcagatttcggaagacttgttaacctgcaacatctcgaccttttgaacaacaagctggtcactctgccggtgagctttgcacagctaaagaacttgaaatggctggacctgaaggacaacccattagatccagtgctcgcaaaggtcgctggtgactgtctagacgaaaagcaatgtaaacagtgcgcaaacaaagtgcttcagcatatgaaagccgtgcaggcagatcaagaacgcgagcgtcaaaggaggctagaggttgagcgtgaggctgagaaaaaaagagaggccaaacagagggctaaagaggcccaagagcgggagctgcgaaaacgggagaaagctgaggagaaggaaagacggagaaaggaatacgacgccctcaaggccgccaagcgagaacaggagaagaagcccaaaaaagaggccaaccaagctcccaaatccaagtcagggtcgagaccacgaaagccgcctcctcgcaagcatacgcggtcctgggctgtgctgaaactgcttctccttctgctgctgttcggcgtggccggtggactggttgcctgtcgagtgactgagcttcagcagcaaccactgtgtacgtcggtgaacacaatctatgataacgccgtgcaggggttaagaagacacgaaatcttgcagtgggtcctgcagaccgactcccagcagtag

SEQ ID NO: 198901 - DNA, 924 bp, Artificial Sequence
  derived and/or modified sequence
atgacaaaagcaggatccaaaggcggaaacttgcgtgacaagctcgacggaaacgagttggatttgagcttgtccgatctaaatgaggtgccagtgaaagaactggcagcattgccaaaggccaccatactcgaccttagttgtaacaagttaactaccttgccttctgatttttgtggcttgactcacctcgttaagctcgacctgtccaaaaataaactacagcagctgcccgctgatttcgggaggctcgtcaacctacagcatctggatctgctgaacaataagctggtgaccttaccagtaagcttcgcccaattgaaaaatttgaagtggctagatctgaaagataaccctctggaccccgtgctagcaaaggtcgctggagattgcctcgacgagaaacaatgcaagcagtgcgcaaacaaggtcctccagcatatgaaagcagtccaggcagatcaagagagggagaggcaaaggagactggaagtcgaacgggaggccgagaagaaacgcgaggcaaaacagcgtgccaaagaggcacaagagagggaattaagaaagagagagaaggccgaggagaaagagcggagacggaaggagtatgatgcgctgaaagcagccaaacgagagcaggaaaagaaaccaaagaaggaggctaatcaggcacctaagagcaaatcagggagccggcctagaaaacctcccccacggaaacatacccggtcatgggccgtgttgaagcttcttttgctcctgcttctcttcggtgtcgcaggaggactggtggcatgccgggttaccgaactccagcaacagcccctgtgtacctcagtgaataccatttacgataacgctgtccaggggctcaggagacacgagatcttacaatgggtgctgcagacggacagccagcagtag

SEQ ID NO: 198902 - protein, 855 aa, Artificial Sequence
  derived and/or modified sequence
MDEEEDNLSLLTALLEENESALDCNSEENNFLTRENGEPDAFDELFDADGDGESYTEEADDGETGETRDEKENLATLFGDMEDLTDEEEVPASQSTENRVLPAPAPRREKTNEELQEELRNLQEQMKALQEQLKVTTIKQTASPARLQKSPEKSPRPPLKERRVQRIQESTCFSAELDVPALPRTKRVARTPKASPPDPKSSSSRMTSAPSQPLQTISRNKPSGITRGQIVGTPGSSGETTQPICVEAFSGLRLRRPRVSSTEMNKKMTGRKLIRLSQIKEKMAREKLEEIDWVTFGVILKKVTPQSVNSGKTFSIWKLNDLRDLTQCVSLFLFGEVHKALWKTEQGTVVGILNANPMKPKDGSEEVCLSIDHPQKVLIMGEALDLGTCKAKKKNGEPCTQTVNLRDCEYCQYHVQAQYKKLSAKRADLQSTFSGGRIPKKFARRGTSLKERLCQDGFYYGGVSSASYAASIAAAVAPKKKIQTTLSNLVVKGTNLIIQETRQKLGIPQKSLSCSEEFKELMDLPTCGARNLKQHLAKATASGIMGSPKPAIKSISASALLKQQKQRMLEMRRRKSEEIQKRFLQSSSEVESPAVPSSSRQPPAQPPRTGSEFPRLEGAPATMTPKLGRGVLEGDDVLFYDESPPPRPKLSALAEAKKLAAITKLRAKGQVLTKTNPNSIKKKQKDPQDILEVKERVEKNTMFSSQAEDELEPARKKRREQLAYLESEEFQKILKAKSKHTGILKEAEAEMQERYFEPLVKKEQMEEKMRNIREVKCRVVTCKTCAYTHFKLLETCVSEQHEYHWHDGVKRFFKCPCGNRSISLDRLPNKHCSNCGLYKWERDGMLKVCHLRTNF

SEQ ID NO: 198903 - protein, 874 aa, Artificial Sequence
  derived and/or modified sequence
MDEEEDNLSLLTALLEENESALDCNSEENNFLTRENGEPDAFDELFDADGDGESYTEEADDGETGETRDEKENLATLFGDMEDLTDEEEVPASQSTENRVLPAPAPRREKTNEELQEELRNLQEQMKALQEQLKVTTIKQTASPARLQKSPEKSPRPPLKERRVQRIQESTCFSAELDVPALPRTKRVARTPKASPPDPKSSSSRMTSAPSQPLQTISRNKPSGITRGQIVGTPGSSGETTQPICVEAFSGLRLRRPRVSSTEMNKKMTGRKLIRLSQIKEKMAREKLEEIDWVTFGVILKKVTPQSVNSGKTFSIWKLNDLRDLTQCVSLFLFGEVHKALWKTEQGTVVGILNANPMKPKDGSEEVCLSIDHPQKVLIMGEALDLGTCKAKKKNGEPCTQTVNLRDCEYCQYHVQAQYKKLSAKRADLQSTFSGGRIPKKFARRGTSLKERLCQDGFYYGGVSSASYAASIAAAVAPKKKIQTTLSNLVVKGTNLIIQETRQKLGIPQKSLSCSEEFKELMDLPTCGARNLKQHLAKATASGIMGSPKPAIKSISASALLKQQKQRMLEMRRRKSEEIQKRFLQSSSEVESPAVPSSSRQPPAQPPRTGSEFPRLEGAPATMTPKLGRGVLEGDDVLFYDESPPPRPKLSALAEAKKLAAITKLRAKGQVLTKTNPNSIKKKQKDPQDILEVKERVEKNTMFSSQAEDELEPARKKRREQLAYLESEEFQKILKAKSKHTGILKEAEAEMQERYFEPLVKKEQMEEKMRNIREVKCRVVTCKTCAYTHFKLLETCVSEQHEYHWHDGVKRFFKCPCGNRSISLDRLPNKHCSNCGLYKWERDGMLKEKTGPKIGGETLLPRGEEHAKFLNSLK

SEQ ID NO: 198904 - DNA, 417 bp, Artificial Sequence
  derived and/or modified sequence
atgatttttccacagatctacttggactatttcaaaatgcggcaggactactgtcagtcgctgaatgtgtggtcctacttgccctggatcttttttagtttcggactcggttttatcaataaccttaatattatcagttatagaatcaccaaggaggaagtcaatctgattcacttaagattacagccgaagatccagtctaattcatccttttcccttagttgttttttttttatgttccttttactgattgcagcccgaatcctgcatcggatctccatagaaatgtacgagatcctctggtctctccacgtcaggattgcccagtacgtcaccattcaattccagagagaacctacattcgtcagattcaccgatcaaggagttgtcgaggaagtggaattgcagatcaggtag

SEQ ID NO: 198905 - DNA, 2568 bp, Artificial Sequence
  derived and/or modified sequence
atggacgaagaggaggacaatctgagtcttctgacggccttactagaggaaaacgagtcagcgttggattgcaactcagaagagaacaacttcttgacaagagaaaatggagagccggatgcgtttgacgaactgttcgacgctgacggagacggggaaagctatacagaagaggcggacgatggtgaaacaggggaaacacgagacgaaaaggagaatctggcaactttattcggggatatggaggacctgacagatgaggaagaagtgccggcctcccaatcaacagagaacagggtgttacctgccccagccccacggcgcgaaaagacgaatgaagaactgcaggaagagctccggaacctgcaggagcagatgaaggcattacaagaacaactgaaggtgaccaccattaaacagaccgcctcacccgcaagattgcagaagtcccccgagaaatcaccccgtcctcctctgaaagagagacgagtccaacggatccaagagtccacatgcttttcagccgaactagacgtaccagctctgcccaggacaaagcgagtcgcaagaaccccgaaggcttcaccccccgacccgaagtcgtcgagttctcgcatgacctccgctccctctcagccactgcaaaccatctccaggaataagccctcagggattacaagaggccagatcgtcggcactcccgggagctcaggagagactacccagcccatttgtgtagaagcctttagcggcctccgcttgagacgcccccgcgtgtccagcactgagatgaataagaagatgactggacggaagctcattagactgtcccagatcaaggagaaaatggcaagggagaagcttgaggagatcgactgggtgaccttcggggtcattctaaagaaggttacaccacaaagcgtaaattccggcaagacattctccatctggaagctcaatgacctgcgtgacctgacgcaatgcgtgtccctgttcctgtttggagaagtgcacaaggcgctgtggaagactgagcagggaaccgtggttggaatcctgaacgcaaaccccatgaaacctaaagatggctctgaggaagtctgcctctctatcgaccatccccagaaggttttaattatgggtgaggctctcgatcttggaacgtgcaaggctaaaaaaaaaaatggtgaaccttgtactcagaccgttaatctgagagactgtgagtattgccagtaccacgtgcaggcccaatataagaagctgagcgccaagcgcgccgacctccagagcacctttagcggcggtaggattcccaagaaatttgctaggaggggaacctcactgaaagagaggctgtgccaggatggcttctattacggcggggtgtcttccgcaagttatgctgcaagcattgcagcagctgtcgctccgaagaagaagatccagacaacactcagcaacctcgttgtcaaggggaccaatctgattatccaggaaacaaggcagaaactgggaattcctcagaagtcactcagctgctcagaggaattcaaggaacttatggatctgcccacatgtggggcacgcaatctaaaacagcacctggcaaaggcaacggccagcggaattatggggtctccaaagcctgccattaaatccataagcgcttccgccttgctgaagcagcagaaacagaggatgctggagatgagacgcagaaagtcagaagagattcagaagcgcttccttcagagttctagcgaggtggagtccccagctgtcccatccagctctcggcagcctcctgcccaacctccccgcacagggagcgagttcccccgccttgaaggcgcgcctgctacaatgacaccgaaattggggcgcggcgtactagaaggggatgatgtcttattttacgacgagtccccacctccacggccgaagctcagcgccctggctgaggctaaaaagttggcagctattacaaagctgagggcgaaggggcaagttttgacaaaaaccaacccaaactctataaaaaaaaagcagaaggaccctcaagacatcctagaggtgaaagagcgggtggaaaagaatactatgttcagtagtcaggcagaagatgaactcgaacctgccagaaagaagcgtcgagaacagctcgcgtatctggagtccgaggaattccagaaaattctgaaagcaaagagcaagcacacgggcattcttaaggaggcagaggcagagatgcaagaaaggtactttgagcctctggtaaagaaagagcagatggaggaaaagatgcgtaatatacgggaggtgaagtgtcgcgttgtgacatgtaagacctgcgcatacacccatttcaaattgctcgagacctgcgtaagcgagcaacacgagtaccactggcatgatggtgtgaaaaggttctttaagtgtccgtgtggaaatcgttcaatttctctagaccgccttccaaataaacattgctctaactgcggtctctacaaatgggagagagatggtatgctgaaggtctgccacctgcgaacgaacttttag

SEQ ID NO: 198906 - DNA, 2625 bp, Artificial Sequence
  derived and/or modified sequence
atggacgaggaagaggacaacctcagcctgctgactgccctgctcgaggaaaatgagtccgcactggattgcaattctgaggaaaataactttctaactcgcgagaacggagagcctgacgcttttgacgaactgtttgacgcagatggtgacggagaatcttatacagaagaggccgacgacggcgagaccggggagacccgggacgagaaagaaaatctcgccaccttgttcggggacatggaggaccttacagatgaagaggaggtgccggcaagtcagagcacagagaatcgggtgttgccagcgcctgcaccacgccgagagaagaccaacgaagaattgcaagaggaactcaggaatttgcaggaacaaatgaaggcccttcaggagcagctgaaggtgaccactataaagcagaccgccagtccagcgcgcctacagaaaagtcctgaaaagagcccgcggccacctctgaaggagcgccgcgtgcaaagaatacaagagtccacatgcttttcagccgagctggatgtgccggctttgccccggaccaagagggtcgctagaactccaaaggctagcccccctgaccctaagtcctccagctctaggatgacctcagcccccagccagccacttcagactatttcccgtaataagccttctggcataactagagggcaaatcgtcggtaccccaggttctagtggcgagacaacacaacctatctgcgtggaagcatttagcggcctcaggctcagacgcccccgggtgagttccaccgagatgaacaagaaaatgaccggtaggaagctgatacgtctttctcaaatcaaggaaaaaatggcccgggagaagttagaggaaattgattgggtcacctttggcgtcattctgaagaaggtcacccctcagagcgtaaatagcgggaagacgttctccatttggaaacttaatgacttacgggatctgactcagtgcgtgtccctatttttgtttggagaagtccataaggcactgtggaagactgaacagggcacagtcgtaggcatcctaaatgcgaatccgatgaagccgaaggacgggagtgaagaagtgtgcctctctattgatcacccacagaaagtgctgatcatgggtgaagcactggatttgggcacctgtaaggccaaaaagaagaatggcgagccctgtacacagaccgtcaatctgagggattgcgaatattgtcagtaccatgtccaggctcagtataagaaactgagcgcgaagcgcgctgatctgcagagtactttcagtggcgggcggattcctaaaaagtttgcacggagaggcacctccctgaaagagcggctttgtcaggacggcttctattacggtggcgtcagctcagccagctatgccgccagcattgccgccgccgttgcgccaaaaaagaaaatacagactaccctatcaaatctggttgtgaaggggaccaatctcatcattcaagagacacggcagaagctgggtattccccagaaatcattgtcctgcagcgaggaattcaaagaacttatggatctccccacctgcggagccaggaatttgaagcagcacctggcgaaagcgacagccagtggcattatgggttcaccgaaacctgctatcaagagcatctccgcctcagcactgctgaaacagcagaagcagcgcatgctcgagatgcgaaggcgcaaaagcgaggagattcagaaacgctttctgcagagttcatccgaagtggagagtcccgccgtcccgtccagcagccggcagccccctgcccaacccccaagaactggaagcgagtttccacgactagagggcgccccggcaactatgacacctaagcttggcagaggagtgctcgaaggagatgatgtcctattctacgatgagagccctccaccacggccaaaactaagcgcattggctgaggccaagaaactggccgccataacaaaactccgcgccaaaggccaggtgttaaccaaaaccaatcccaactccattaagaagaaacaaaaggatccccaagacatcctggaggtaaaagagagggtggagaagaataccatgttcagcagccaggccgaagacgaactcgaaccagccaggaagaaacgtcgtgaacagcttgcatacctggaaagcgaagaatttcaaaagattctcaaagccaaatccaaacacaccgggatcctcaaagaggcggaggccgaaatgcaagagcgttacttcgagcctctggtgaaaaaggagcagatggaagagaaaatgcggaacattagagaggtgaagtgtagagtggtgacatgcaaaacgtgtgcttatacccactttaagttgctggaaacctgcgtttcagagcaacacgagtaccattggcacgatggcgtcaagcggttcttcaagtgcccatgtggtaatcgctccatcagcctcgatcgactgcctaataaacattgtagcaattgtgggctctataaatgggaaagagatggaatgttgaaggagaagacagggccaaaaattggtggcgagaccttgctgcccaggggcgaagagcatgcaaaatttcttaattcgctcaaatag

SEQ ID NO: 198907 - DNA, 2568 bp, Artificial Sequence
  derived and/or modified sequence
atggatgaggaggaggacaacctgagcctgctgacagccctgctggaggagaatgaaagtgccctggactgcaacagcgaggagaacaacttcctgaccagagaaaatggagagccagatgcctttgatgagctgtttgatgctgatggagatggagagagctacacagaggaggctgatgatggagagaccggggagaccagagatgagaaggagaacctggccaccctgtttggagacatggaggacctgacagatgaggaggaggtgcctgccagccagagcacagaaaatagagtgctgcctgccccagccccccggcgggagaagaccaatgaggagctgcaggaggagctgaggaacctgcaggagcagatgaaggccctgcaggagcagctgaaggtgaccaccatcaagcagacagccagccctgcccggctgcagaagagccctgagaagagccccaggcctcccctgaaggagcggcgggtgcagaggatccaggagagcacctgcttctctgctgagctggatgtgcctgccctgcccaggaccaagagggtggcccggacccccaaggccagccccccagaccccaagagcagcagcagcaggatgaccagcgcccccagccagcccctgcagaccatcagcaggaacaagcccagcggcatcacccggggccagatcgtgggcaccccaggcagcagtggagagaccacccagcccatctgtgtggaggccttcagcggcctgcggctgcggcggccccgggtgagcagcacagagatgaacaagaagatgactggaaggaagctgatccggctgagccagatcaaggagaagatggcccgggagaagctggaggagattgactgggtgaccttcggggtcatcctgaagaaggtgaccccccagagcgtgaacagcggcaagaccttcagcatctggaagctgaatgacctgcgggacctgacccagtgtgtgtccctcttcctgtttggagaggtgcacaaggccctgtggaagacagagcagggcaccgtggtgggcatcctgaatgccaaccccatgaagcccaaggatggcagcgaggaggtgtgcctgagcattgaccacccccagaaggtgctgatcatgggagaggccctggacctgggcacctgcaaggccaagaagaagaatggagagccctgcacccagacagtgaacctgcgggactgtgagtactgccagtaccacgtgcaggcccagtacaagaagctgagcgccaagagagctgacctgcagagcaccttcagcggcggccgcatccccaagaagtttgcccggcggggcaccagcctgaaggagcggctgtgccaggacggcttctactacggcggcgtgtcctctgccagctatgctgccagcattgctgctgctgtggcccccaagaagaagatccagaccaccctgagcaacctggtggtgaagggcaccaacctgatcatccaggagacccggcagaagctgggcatcccccagaagagcctgagctgcagcgaggagttcaaggagctgatggacctgcccacctgtggggccaggaacctgaagcagcacctggccaaggccacagccagcggcatcatgggcagccccaagccagccatcaagagcatcagcgccagcgccctgctgaagcagcagaagcagaggatgctggagatgagaagaaggaagtctgaggagatccagaagcgcttcctgcagagcagcagcgaggtggagagccctgctgtgcccagcagcagccggcagcccccagcccagccccccaggactggaagtgagttcccccggctggagggcgccccagccaccatgacccccaagctgggccggggcgtgctggagggagatgatgtgctcttctatgatgagagccccccaccccggcccaagctgagcgccctggccgaggccaagaagctggccgccatcaccaagctgcgggccaagggccaggtgctgaccaagaccaaccccaacagcatcaagaagaagcagaaggacccccaggacatcctggaggtgaaggagcgggtggagaagaacaccatgttcagcagccaggccgaggatgagctggagcccgccaggaagaagaggcgggagcagctggcctacctggagagcgaggagttccagaagatcctgaaggccaagagcaagcacacaggcatcctgaaggaggccgaggccgagatgcaggagcgctactttgagcccctggtgaagaaggagcagatggaggagaagatgaggaacatccgggaggtgaagtgccgggtggtgacctgcaagacctgtgcctacacccacttcaagctgctggagacctgtgtgtctgagcagcacgagtaccactggcatgatggagtgaagcgcttcttcaagtgcccctgtggcaacagaagcatcagcctggaccggctgcccaacaagcactgcagcaactgtggcctgtacaagtgggagagagatggcatgctgaaggtgtgccacctgcggaccaacttctag

SEQ ID NO: 198908 - DNA, 2625 bp, Artificial Sequence
  derived and/or modified sequence
atggatgaggaggaggacaacctgagcctgctgacagccctgctggaggagaatgaaagtgccctggactgcaacagcgaggagaacaacttcctgaccagagaaaatggagagccagatgcctttgatgagctgtttgatgctgatggagatggagagagctacacagaggaggctgatgatggagagaccggggagaccagagatgagaaggagaacctggccaccctgtttggagacatggaggacctgacagatgaggaggaggtgcctgccagccagagcacagaaaatagagtgctgcctgccccagccccccggcgggagaagaccaatgaggagctgcaggaggagctgaggaacctgcaggagcagatgaaggccctgcaggagcagctgaaggtgaccaccatcaagcagacagccagccctgcccggctgcagaagagccctgagaagagccccaggcctcccctgaaggagcggcgggtgcagaggatccaggagagcacctgcttctctgctgagctggatgtgcctgccctgcccaggaccaagagggtggcccggacccccaaggccagccccccagaccccaagagcagcagcagcaggatgaccagcgcccccagccagcccctgcagaccatcagcaggaacaagcccagcggcatcacccggggccagatcgtgggcaccccaggcagcagtggagagaccacccagcccatctgtgtggaggccttcagcggcctgcggctgcggcggccccgggtgagcagcacagagatgaacaagaagatgactggaaggaagctgatccggctgagccagatcaaggagaagatggcccgggagaagctggaggagattgactgggtgaccttcggggtcatcctgaagaaggtgaccccccagagcgtgaacagcggcaagaccttcagcatctggaagctgaatgacctgcgggacctgacccagtgtgtgtccctcttcctgtttggagaggtgcacaaggccctgtggaagacagagcagggcaccgtggtgggcatcctgaatgccaaccccatgaagcccaaggatggcagcgaggaggtgtgcctgagcattgaccacccccagaaggtgctgatcatgggagaggccctggacctgggcacctgcaaggccaagaagaagaatggagagccctgcacccagacagtgaacctgcgggactgtgagtactgccagtaccacgtgcaggcccagtacaagaagctgagcgccaagagagctgacctgcagagcaccttcagcggcggccgcatccccaagaagtttgcccggcggggcaccagcctgaaggagcggctgtgccaggacggcttctactacggcggcgtgtcctctgccagctatgctgccagcattgctgctgctgtggcccccaagaagaagatccagaccaccctgagcaacctggtggtgaagggcaccaacctgatcatccaggagacccggcagaagctgggcatcccccagaagagcctgagctgcagcgaggagttcaaggagctgatggacctgcccacctgtggggccaggaacctgaagcagcacctggccaaggccacagccagcggcatcatgggcagccccaagccagccatcaagagcatcagcgccagcgccctgctgaagcagcagaagcagaggatgctggagatgagaagaaggaagtctgaggagatccagaagcgcttcctgcagagcagcagcgaggtggagagccctgctgtgcccagcagcagccggcagcccccagcccagccccccaggactggaagtgagttcccccggctggagggcgccccagccaccatgacccccaagctgggccggggcgtgctggagggagatgatgtgctcttctatgatgagagccccccaccccggcccaagctgagcgccctggccgaggccaagaagctggccgccatcaccaagctgcgggccaagggccaggtgctgaccaagaccaaccccaacagcatcaagaagaagcagaaggacccccaggacatcctggaggtgaaggagcgggtggagaagaacaccatgttcagcagccaggccgaggatgagctggagcccgccaggaagaagaggcgggagcagctggcctacctggagagcgaggagttccagaagatcctgaaggccaagagcaagcacacaggcatcctgaaggaggccgaggccgagatgcaggagcgctactttgagcccctggtgaagaaggagcagatggaggagaagatgaggaacatccgggaggtgaagtgccgggtggtgacctgcaagacctgtgcctacacccacttcaagctgctggagacctgtgtgtctgagcagcacgagtaccactggcatgatggagtgaagcgcttcttcaagtgcccctgtggcaacagaagcatcagcctggaccggctgcccaacaagcactgcagcaactgtggcctgtacaagtgggagagagatggcatgctgaaggagaagacaggccccaagattggaggagagaccctgctgcccagaggagaggagcacgccaagttcctgaacagcctgaagtag

SEQ ID NO: 198909 - DNA, 4587 bp, Artificial Sequence
  derived and/or modified sequence
ccaagattctacattgctcatctgggcatctgagcctccttcgaagtttcctgtcacaactgtcctcttgacagcatggatgaggaggaagacaatctgtctctgctgaccgcactgctggaagaaaatgagtcagccttggattgtaattcagaagaaaataacttcttgacgcgggaaaatggcgagcccgacgcatttgatgagctctttgatgccgacggcgacggtgaatcttatacagaagaggctgatgatggagaaacaggagagacaagagacgaaaaggaaaatctggccactctctttggagatatggaggacttaacagatgaagaagaagttcccgcatcacagtcaactgaaaatagggtcctccctgctcctgcccccaggcgagagaaaacgaatgaagagttgcaagaggaattaaggaatttgcaagagcaaatgaaggccttacaagagcagctaaaagtaacaacaattaaacagacagcaagcccagcccgtctgcaaaaatcccctgagaagtctccccggccacctcttaaggagaggagagttcagagaattcaggagtcaacatgcttttctgcggagcttgatgtccctgcgctaccaagaaccaagagggtggctcgaacaccaaaggcttcacctccagatcccaaaagctcatcttcaaggatgacaagtgcaccctcccaacccctacagacgatttctcggaacaaacctagtgggataactagaggtcaaattgtggggaccccaggaagttctggggaaacgactcaacccatctgtgtggaagccttctctggtctgcggctcaggcggcctcgagtatcctccacagaaatgaacaagaaaatgaccggccgaaaactgatcagactgtctcagatcaaggaaaagatggccagagagaagctggaagaaatagattgggtgacatttggggttatattgaagaaggttacgccacagagtgtgaatagtggaaaaaccttcagcatatggaaactgaatgatcttcgtgacctgacacaatgtgtgtccttgttcttatttggagaagttcacaaagcgctctggaagacggagcaggggactgtcgtagggatcctcaatgccaaccccatgaagcccaaggatggttcagaggaggtgtgtttatctatcgatcatcctcagaaggtcttaattatgggtgaagctcttgacctgggaacctgtaaagccaagaagaagaatggagagccgtgcacgcagactgtgaatttgcgtgactgtgagtactgtcagtaccatgtccaggctcagtacaagaagctcagcgcaaagcgtgcggatctgcagtccaccttctctggaggacgaattccaaagaagtttgcccgcagaggcaccagcctcaaagaacggctgtgccaagatggcttttactacggaggggtttcttctgcctcgtatgcagcttcaattgcagcagctgtggctcctaagaagaagattcaaaccactctgagtaatctggttgttaagggcacaaacttgatcatccaggaaacacggcaaaaactcggaataccccagaagagcctgtcttgctctgaggagttcaaggaactgatggacctgccgacgtgtggagccaggaacttaaaacaacatttagccaaagccacagcttcagggattatggggagcccaaaaccagccatcaagtccatctcggcctcagcactcttgaagcaacagaagcagcggatgttggagatgaggagaaggaaatcagaagaaatacagaagcgatttctgcagagctcaagtgaagttgagagcccagctgtgccatcttcatcaagacagccccctgctcagcctccacggacaggatccgagttccccaggctggagggagccccggccacaatgacgcccaagctggggcgaggtgtcttggaaggagatgatgttctcttttatgatgagtcaccaccaccaagaccaaaactgagtgctttagcagaagccaaaaagttagctgctatcaccaaattaagggcaaaaggccaggttcttacaaaaacaaacccaaacagcattaagaagaaacaaaaggaccctcaggacatcctggaggtgaaggaacgtgtagaaaaaaacaccatgttttcttctcaagctgaggatgaattggagcctgccaggaaaaaaaggagagaacaacttgcctatctggaatctgaggaatttcagaaaatcctaaaagcaaaatcaaaacacacaggcatcctgaaagaggccgaggctgagatgcaggagcgctactttgagccactggtgaaaaaagaacaaatggaagaaaagatgagaaacatcagagaagtgaagtgccgtgtcgtgacatgcaagacgtgcgcctatacccacttcaagctgctggagacctgcgtcagtgagcagcatgaataccactggcatgatggtgtgaagaggtttttcaaatgtccctgtggaaacagaagcatctccttggacagactcccgaacaagcactgcagtaactgtggcctctacaaatgggaacgggacggaatgctaaaggtatgccatttgcgtactaatttttgactccttttagtgacccatgctaataatgtggaaccatctcctattaaaatattttcatttttctaggaaaagactggtccaaagataggaggagaaactctgttaccaagaggagaagaacatgctaaatttctgaacagccttaaataacccgaacttcagacattttcccacagacttcctggcctcctgtgactctggaaagcaaaggattggctgtgtattgtccattgattcctgattgacgccgtcaaaaacaaatgcttgttaagcccataagctttgcctgcttactttctgccattgggttggtttgataccacatttaacattgacatttaagtggaaaaccaagttatcattgtcttttctaagctcagtgtggatgattgcattacttcattcactgaagtttttgcccaaaaattggaaggtaaacagagagctatgtttctgtatcttttggttatagagtgttcacttctttatcataacaaaattctagtgtttatacgaacacccagaggcaaaagaatttggcttaattctcactccaggtaagtagcttaacttctgggcttcagttttctcatctgtaaaatcaggaagattggactaagtgatcctgaaatgtattttttagcactggatttctacaaataataaaactttcccatctagataatgatgatcacatagtcttgatgtacggacattaaaagccagatttcttcattcaattctgttatctctgttttactctttgaaattgatcaagccactgaatcactttgcatttcagtttatatatatagagagaaagaaggtgtctgctcttacattattgtggagccctgtgatagaaatatgtaaaatctcatattattttttttttaatttttttattttttatgacagggtctcactatgtcaccctggctggagtgcagtagtgcgatcgcggcacactgcagccttggcttccctgggctcaagcagtcctcccacctcagtctcccaaatagctaggactacaggcgtgcgtgaccaagcccagctaatttttgcattttttgtagagatggggttttgccatgttgctcaggctggtctcaaactcctgagcactagcaatccacccacctctgtttccaaaaaaaaaaaaaaaatgaaaggtcaacccctatgcaaattaccacagcaaaggtttcattcaggagattcttccatctgggcaacctggttttccaaatatcatttgacctaagtgaatgttgatactagctaaagattgggtaaattggttgaattattgtattgaagcttgagctgtagctaaaagtaatttaggtttcccctaagatgttattatgttagggacataacacttttgggaggttgttgtgggagatggttgatttaggttttcaaaagctagaaataaaatttacatgccttagatttcataaaattctgctctaattgggtggaaggtgctgtatctaacttgtgttcctcctaaggttatgtcctaataactattcttttaggagtatacttctactttatagaaggttgcttttctttttaattttttctaacaaagaaaagaataaagtatttattaataagaaccagaaagcacttgaaactgatgtttttaatggctcatttagggtagatttatttatctcattaacttaaaacagctatgtgtatgaaataggtcacaacagaacttgaacaccaggttggtgtctgagcaatccctttcttatgggaaaaacaatgttcttgtttgaacagagggtatcattgcagtcagtattcacgtgtatattgttatataagttgtataatatgcttgtaaaggctgagggtgagctgtatctggatgcctttttacaatttgattttaacttttaaaataaatttaaaacataa

SEQ ID NO: 198910 - DNA, 4547 bp, Artificial Sequence
  derived and/or modified sequence
ggttggaattttggcgggttcagctgtgaacgaagaaggcgtcccggcatcggccaagattctacattgctcatctgggcatctgagcctccttcgaagtttcctgtcacaactgtcctcttgacagcatggatgaggaggaagacaatctgtctctgctgaccgcactgctggaagaaaatgagtcagccttggattgtaattcagaagaaaataacttcttgacgcgggaaaatggcgagcccgacgcatttgatgagctctttgatgccgacggcgacggtgaatcttatacagaagaggctgatgatggagaaacaggagagacaagagacgaaaaggaaaatctggccactctctttggagatatggaggacttaacagatgaagaagaagttcccgcatcacagtcaactgaaaatagggtcctccctgctcctgcccccaggcgagagaaaacgaatgaagagttgcaagaggaattaaggaatttgcaagagcaaatgaaggccttacaagagcagctaaaagtaacaacaattaaacagacagcaagcccagcccgtctgcaaaaatcccctgagaagtctccccggccacctcttaaggagaggagagttcagagaattcaggagtcaacatgcttttctgcggagcttgatgtccctgcgctaccaagaaccaagagggtggctcgaacaccaaaggcttcacctccagatcccaaaagctcatcttcaaggatgacaagtgcaccctcccaacccctacagacgatttctcggaacaaacctagtgggataactagaggtcaaattgtggggaccccaggaagttctggggaaacgactcaacccatctgtgtggaagccttctctggtctgcggctcaggcggcctcgagtatcctccacagaaatgaacaagaaaatgaccggccgaaaactgatcagactgtctcagatcaaggaaaagatggccagagagaagctggaagaaatagattgggtgacatttggggttatattgaagaaggttacgccacagagtgtgaatagtggaaaaaccttcagcatatggaaactgaatgatcttcgtgacctgacacaatgtgtgtccttgttcttatttggagaagttcacaaagcgctctggaagacggagcaggggactgtcgtagggatcctcaatgccaaccccatgaagcccaaggatggttcagaggaggtgtgtttatctatcgatcatcctcagaaggtcttaattatgggtgaagctcttgacctgggaacctgtaaagccaagaagaagaatggagagccgtgcacgcagactgtgaatttgcgtgactgtgagtactgtcagtaccatgtccaggctcagtacaagaagctcagcgcaaagcgtgcggatctgcagtccaccttctctggaggacgaattccaaagaagtttgcccgcagaggcaccagcctcaaagaacggctgtgccaagatggcttttactacggaggggtttcttctgcctcgtatgcagcttcaattgcagcagctgtggctcctaagaagaagattcaaaccactctgagtaatctggttgttaagggcacaaacttgatcatccaggaaacacggcaaaaactcggaataccccagaagagcctgtcttgctctgaggagttcaaggaactgatggacctgccgacgtgtggagccaggaacttaaaacaacatttagccaaagccacagcttcagggattatggggagcccaaaaccagccatcaagtccatctcggcctcagcactcttgaagcaacagaagcagcggatgttggagatgaggagaaggaaatcagaagaaatacagaagcgatttctgcagagctcaagtgaagttgagagcccagctgtgccatcttcatcaagacagccccctgctcagcctccacggacaggatccgagttccccaggctggagggagccccggccacaatgacgcccaagctggggcgaggtgtcttggaaggagatgatgttctcttttatgatgagtcaccaccaccaagaccaaaactgagtgctttagcagaagccaaaaagttagctgctatcaccaaattaagggcaaaaggccaggttcttacaaaaacaaacccaaacagcattaagaagaaacaaaaggaccctcaggacatcctggaggtgaaggaacgtgtagaaaaaaacaccatgttttcttctcaagctgaggatgaattggagcctgccaggaaaaaaaggagagaacaacttgcctatctggaatctgaggaatttcagaaaatcctaaaagcaaaatcaaaacacacaggcatcctgaaagaggccgaggctgagatgcaggagcgctactttgagccactggtgaaaaaagaacaaatggaagaaaagatgagaaacatcagagaagtgaagtgccgtgtcgtgacatgcaagacgtgcgcctatacccacttcaagctgctggagacctgcgtcagtgagcagcatgaataccactggcatgatggtgtgaagaggtttttcaaatgtccctgtggaaacagaagcatctccttggacagactcccgaacaagcactgcagtaactgtggcctctacaaatgggaacgggacggaatgctaaaggaaaagactggtccaaagataggaggagaaactctgttaccaagaggagaagaacatgctaaatttctgaacagccttaaataacccgaacttcagacattttcccacagacttcctggcctcctgtgactctggaaagcaaaggattggctgtgtattgtccattgattcctgattgacgccgtcaaaaacaaatgcttgttaagcccataagctttgcctgcttactttctgccattgggttggtttgataccacatttaacattgacatttaagtggaaaaccaagttatcattgtcttttctaagctcagtgtggatgattgcattacttcattcactgaagtttttgcccaaaaattggaaggtaaacagagagctatgtttctgtatcttttggttatagagtgttcacttctttatcataacaaaattctagtgtttatacgaacacccagaggcaaaagaatttggcttaattctcactccaggtaagtagcttaacttctgggcttcagttttctcatctgtaaaatcaggaagattggactaagtgatcctgaaatgtattttttagcactggatttctacaaataataaaactttcccatctagataatgatgatcacatagtcttgatgtacggacattaaaagccagatttcttcattcaattctgttatctctgttttactctttgaaattgatcaagccactgaatcactttgcatttcagtttatatatatagagagaaagaaggtgtctgctcttacattattgtggagccctgtgatagaaatatgtaaaatctcatattattttttttttaatttttttattttttatgacagggtctcactatgtcaccctggctggagtgcagtagtgcgatcgcggcacactgcagccttggcttccctgggctcaagcagtcctcccacctcagtctcccaaatagctaggactacaggcgtgcgtgaccaagcccagctaatttttgcattttttgtagagatggggttttgccatgttgctcaggctggtctcaaactcctgagcactagcaatccacccacctctgtttccaaaaaaaaaaaaaaaatgaaaggtcaacccctatgcaaattaccacagcaaaggtttcattcaggagattcttccatctgggcaacctggttttccaaatatcatttgacctaagtgaatgttgatactagctaaagattgggtaaattggttgaattattgtattgaagcttgagctgtagctaaaagtaatttaggtttcccctaagatgttattatgttagggacataacacttttgggaggttgttgtgggagatggttgatttaggttttcaaaagctagaaataaaatttacatgccttagatttcataaaattctgctctaattgggtggaaggtgctgtatctaacttgtgttcctcctaaggttatgtcctaataactattcttttaggagtatacttctactttatagaaggttgcttttctttttaattttttctaacaaagaaaagaataaagtatttattaataagaaccagaaagcacttgaaactgatgtttttaatggctcatttagggtagatttatttatctcattaacttaaaacagctatgtgtatgaaataggtcacaacagaacttgaacaccaggttggtgtctgagcaatccctttcttatgggaaaaacaatgttcttgtttgaacagagggtatcattgcagtcagtattcacgtgtatattgttatataagttgtataatatgcttgtaaaggctgagggtgagctgtatctggatgcctttttacaatttgattttaacttttaaaataaatttaaaacataa

SEQ ID NO: 198911 - DNA, 2568 bp, Artificial Sequence
  derived and/or modified sequence
atggacgaggaggaggacaacctgagcctgctgaccgccctgctggaggagaacgaatctgccctggattgtaatagtgaggaaaacaacttcctaacacgggaaaacggcgagcctgacgcatttgacgagctattcgacgccgacggcgacggcgagagctatacagaagaagccgacgatggcgagacaggcgagacacgggatgaaaaagagaacctggcaacactattcggggatatggaggacctgacggatgaagaggaggtacccgccagccagtcaacggaaaacagagtgcttcccgcgcctgccccaagaagggaaaaaaccaacgaggagcttcaggaggagctgcgcaacctgcaggagcaaatgaaggcgctacaggagcagttaaaggtcacgactatcaagcagacggcaagccctgcccggctacagaaatctcccgagaaaagtccgagacccccattgaaagaacgccgggttcaaagaattcaagaatcgacttgcttttccgccgagctcgacgttcccgcacttccgcggactaagagagtggctaggactccgaaggcaagcccacctgaccctaagtcatccagctctcgtatgacaagtgcgccctctcagccactgcagacgatatctagaaacaaacctagcggcataacccgcggccagatcgtaggcacccctgggtccagtggtgagacaacccaaccgatctgcgtcgaggctttcagtggtctcaggctgaggcgaccacgcgtctctagcaccgagatgaacaagaaaatgacaggaagaaaactcataaggctgtcccagattaaggaaaagatggccagagagaaactggaagagattgattgggtgacctttggggtgattctcaagaaggtcaccccacagagcgtcaattctggtaaaacttttagcatttggaaactaaatgacctgcgggacttaacacagtgcgtttccctattcctgtttggagaggtgcacaaagccttatggaagacagaacaaggcacagtggttggaatcttgaacgccaaccctatgaaacccaaagacggcagtgaagaggtgtgcctctccatcgaccaccctcagaaagttctcattatgggcgaagcacttgacttgggaacctgcaaagccaaaaaaaaaaacggcgagccatgtactcaaaccgtgaaccttcgggactgcgagtactgtcagtatcacgtacaggcgcagtataaaaagctgagtgctaagcgggctgaccttcagtctaccttctcgggcggaagaattccaaagaagtttgcgaggagaggtaccagcctgaaagagcgactttgccaggatggattctactatggcggagtgagcagtgctagttacgccgcctccatcgcagctgctgtcgcccccaagaagaaaatccaaactacactgagtaacctggttgtcaagggaacaaaccttattatccaggaaacccgtcagaaactgggcattccacagaaatccctttcatgcagcgaagagtttaaggagctcatggatctccctacctgcggagccaggaatctgaagcagcatcttgcaaaagccactgctagtggcatcatgggctctcccaagcctgctatcaaatccatttccgcttccgcactcctcaaacaacagaaacagagaatgctggagatgcgtaggagaaaatccgaggaaattcagaagcggtttctgcaaagttcctctgaagtcgagagcccggcagttccgagctccagtcgtcagccccccgcccagccaccccgcaccggaagcgagtttccccgactggaaggcgctccagcaactatgacgcctaagctggggaggggggttctggagggagacgacgtcctgttctatgacgagagtcccccaccacggcctaaattgtccgccctcgcagaggccaaaaaattggccgcaatcacgaagctcagggcaaagggtcaagtgttgaccaagaccaatccaaactcaatcaagaagaagcagaaagacccacaggatatcttggaagtcaaggaacgcgtggagaaaaatactatgttcagctcccaggctgaagacgagttggagcccgctaggaagaaaaggcgcgaacagttggcctaccttgaatccgaggaattccaaaaaatcctgaaagccaagagtaaacacactggcattctgaaagaggccgaggctgagatgcaagaaaggtacttcgaacctctcgtgaagaaggaacagatggaggagaaaatgaggaatattcgggaggtaaagtgcagagtggtgacttgcaaaacatgcgcttacactcatttcaagctgctggagacatgtgtctccgaacaacacgagtatcactggcacgatggagttaagcgcttttttaaatgcccctgcggaaacagaagtatctccctggaccggttacctaataagcactgttccaactgtggcctctacaaatgggaacgcgacggcatgctcaaagtatgccacttacgtactaacttctag

SEQ ID NO: 198912 - DNA, 2625 bp, Artificial Sequence
  derived and/or modified sequence
atggacgaggaggaggacaacctgagcctgctgaccgccctgctggaggagaacgagtcagctttggactgcaatagtgaggaaaacaacttccttacacgagagaacggagaaccggacgcttttgacgagctattcgacgcagacggggatggagagtcttataccgaagaggcagacgatggggaaaccggggagacccgcgatgagaaggagaacctggctacgctgtttggagatatggaggacctgaccgacgaggaagaggtacccgcctcccagagtaccgagaacagggtattacctgccccagcacccaggagagaaaaaaccaatgaggaactgcaggaagagttaaggaatcttcaagaacagatgaaggcactgcaagagcagcttaaggtaactacgatcaagcaaaccgcaagtcccgcacggctgcaaaaatctcccgaaaaatctccccgccccccgctcaaagaacgccgggtacagcgcatccaggagtcaacgtgcttcagcgctgaacttgacgttccggctctgcctcggacaaaacgggtggcaaggacgcccaaagcgtctccacccgatccgaaaagttcatccagccgtatgaccagtgcccctagccagccactacagaccatctctaggaacaagccttccggcattacaagaggccagatcgtcggcactccagggagtagcggagagaccacccaacccatctgcgtagaagctttttcgggactccgcttaagacgcccgcgagtctcctcaaccgagatgaataagaaaatgactggccgaaagctgatcaggctttcccaaatcaaagagaagatggctcgcgaaaaactcgaggagatcgactgggttacttttggcgtgatcctgaaaaaagttacaccccagagcgtcaactccgggaaaactttttctatttggaaactcaatgacctgagagatctgacgcaatgcgtgtctttatttttatttggagaagttcacaaggccctgtggaaaacggagcagggaaccgtggtgggaatcctgaatgccaacccgatgaagcccaaagacggctctgaagaagtgtgcctatcaatcgaccacccccaaaaggtcctcatcatgggcgaagcacttgatttaggcacctgtaaggcaaaaaagaaaaatggtgagccatgcacgcaaacggttaatctccgcgactgtgagtattgtcagtaccacgttcaggcacaatacaagaagttaagtgccaaaagggctgacctccagtctaccttttctggaggtcgaatccctaagaagtttgcaaggcgcggtacgagcttgaaagagcgcttatgccaggatggattttattatggtggcgtgagtagcgccagttatgccgcttccattgccgcagcagtcgcccctaagaagaagatccagactacactcagcaacctggtggtcaaaggaaccaatctcatcattcaggagactcgacagaaactcgggatcccacagaaatccttatcttgttccgaggaattcaaggagcttatggacctgccgacatgcggcgcccgcaacctgaaacagcacctggccaaggccacagcctccgggattatggggtccccgaagcctgccattaagtccatatctgcaagtgccctgttgaaacagcaaaagcagcgcatgctcgaaatgcggcgcaggaagtccgaggaaatccagaagcgcttcctgcagtcttcaagtgaggtggaaagcccagcagttccatcgtcttcacgacagccgccagcccagcccccacgtactgggagtgagtttcctagattggagggggcgccggctacgatgactcccaaactaggaagaggggtgctcgagggcgacgatgtattgttctacgacgagtccccacccccacggcctaagctctcagctctcgccgaggctaagaagctggcggctattacaaagctgcgggccaagggtcaagtgctcacaaagaccaacccaaactcaattaagaaaaaacagaaggacccacaggacatcctggaagtgaaagaacgggtggagaaaaatacaatgttttctagccaggccgaagatgaactggagcctgcaagaaagaaaagaagagagcagctggcctatctcgaatctgaggaatttcagaagatccttaaagccaagtcaaagcacacaggtatcctcaaagaggctgaggcagagatgcaggagcggtacttcgaaccgttggtgaagaaggaacaaatggaggagaaaatgcgaaatatccgggaggtgaaatgtcgggtcgtgacgtgcaagacttgtgcgtatactcacttcaaactgctggagacatgtgtctcagagcagcacgagtaccactggcacgacggggtgaaacggttcttcaagtgtccatgtgggaacagatcgatcagtctggatcgtctccctaacaagcactgctcgaactgcggactgtataaatgggagcgcgatggcatgttaaaagagaagaccggacccaagattggaggtgagaccctgcttcctcggggcgaggaacacgcaaagtttctgaacagcttgaagtag

SEQ ID NO: 198913 - DNA, 2568 bp, Artificial Sequence
  derived and/or modified sequence
atggacgaagaagaagataatctgtctctgctgacggccctactggaggagaacgagtctgcccttgactgcaattctgaagaaaataattttctgactagagaaaacggcgagcctgatgctttcgacgaactgtttgatgccgacggtgacggagagtcgtacaccgaagaggccgacgacggcgagacgggagagactcgcgacgagaaagagaacctggctacgctgttcggcgacatggaggaccttaccgacgaggaggaagtgcccgcaagtcaatcaacggaaaatagggtgctcccagccccagcgcctcggagggagaagacaaacgaggaactgcaggaggagctcagaaatttgcaagaacagatgaaagccctccaagagcagctgaaggtaactactatcaaacagacagcgagccccgctaggttacaaaaaagccctgagaagtcccccaggccgccactgaaagagagaagggtgcaacgcattcaggagtctacatgcttctccgctgagttagacgtgcccgctttgccacggaccaagagagtcgctagaacccctaaggcaagtccacctgacccaaaaagcagcagtagtaggatgacaagtgctccttcccaaccactccaaactatcagccgcaacaagccatccggcattacaaggggccagatcgtcggcactcccggtagcagcggggaaacaacccaacctatctgtgtagaggcattcagtggactgcgactgcggagacccagggttagtagtaccgaaatgaacaagaagatgaccgggaggaagttaatacgtctctcccagattaaggaaaagatggcacgcgagaaattggaggagatcgactgggtcaccttcggggtcatcctgaagaaggtgacaccgcagagcgtcaactccggaaaaacattttccatctggaaacttaatgatctcagggacctgacgcagtgcgtatcattgttcctttttggcgaagttcacaaagcactgtggaagacagaacagggaacagtagtagggattctgaacgcgaacccaatgaagcccaaagacggaagtgaggaagtgtgtctgtctatagaccacccccagaaagtgctgattatgggggaagcactggaccttggcacttgcaaggcaaagaaaaaaaacggagaaccatgcacacagacggtgaacctgcgcgattgtgagtattgtcaataccacgtgcaggcccagtacaagaaactgagcgcaaagcgtgctgacctccagagcactttcagtggcggtcggatccctaaaaaatttgctaggcggggtacctcgcttaaggaacgattatgccaggatggcttttactatggaggtgtatcctcagcctcgtacgcggcaagcatagccgcagccgtcgccccaaagaaaaagatacagactacgctcagcaacctcgtggtgaaggggaccaatttaatcattcaggagacccgtcagaagctgggaatcccccagaagtcgctatcatgttctgaggagtttaaagaactgatggatttgcctacctgcggagcaagaaacctcaagcagcatttggctaaggctacggcttctggaatcatgggctctccgaagcccgcaatcaagagtataagcgctagcgcgctcctgaaacagcaaaagcagcgcatgctggaaatgcgccgaagaaagtccgaagaaattcagaaacggtttctgcagagttcttctgaggttgagagtccagctgtacctagtagctcgcggcagccacccgctcagccacctcgcactggttccgaatttccgaggcttgagggggcaccagctacaatgacacctaaacttggccgaggagtgctggagggcgatgatgtcctgttctacgacgagtcccccccacctcggcctaagctcagcgcactagccgaggccaagaaattggcagccattaccaagctgagagccaaggggcaggtgttgaccaagactaatcctaactcgataaaaaaaaaacagaaggatccacaggatatcctggaggtcaaagagcgcgtcgagaagaacaccatgttttccagtcaagctgaggatgagctggagccagccagaaaaaagaggcgtgagcagctggcttacctcgagtctgaagagttccagaaaatactcaaagcaaaatctaagcacacaggcatcttgaaagaggccgaggcagagatgcaagagcggtattttgagccccttgttaagaaagaacagatggaagagaaaatgcgcaacattagggaggttaagtgcagagtggtaacgtgtaaaacatgtgcctacacgcacttcaagctgctcgaaacatgcgtgagtgagcagcacgagtatcattggcacgatggcgtgaaaagatttttcaaatgtccatgcggcaaccgcagcatatcactggatcggttgcctaataaacattgcagcaactgtggtctctacaagtgggagcgcgatggaatgttgaaggtgtgtcacctgcgtacaaatttctag

SEQ ID NO: 198914 - DNA, 2625 bp, Artificial Sequence
  derived and/or modified sequence
atggatgaagaagaggacaatctctccctgctaaccgcgcttctcgaggagaatgagtctgccttggactgcaacagcgaggagaacaattttctgactagagagaatggcgagcctgacgcctttgatgaactgtttgatgctgacggagatggagaatcgtatacggaggaagcggacgatggggagacgggtgaaacccgtgatgagaaggagaacctcgcaacactgtttggggacatggaagatctgacagatgaagaggaggtgcccgctagtcagtcaactgaaaacagagtgctgccagccccagccccacggcgagagaagacaaatgaggagttacaggaagagctcagaaatctgcaggagcagatgaaagccctccaggagcaactaaaggtgaccactatcaagcaaacagcctctccagctcggctgcaaaaaagccccgagaaaagcccacgcccacccctcaaggagcgccgagtccagagaattcaagagtccacctgcttctcggcagagcttgatgtcccggcactccccagaactaagcgggttgccaggacaccgaaggcctcaccaccagaccctaagtcatcgtcctcaaggatgacgtccgctccatcccaacccttgcagacaatcagccggaacaagccttctgggatcactcgcggacaaattgtaggtacacccggttcttcgggagagactacacagcccatctgcgtggaagccttctcgggtttgaggctgcgtcgcccacgggtcagttctaccgagatgaataaaaagatgactgggaggaagcttatccggctgagccaaatcaaggaaaagatggccagggaaaagttggaagagattgattgggtcacatttggggtcatcttaaagaaggtgaccccgcaaagtgtgaattcgggcaaaaccttcagtatttggaaattaaatgacctcagagacttgacacagtgcgtgtctctcttcttatttggtgaggtccacaaggcactctggaaaaccgagcaaggcactgtggtaggcattctcaacgccaaccccatgaagcctaaggacggctccgaggaagtttgcttaagcatcgaccaccctcagaaggtgctcatcatgggggaggccctcgacctgggaacatgcaaggcaaaaaaaaaaaacggtgagccgtgcacccagacagtaaatctgcgagattgcgagtattgccaatatcatgttcaggcccaatataagaagctgagcgccaaacgggctgaccttcagtccaccttctctggaggcagaatccccaagaagtttgctagaaggggaacctctttgaaagaacgcctatgccaagacggattttactacggaggagtgtcatcagcatcttacgccgcatctattgctgccgctgtcgcccctaaaaaaaagatccagacaaccctgtccaatctggtggtgaagggcactaacctcataatccaagagacacggcaaaagctggggattccacagaagtcattatcttgttccgaagagttcaaggagttaatggacctgcccacttgtggagcaaggaaccttaaacagcacttagctaaagcaactgcgagcggaataatggggtcccccaagcctgccataaaaagtatctccgctagcgccctcctgaagcagcagaagcagcgtatgctggaaatgcggagaaggaagtctgaggaaatccagaagaggttccttcagtctagttctgaagttgagtcccctgccgtgccaagctcttcaaggcagcctcccgcacagccaccacgcactggctcggagttccccagactagagggagcaccggctactatgactcccaagctggggcgtggtgtcctggagggagacgacgtgctcttctatgacgaatctcccccacctcgtcctaagctaagtgcactggcagaagccaaaaagttggcagctatcactaagctgagagccaagggtcaggtgctgacaaaaactaacccaaactcaataaaaaaaaaacagaaggacccacaagatattctcgaggtgaaagaacgggtggagaaaaatacaatgtttagctctcaggctgaagacgaactggagcccgcaagaaaaaagaggagagaacagctcgcttacttagaatccgaggagttccagaagattttgaaggccaagtccaagcatactgggatcctgaaagaggcagaggccgaaatgcaggaacgttacttcgaacccctggtgaaaaaagaacagatggaggagaagatgaggaacatcagagaagtcaaatgtcgggtcgtgacctgtaagacctgtgcctacacacactttaagctgctagagacatgtgtgagcgagcagcacgagtatcattggcacgatggcgtgaagcgtttcttcaagtgcccctgtggtaaccggagcataagtctggaccggctgccaaataagcattgtagcaattgcggcttgtacaaatgggagcgagacggaatgctgaaggagaaaaccggtcctaagattggtggcgagaccttgcttccccgtggagaggaacatgccaagtttctgaattccctgaaatag

SEQ ID NO: 198915 - DNA, 2568 bp, Artificial Sequence
  derived and/or modified sequence
atggacgaggaggaggacaacctgagcctgctgaccgccctgctggaggagaacgagagcgccctggactgcaacagcgaggagaacaacttcctgaccagagagaacggcgagcccgacgccttcgacgagctgttcgacgccgacggcgacggcgagagctacaccgaggaggccgacgacggcgagaccggcgagaccagagacgagaaggagaacctggccaccctgttcggcgacatggaggacctgaccgacgaggaggaggtgcccgccagccagagcaccgagaacagagtgctgcccgcccccgcccccagaagagagaagaccaacgaggagctgcaggaggagctgagaaacctgcaggagcagatgaaggccctgcaggagcagctgaaggtgaccaccatcaagcagaccgccagccccgccagactgcagaagagccccgagaagagccccagaccccccctgaaggagagaagagtgcagagaatccaggagagcacctgcttcagcgccgagctggacgtgcccgccctgcccagaaccaagagagtggccagaacccccaaggccagcccccccgaccccaagagcagcagcagcagaatgaccagcgcccccagccagcccctgcagaccatcagcagaaacaagcccagcggcatcaccagaggccagatcgtgggcacccccggcagcagcggcgagaccacccagcccatctgcgtggaggccttcagcggcctgagactgagaagacccagagtgagcagcaccgagatgaacaagaagatgaccggcagaaagctgatcagactgagccagatcaaggagaagatggccagagagaagctggaggagatcgactgggtgaccttcggcgtgatcctgaagaaggtgaccccccagagcgtgaacagcggcaagaccttcagcatctggaagctgaacgacctgagagacctgacccagtgcgtgagcctgttcctgttcggcgaggtgcacaaggccctgtggaagaccgagcagggcaccgtggtgggcatcctgaacgccaaccccatgaagcccaaggacggcagcgaggaggtgtgcctgagcatcgaccacccccagaaggtgctgatcatgggcgaggccctggacctgggcacctgcaaggccaagaagaagaacggcgagccctgcacccagaccgtgaacctgagagactgcgagtactgccagtaccacgtgcaggcccagtacaagaagctgagcgccaagagagccgacctgcagagcaccttcagcggcggcagaatccccaagaagttcgccagaagaggcaccagcctgaaggagagactgtgccaggacggcttctactacggcggcgtgagcagcgccagctacgccgccagcatcgccgccgccgtggcccccaagaagaagatccagaccaccctgagcaacctggtggtgaagggcaccaacctgatcatccaggagaccagacagaagctgggcatcccccagaagagcctgagctgcagcgaggagttcaaggagctgatggacctgcccacctgcggcgccagaaacctgaagcagcacctggccaaggccaccgccagcggcatcatgggcagccccaagcccgccatcaagagcatcagcgccagcgccctgctgaagcagcagaagcagagaatgctggagatgagaagaagaaagagcgaggagatccagaagagattcctgcagagcagcagcgaggtggagagccccgccgtgcccagcagcagcagacagccccccgcccagccccccagaaccggcagcgagttccccagactggagggcgcccccgccaccatgacccccaagctgggcagaggcgtgctggagggcgacgacgtgctgttctacgacgagagccccccccccagacccaagctgagcgccctggccgaggccaagaagctggccgccatcaccaagctgagagccaagggccaggtgctgaccaagaccaaccccaacagcatcaagaagaagcagaaggacccccaggacatcctggaggtgaaggagagagtggagaagaacaccatgttcagcagccaggccgaggacgagctggagcccgccagaaagaagagaagagagcagctggcctacctggagagcgaggagttccagaagatcctgaaggccaagagcaagcacaccggcatcctgaaggaggccgaggccgagatgcaggagagatacttcgagcccctggtgaagaaggagcagatggaggagaagatgagaaacatcagagaggtgaagtgcagagtggtgacctgcaagacctgcgcctacacccacttcaagctgctggagacctgcgtgagcgagcagcacgagtaccactggcacgacggcgtgaagagattcttcaagtgcccctgcggcaacagaagcatcagcctggacagactgcccaacaagcactgcagcaactgcggcctgtacaagtgggagagagacggcatgctgaaggtgtgccacctgagaaccaacttctag

SEQ ID NO: 198916 - DNA, 2625 bp, Artificial Sequence
  derived and/or modified sequence
atggacgaggaggaggacaacctgagcctgctgaccgccctgctggaggagaacgagagcgccctggactgcaacagcgaggagaacaacttcctgaccagagagaacggcgagcccgacgccttcgacgagctgttcgacgccgacggcgacggcgagagctacaccgaggaggccgacgacggcgagaccggcgagaccagagacgagaaggagaacctggccaccctgttcggcgacatggaggacctgaccgacgaggaggaggtgcccgccagccagagcaccgagaacagagtgctgcccgcccccgcccccagaagagagaagaccaacgaggagctgcaggaggagctgagaaacctgcaggagcagatgaaggccctgcaggagcagctgaaggtgaccaccatcaagcagaccgccagccccgccagactgcagaagagccccgagaagagccccagaccccccctgaaggagagaagagtgcagagaatccaggagagcacctgcttcagcgccgagctggacgtgcccgccctgcccagaaccaagagagtggccagaacccccaaggccagcccccccgaccccaagagcagcagcagcagaatgaccagcgcccccagccagcccctgcagaccatcagcagaaacaagcccagcggcatcaccagaggccagatcgtgggcacccccggcagcagcggcgagaccacccagcccatctgcgtggaggccttcagcggcctgagactgagaagacccagagtgagcagcaccgagatgaacaagaagatgaccggcagaaagctgatcagactgagccagatcaaggagaagatggccagagagaagctggaggagatcgactgggtgaccttcggcgtgatcctgaagaaggtgaccccccagagcgtgaacagcggcaagaccttcagcatctggaagctgaacgacctgagagacctgacccagtgcgtgagcctgttcctgttcggcgaggtgcacaaggccctgtggaagaccgagcagggcaccgtggtgggcatcctgaacgccaaccccatgaagcccaaggacggcagcgaggaggtgtgcctgagcatcgaccacccccagaaggtgctgatcatgggcgaggccctggacctgggcacctgcaaggccaagaagaagaacggcgagccctgcacccagaccgtgaacctgagagactgcgagtactgccagtaccacgtgcaggcccagtacaagaagctgagcgccaagagagccgacctgcagagcaccttcagcggcggcagaatccccaagaagttcgccagaagaggcaccagcctgaaggagagactgtgccaggacggcttctactacggcggcgtgagcagcgccagctacgccgccagcatcgccgccgccgtggcccccaagaagaagatccagaccaccctgagcaacctggtggtgaagggcaccaacctgatcatccaggagaccagacagaagctgggcatcccccagaagagcctgagctgcagcgaggagttcaaggagctgatggacctgcccacctgcggcgccagaaacctgaagcagcacctggccaaggccaccgccagcggcatcatgggcagccccaagcccgccatcaagagcatcagcgccagcgccctgctgaagcagcagaagcagagaatgctggagatgagaagaagaaagagcgaggagatccagaagagattcctgcagagcagcagcgaggtggagagccccgccgtgcccagcagcagcagacagccccccgcccagccccccagaaccggcagcgagttccccagactggagggcgcccccgccaccatgacccccaagctgggcagaggcgtgctggagggcgacgacgtgctgttctacgacgagagccccccccccagacccaagctgagcgccctggccgaggccaagaagctggccgccatcaccaagctgagagccaagggccaggtgctgaccaagaccaaccccaacagcatcaagaagaagcagaaggacccccaggacatcctggaggtgaaggagagagtggagaagaacaccatgttcagcagccaggccgaggacgagctggagcccgccagaaagaagagaagagagcagctggcctacctggagagcgaggagttccagaagatcctgaaggccaagagcaagcacaccggcatcctgaaggaggccgaggccgagatgcaggagagatacttcgagcccctggtgaagaaggagcagatggaggagaagatgagaaacatcagagaggtgaagtgcagagtggtgacctgcaagacctgcgcctacacccacttcaagctgctggagacctgcgtgagcgagcagcacgagtaccactggcacgacggcgtgaagagattcttcaagtgcccctgcggcaacagaagcatcagcctggacagactgcccaacaagcactgcagcaactgcggcctgtacaagtgggagagagacggcatgctgaaggagaagaccggccccaagatcggcggcgagaccctgctgcccagaggcgaggagcacgccaagttcctgaacagcctgaagtag

SEQ ID NO: 198917 - protein, 906 aa, Artificial Sequence
  derived and/or modified sequence
MDMFPLTWVFLALYFSRHQVRGQPDPPCGGRLNSKDAGYITSPGYPQDYPSHQNCEWIVYAPEPNQKIVLNFNPHFEIEKHDCKYDFIEIRDGDSESADLLGKHCGNIAPPTIISSGSMLYIRFTSDYARQGAGFSLRYEIFKTGSEDCSKNFTSPNGTIESPGFPEKYPHNLDCTFTILAKPKMEIILQFLIFDLEHDPLQVGEGDCKYDWLDIWDGIPHVGPLIGKYCGTKTPSELRSSTGILSLTFHTDMAVAKDGFSARYYLVHQEPLENFQCNVPLGMESGRIANEQISASSTYSDGRWTPQQSRLHGDDNGWTPNLDSNKEYLQVDLRFLTMLTAIATQGAISRETQNGYYVKSYKLEVSTNGEDWMVYRHGKNHKVFQANNDATEVVLNKLHAPLLTRFVRIRPQTWHSGIALRLELFGCRVTDAPCSNMLGMLSGLIADSQISASSTQEYLWSPSAARLVSSRSGWFPRIPQAQPGEEWLQVDLGTPKTVKGVIIQGARGGDSITAVEARAFVRKFKVSYSLNGKDWEYIQDPRTQQPKLFEGNMHYDTPDIRRFDPIPAQYVRVYPERWSPAGIGMRLEVLGCDWTDSKPTVETLGPTVKSEETTTPYPTEEEATECGENCSFEDDKDLQLPSGFNCNFDFLEEPCGWMYDHAKWLRTTWASSSSPNDRTFPDDRNFLRLQSDSQREGQYARLISPPVHLPRSPVCMEFQYQATGGRGVALQVVREASQESKLLWVIREDQGGEWKHGRIILPSYDMEYQIVFEGVIGKGRSGEIAIDDIRISTDVPLENCMEPISAFAGENFKGGTLLPGTEPTVDTVPMQPIPAYWYYVMAAGGAVLVLVSVALALVLHYHRFRYAAKKTDHSITYKTSHYTNGAPLAVEPTLTIKLEQDRGSHC

SEQ ID NO: 198918 - protein, 99 aa, Artificial Sequence
  derived and/or modified sequence
MDMFPLTWVFLALYFSRHQVRGQPDPPCGGRLNSKDAGYITSPGYPQDYPSHQNCEWIVYAPEPNQKIVLNFNPHFEIEKHDCNLLSAWKISLTSRSFA

SEQ ID NO: 198919 - protein, 102 aa, Artificial Sequence
  derived and/or modified sequence
MDMFPLTWVFLALYFSRHQVRGQPDPPCGGRLNSKDAGYITSPGYPQDYPSHQNCEWIVYAPEPNQKIVLNFNPHFEIEKHDCKYDFIEIRDGDSESADLLG

SEQ ID NO: 198920 - DNA, 2721 bp, Artificial Sequence
  derived and/or modified sequence
atggacatgttccccctgacctgggtgttcctggccctgtacttcagcagacaccaggtgagaggccagcccgaccccccctgcggcggcagactgaacagcaaggacgccggctacatcaccagccccggctacccccaggactaccccagccaccagaactgcgagtggatcgtgtacgcccccgagcccaaccagaagatcgtgctgaacttcaacccccacttcgagatcgagaagcacgactgcaagtacgacttcatcgagatcagagacggcgacagcgagagcgccgacctgctgggcaagcactgcggcaacatcgccccccccaccatcatcagcagcggcagcatgctgtacatcagattcaccagcgactacgccagacagggcgccggcttcagcctgagatacgagatcttcaagaccggcagcgaggactgcagcaagaacttcaccagccccaacggcaccatcgagagccccggcttccccgagaagtacccccacaacctggactgcaccttcaccatcctggccaagcccaagatggagatcatcctgcagttcctgatcttcgacctggagcacgaccccctgcaggtgggcgagggcgactgcaagtacgactggctggacatctgggacggcatcccccacgtgggccccctgatcggcaagtactgcggcaccaagacccccagcgagctgagaagcagcaccggcatcctgagcctgaccttccacaccgacatggccgtggccaaggacggcttcagcgccagatactacctggtgcaccaggagcccctggagaacttccagtgcaacgtgcccctgggcatggagagcggcagaatcgccaacgagcagatcagcgccagcagcacctacagcgacggcagatggaccccccagcagagcagactgcacggcgacgacaacggctggacccccaacctggacagcaacaaggagtacctgcaggtggacctgagattcctgaccatgctgaccgccatcgccacccagggcgccatcagcagagagacccagaacggctactacgtgaagagctacaagctggaggtgagcaccaacggcgaggactggatggtgtacagacacggcaagaaccacaaggtgttccaggccaacaacgacgccaccgaggtggtgctgaacaagctgcacgcccccctgctgaccagattcgtgagaatcagaccccagacctggcacagcggcatcgccctgagactggagctgttcggctgcagagtgaccgacgccccctgcagcaacatgctgggcatgctgagcggcctgatcgccgacagccagatcagcgccagcagcacccaggagtacctgtggagccccagcgccgccagactggtgagcagcagaagcggctggttccccagaatcccccaggcccagcccggcgaggagtggctgcaggtggacctgggcacccccaagaccgtgaagggcgtgatcatccagggcgccagaggcggcgacagcatcaccgccgtggaggccagagccttcgtgagaaagttcaaggtgagctacagcctgaacggcaaggactgggagtacatccaggaccccagaacccagcagcccaagctgttcgagggcaacatgcactacgacacccccgacatcagaagattcgaccccatccccgcccagtacgtgagagtgtaccccgagagatggagccccgccggcatcggcatgagactggaggtgctgggctgcgactggaccgacagcaagcccaccgtggagaccctgggccccaccgtgaagagcgaggagaccaccaccccctaccccaccgaggaggaggccaccgagtgcggcgagaactgcagcttcgaggacgacaaggacctgcagctgcccagcggcttcaactgcaacttcgacttcctggaggagccctgcggctggatgtacgaccacgccaagtggctgagaaccacctgggccagcagcagcagccccaacgacagaaccttccccgacgacagaaacttcctgagactgcagagcgacagccagagagagggccagtacgccagactgatcagcccccccgtgcacctgcccagaagccccgtgtgcatggagttccagtaccaggccaccggcggcagaggcgtggccctgcaggtggtgagagaggccagccaggagagcaagctgctgtgggtgatcagagaggaccagggcggcgagtggaagcacggcagaatcatcctgcccagctacgacatggagtaccagatcgtgttcgagggcgtgatcggcaagggcagaagcggcgagatcgccatcgacgacatcagaatcagcaccgacgtgcccctggagaactgcatggagcccatcagcgccttcgccggcgagaacttcaagggcggcaccctgctgcccggcaccgagcccaccgtggacaccgtgcccatgcagcccatccccgcctactggtactacgtgatggccgccggcggcgccgtgctggtgctggtgagcgtggccctggccctggtgctgcactaccacagattcagatacgccgccaagaagaccgaccacagcatcacctacaagaccagccactacaccaacggcgcccccctggccgtggagcccaccctgaccatcaagctggagcaggacagaggcagccactgctag

SEQ ID NO: 198921 - DNA, 2721 bp, Artificial Sequence
  derived and/or modified sequence
atggacatgttccccctgacttgggtgttcctcgccctttacttcagccgtcaccaggttaggggccagccagatccgccctgcggcggtcggctcaatagcaaggatgccggatacatcactagcccggggtatccccaggactaccctagccaccagaattgcgaatggattgtttatgccccagagcctaatcagaaaatcgtattaaattttaaccctcacttcgagattgagaagcacgattgtaaatacgactttattgaaatacgtgacggcgactcggagtccgcggatctgcttggaaagcattgcgggaacatcgcccctcctacaatcatcagttcaggttcgatgctgtacatacgatttacaagcgactacgccagacagggggctgggttctctttacggtacgaaatttttaaaacgggaagtgaagattgttccaaaaacttcaccagccccaatggcacgatagaatctcccggctttcctgaaaaataccctcataatttagattgtacctttacgatcttagccaaaccgaaaatggagattatcctccagttccttatattcgacctggaacatgatcctctgcaagtgggcgaaggtgactgcaagtacgactggctggatatatgggacggaatcccacacgtaggccccctgatcggcaaatattgtggtaccaagacccccagcgaactcagatcatcgacaggtatcctctccttgactttccataccgatatggccgtggctaaggacgggttttctgcccggtactacctggtccatcaagagccactggagaatttccaatgtaacgtacccttaggtatggagagcggtcggattgccaacgagcaaataagtgcaagttcaacctattccgacggaaggtggaccccccagcagagcaggctgcatggggacgacaatgggtggactccaaacttggatagcaacaaggagtatctgcaagtggatcttagatttctgacaatgctgactgccattgccactcagggggcaatctcgagggaaacacagaacggctactatgtgaagagctacaaactggaagtctctactaacggggaggactggatggtatacaggcatggaaagaaccacaaggtgttccaggctaataacgatgccaccgaggtggtactgaacaaactgcacgcccccttactgacccgctttgtgcgtattaggcctcaaacatggcactcgggaattgctctaagacttgagttattcggttgccgcgtgacagatgcgccttgctctaatatgttgggtatgctgtccggtctcatcgccgactctcaaatcagcgcatccagtacacaggaatatctgtggtctccaagcgccgcgagactggtatcaagccgatctggctggtttccccgaataccccaagcccaacccggcgaagagtggcttcaggtggacctggggaccccaaaaaccgtgaaaggcgttatcatccagggagcacgaggcggagattccatcacagcagttgaggcccgcgcttttgtgagaaagttcaaagtcagttatagcctgaatggcaaagactgggaatatattcaagacccccgcactcagcagcccaaattatttgaggggaatatgcattacgacactccagatatcagacggttcgacccgattccggcccagtatgttcgggtgtatccagagcgttggagccccgccggaatcggcatgagactggaagtgctaggctgtgactggaccgacagcaaaccaaccgtggagacactcggcccaacagtcaagtctgaagagaccaccaccccttatcccaccgaagaagaagccactgaatgcggtgagaattgtagctttgaagacgacaaggatctgcagttgcccagtgggtttaactgtaacttcgacttcctcgaggaaccatgtgggtggatgtacgaccacgcaaaatggctgagaacaacctgggcatcctcgtcaagccccaatgaccgtacttttccagatgatcgcaatttcttgaggctccagtctgattcccagcgcgagggtcaatatgcccggctcattagtccaccagtgcacctgccccggtcacctgtctgcatggagttccagtaccaagcgacgggcggccggggcgttgctctccaggtcgttcgagaagccagtcaggagtccaaactcctttgggtaatccgggaagaccagggaggtgagtggaaacacggccggattatcctgccctcctatgacatggaatatcaaatcgtgttcgagggcgtcattggaaagggccgctcaggcgaaattgccattgacgacatcaggatcagcactgacgtgcctctggagaactgtatggagcccataagtgccttcgcaggggaaaacttcaaaggcggaactctgctccctgggactgaacctaccgtggataccgttcctatgcagcctatccctgcatattggtattacgtcatggccgctgggggagcagtcctggttctcgtatctgtagccttagctttggtgttgcactatcaccgtttccgatacgctgctaaaaaaacagaccatagcatcacttacaagacaagtcactacactaatggcgcaccactggctgttgaaccaaccctgaccatcaaactcgagcaagacagaggttctcattgttag

SEQ ID NO: 198922 - DNA, 2721 bp, Artificial Sequence
  derived and/or modified sequence
atggacatgttccccctgacctgggtgttcctggccctgtacttcagccgccaccaggtgcggggccagcctgaccccccctgtggcggccgcctgaacagcaaggatgctggctacatcaccagccctggctacccccaggactaccccagccaccagaactgtgagtggatcgtgtatgcccctgagcccaaccagaagatcgtgctgaacttcaacccccactttgaaattgagaagcatgactgcaagtatgacttcatcgagatcagagatggagacagcgagagcgctgacctgctgggcaagcactgcggcaacatcgccccacccaccatcatcagcagcggctccatgctgtacatccgcttcaccagtgactatgcccggcagggcgccggcttcagcctgcgctatgagatcttcaagacaggcagcgaggactgcagcaagaacttcaccagccccaacggcaccatcgagagccctggcttccctgagaagtacccccacaacctggactgcaccttcaccatcctggccaagcccaagatggagatcatcctgcagttcctgatctttgacctggagcatgaccccctgcaggtgggggagggggactgcaagtatgactggctggacatctgggatggcatcccccacgtgggccccctcatcggcaagtactgcggcaccaagacccccagcgagctgcggagcagcacaggcatcctgagcctgaccttccacacagacatggctgtggccaaggatggcttcagcgcccgctactacctggtgcaccaggagcccctggagaacttccagtgcaatgtgcccctgggcatggagagcggccgcatcgccaatgagcagatcagcgccagcagcacctacagtgatggccgctggaccccccagcagagccggctgcatggagatgacaatggctggacccccaacctggacagcaacaaggagtacctgcaggtggacctgcgcttcctgaccatgctgacagccatcgccacccagggcgccatcagccgggagacccagaatggctactacgtgaagagctacaagctggaggtgtccaccaacggggaggactggatggtgtacagacatggcaagaaccacaaggtgttccaggccaacaatgatgccacagaggtggtgctgaacaagctgcacgcccccctgctgaccaggtttgtgcgcatccggccccagacctggcacagcggcatcgccctgcggctggagctgtttggctgccgggtgacagatgccccctgcagcaacatgctgggcatgctgagcggcctgattgctgacagccagatcagcgccagcagcacccaggagtacctgtggagccccagcgctgcccggctggtgagcagccgcagcggctggttcccccgcatcccccaggcccagcctggagaggagtggctgcaggtggacctgggcacccccaagacagtgaagggcgtcatcatccagggcgcccggggcggggacagcatcacagctgtggaggcccgggcctttgtgaggaagttcaaggtgtcctacagcctgaatggcaaggactgggagtacatccaggaccccaggacccagcagcccaagctgtttgagggcaacatgcactatgacaccccagacatcagaagatttgaccccatcccagcccagtatgtgcgggtgtacccagagcgctggagccctgctggcatcggcatgaggctggaggtgctgggctgtgactggacagacagcaagcccaccgtggagaccctgggccccaccgtgaagtctgaggagaccaccaccccctaccccacagaggaggaggccacagaatgtggggagaactgcagctttgaagatgacaaggacctgcagctgcccagcggcttcaactgcaactttgacttcctggaggagccctgtggctggatgtatgaccacgccaagtggctgcggaccacctgggccagcagcagcagccccaatgacaggaccttcccagatgacaggaacttcctgcggctgcagagcgacagccagcgggagggccagtatgcccggctcatcagcccccctgtgcacctgcccaggagccctgtgtgcatggagttccagtaccaggccactggaggccggggcgtggccctgcaggtggtgcgggaggccagccaggagagcaagctgctgtgggtgatccgggaggaccagggcggggagtggaagcacggccgcatcatcctgcccagctatgacatggagtaccagatcgtgtttgagggcgtcatcggcaagggccgctctggagagatcgccattgatgacatccgcatcagcacagatgtgcccctggagaactgcatggagcccatcagcgcctttgctggggagaacttcaagggcggcaccctgctgcctggaacagagcccaccgtggacacagtgcccatgcagcccatcccagcctactggtactacgtgatggctgctggaggagctgtgctggtgctggtgtctgtggccctggccctggtgctgcactaccaccgcttccgctatgctgccaagaagacagaccacagcatcacctacaagaccagccactacaccaacggggcccccctggccgtggagcccaccctgaccatcaagctggagcaggaccggggcagccactgctag

SEQ ID NO: 198923 - DNA, 2721 bp, Artificial Sequence
  derived and/or modified sequence
atggacatgttccccctgacctgggtgttcctggccctgtacttctcccggcatcaggtgagaggacagcctgatcccccctgcggcggccgcctcaattccaaggacgccggctatattacatcaccaggctaccctcaggactacccttctcaccagaactgtgagtggatcgtctacgcgccagagcccaatcagaagattgtgttaaatttcaacccccattttgagatcgagaaacacgattgtaaatacgatttcatcgagatcagagatggcgatagcgagtctgccgacttacttggtaagcactgcggaaacatcgccccgccaaccattatcagctcgggctcaatgctctacattaggtttacaagcgattatgcgaggcagggtgctggctttagtttgcgctacgagatcttcaagaccggctccgaggattgtagtaagaactttacttctccaaacgggacaatcgaaagtccaggcttccccgagaaatacccccataatttagactgcacgttcacaattctggctaagccaaaaatggaaataatattacaatttctgatctttgacctagagcacgacccccttcaggtaggcgaaggtgattgtaagtacgattggctcgacatctgggatggtatcccccatgtgggcccactgatcgggaagtattgcggtacgaaaactcccagtgaactgagatccagcactggaatcctgtcgctaacctttcatacagatatggcagtggccaaagacggattttctgccagatactacctagttcaccaagagccgctcgaaaatttccagtgcaacgttccgctgggcatggagagtggccggattgcaaatgagcagatctcggcgagttcaacatactccgatgggaggtggacacctcagcagagcagactgcacggcgacgacaatggttggaccccgaacctcgacagtaacaaagagtatctgcaggtggatttgagatttctgacaatgctcacagcaatcgccactcagggcgctatctcgagggagacgcagaacggatattatgtaaagtcatataagttagaggtgagtactaacggcgaagattggatggtgtatcgccacggtaagaatcacaaagtctttcaggcaaataatgacgcaacggaagtggtgttgaataagttgcatgcccccttactaacaaggtttgtgcgcattcgacctcagacttggcactctgggatagcgctgcggctcgaactcttcgggtgtagagttactgacgcaccatgttccaatatgcttggcatgctgagcgggttgatagccgactcccagatctctgcatcttccactcaggagtacctgtggagtccctccgcggcccggctggttagctcccgcagcgggtggttcccccggatcccacaagcccagcctggcgaggaatggttacaggttgatctcggcacaccaaagaccgttaagggcgtaattattcagggagcacggggcggagacagcatcacagccgtagaggcgcgagccttcgtgcgcaaattcaaggttagttatagcttaaatggaaaggactgggagtacattcaggatcccaggacacagcagccaaagctattcgagggtaacatgcattacgacactcctgacattcgaaggtttgacccaatcccagcccagtatgtgcgggtctaccctgaaaggtggagccccgcaggaataggtatgaggctcgaggtcctgggatgcgactggaccgactcaaagcccacagtggaaacactcggccccaccgttaagtccgaagaaactactactccctatcccacagaagaagaagccaccgagtgcggcgagaactgttccttcgaggatgataaggacctgcagcttcctagcggcttcaactgtaacttcgatttcctggaggagccttgtggatggatgtatgaccacgcaaaatggctgcgaactacgtgggcaagtagctccagcccgaatgataggacttttcctgatgatagaaactttttaagactgcagtctgacagtcaaagggagggccagtacgcccgactcatatccccgcccgtgcacttaccccgatcaccagtttgcatggagtttcagtaccaggccactgggggtaggggcgttgcactgcaggtggtgagggaggcttcccaggagtctaaactgctttgggtgattagggaggatcagggaggagagtggaagcacggacgcattatcctgcccagctatgacatggaataccaaatcgtttttgagggggtgatcgggaagggaaggtccggggaaatagccattgatgacattagaattagcactgacgttccactcgagaattgtatggaaccaatttcagctttcgccggcgaaaacttcaaagggggtacgctgcttcctgggacagaaccaaccgtagatacggtgcctatgcagcccataccagcctattggtattatgtcatggcggccggtggtgccgtgctcgtcctagtatcggtggcactggcactggtgttacactaccaccgcttccggtatgcagccaaaaagaccgatcattcaattacctacaagacaagccactatactaacggcgcacccctcgcagttgaacccactttaacaattaagctggagcaggaccgtggctcccattgttag

SEQ ID NO: 198924 - DNA, 3351 bp, Artificial Sequence
  derived and/or modified sequence
atggatatgtttcctctcacctgggttttcttagccctctacttttcaagacaccaagtgagaggccaaccagacccaccgtgcggaggtcgtttgaattccaaagatgctggctatatcacctctcccggttacccccaggactacccctcccaccagaactgcgagtggattgtttacgcccccgaacccaaccagaagattgtcctcaacttcaaccctcactttgaaatcgagaagcacgactgcaagtatgactttatcgagattcgggatggggacagtgaatccgcagacctcctgggcaaacactgtgggaacatcgccccgcccaccatcatctcctcgggctccatgctctacatcaggttcacctccgactacgcccggcagggggcaggcttctctctgcgctacgagatcttcaagacaggctctgaagattgctcaaaaaacttcacaagccccaacgggaccatcgaatctcctgggtttcctgagaagtatccacacaacttggactgcacctttaccatcctggccaaacccaagatggagatcatcctgcagttcctgatctttgacctggagcatgaccctttgcaggtgggagagggggactgcaagtacgattggctggacatctgggatggcattccacatgttggccccctgattggcaagtactgtgggaccaaaacaccctctgaacttcgttcatcgacggggatcctctccctgacctttcacacggacatggcggtggccaaggatggcttctctgcgcgttactacctggtccaccaagagccactagagaactttcagtgcaatgttcctctgggcatggagtctggccggattgctaatgaacagatcagtgcctcatctacctactctgatgggaggtggacccctcaacaaagccggctccatggtgatgacaatggctggacccccaacttggattccaacaaggagtatctccaggtggacctgcgctttttaaccatgctcacggccatcgcaacacagggagcgatttccagggaaacacagaatggctactatgtcaaatcctacaagctggaagtcagcactaatggagaggactggatggtgtaccggcatggcaaaaaccacaaggtatttcaagccaacaacgatgcaactgaggtggttctgaacaagctccacgctccactgctgacaaggtttgttagaatccgccctcagacctggcactcaggtatcgccctccggctggagctcttcggctgccgggtcacagatgctccctgctccaacatgctggggatgctctcaggcctcattgcagactcccagatctccgcctcttccacccaggaatacctctggagccccagtgcagcccgcctggttagcagccgctcgggctggttccctcgaatccctcaggcccagcccggtgaggagtggcttcaggtagatctgggaacacccaagacagtgaaaggtgtcatcatccagggagcccgcggaggagacagtatcactgctgtggaagccagagcatttgtgcgcaagttcaaagtctcctacagcctaaacggcaaggactgggaatacattcaggaccccaggacccagcagccaaagctgttcgaagggaacatgcactatgacacccctgacatccgaaggtttgaccccattccggcacagtatgtgcgggtatacccggagaggtggtcgccggcggggattgggatgcggctggaggtgctgggctgtgactggacagactccaagcccacggtagagacgctgggacccactgtgaagagcgaagagacaaccaccccctaccccaccgaagaggaggccacagagtgtggggagaactgcagctttgaggatgacaaagatttgcagctcccttcgggattcaattgcaacttcgatttcctcgaggagccctgtggttggatgtatgaccatgccaagtggctccggaccacctgggccagcagctccagcccaaacgaccggacgtttccagatgacaggaatttcttgcggctgcagagtgacagccagagagagggccagtatgcccggctcatcagcccccctgtccacctgccccgaagcccggtgtgcatggagttccagtaccaggccacgggcggccgcggggtggcgctgcaggtggtgcgggaagccagccaggagagcaagttgctgtgggtcatccgtgaggaccagggcggcgagtggaagcacgggcggatcatcctgcccagctacgacatggagtaccagattgtgttcgagggagtgatagggaaaggacgttccggagagattgccattgatgacattcggataagcactgatgtcccactggagaactgcatggaacccatctcggcttttgcaggtgagaattttaaagggggcaccctcctgccagggaccgagcccacagtggacacggtgcccatgcagcccatcccagcctactggtattacgtaatggccgccgggggcgccgtgctggtgctggtctccgtcgcgctggccctggtgctccactaccaccggttccgctatgcggccaagaagaccgatcactccatcacctacaaaacctcccactacaccaacggggcccctctggcggtggagcccaccctaaccattaagctagagcaagaccgtggctcgcactgctgagggccgaagcaagaacagcacccaaaacaaacgagaaagactgcaaacatgttgcctcgattttgcacttttttctcctcgcctagtttctgtgtgaactctcagacatctctttcccggatccccaaccctgagcactcttatcaatcccaaccatcctccttgggttcattttggtttctggtttttctttttcctttttgttgattccaaaccaacaaacccaactctaatgctgcatcttggactatccgaagagatccacccccaagcactccacaactcaaggctcagctggttttgttccagagactggttcgcttgttttttccccttgccttatcccatacctcctctcagtgggcagtctgccaggagacgtgaggggaagcctggatctgtgtgtatgtacatagtagacatgtgtgtgtgtgaatagctctctgtgtgtgggtgtgtgagagagcggctggttcattgtgtgtgtgtttgggcgaggggtgagtgttcagagagggcccctttaactcttatgttacttctcctggggtacattttacaagaaaataatatactgtacaagttttgtttacttggagaagagattgaagctttttgttgccttatcta

SEQ ID NO: 198925 - DNA, 2721 bp, Artificial Sequence
  derived and/or modified sequence
atggatatgttccctctcacttgggtattcttggcgctatacttctcccggcaccaggttaggggacagcctgaccctccttgcgggggacgtctgaactccaaagacgcgggatatataacatcgccaggctatccccaagactatccatcgcaccagaattgtgaatggattgtatacgcacctgaaccaaatcaaaaaatcgtgttgaatttcaatccccattttgagatcgaaaagcatgactgcaagtacgattttatcgagatccgggacggtgattctgaaagcgctgatctgctgggcaagcactgtggaaatattgctcctcccaccatcatctcttccgggtctatgctgtacatacggtttacctctgactacgctagacagggcgctgggttctctctgcgctacgagatctttaagaccggctctgaggattgcagcaagaattttacctctcccaacggcacaattgagtcgccaggctttcctgaaaaatatcctcataatctcgattgtacatttacaattctcgctaagcccaaaatggaaattatcctacagtttctcatcttcgatctggagcatgatcctttgcaagtgggcgagggcgactgtaagtatgactggctcgacatctgggacggtattccccacgttggaccactcatcggcaagtactgcggcacgaagaccccatccgaactgaggagcagtacaggcatcctctcactgactttccatacggatatggctgtggctaaagacggtttcagcgcccgttactacttggtccaccaggagccccttgagaattttcagtgcaatgtgccccttgggatggaatctggacgcatcgccaatgagcaaatttccgcaagttctacatattccgacgggaggtggactccccagcagtcaaggttacacggagatgacaatggctggaccccgaatctggatagcaataaggagtacctgcaggtggatctgaggttcttgacaatgttgactgcaattgcaacccagggcgctatcagccgtgagacccagaatgggtattacgtgaagtcatacaagcttgaagtctccacaaacggtgaggactggatggtgtacagacatgggaaaaaccacaaggtcttccaggcaaacaacgacgctactgaagtcgtcttaaataagctgcacgcccctctacttacccgattcgtgaggattagacctcaaacgtggcacagcgggatagcgttgcggctggagcttttcggatgtcgcgtgaccgatgccccatgtagtaatatgcttggcatgctgtccggactcatagccgattcccagattagcgcgagctctactcaagagtatctgtggtcccctagtgctgcccgactggtgagctcccggtccggctggttcccccgaattccccaagcccagccaggtgaagagtggctccaggtcgacctcggaacacccaagacagtcaaaggcgtgattatccagggcgcacggggaggggatagcatcacagctgtggaggccagggcattcgtccggaaattcaaggtctcttatagcctgaacggcaaagactgggagtatattcaggaccctagaacgcagcagccgaagctgtttgaggggaatatgcattacgacacacccgacatcagacgatttgaccctatacctgcgcaatacgttcgagtgtaccccgagagatggagtccagctggcatagggatgcggctggaagtgctggggtgcgattggaccgactccaaacccacagtagagacacttggccctacagtaaagtcagaagaaacaacgacaccataccccaccgaggaggaagccactgagtgcggagaaaactgttcttttgaggacgacaaagacttgcagctgccatctggatttaactgcaacttcgactttttggaggaaccatgcggttggatgtacgaccatgccaaatggttgcggaccacatgggctagttcttcatcacctaatgaccggacatttccggatgatcgcaattttctccgccttcagagcgattcgcaaagggaaggccagtacgccagattgatttctcctccagtacatttgcccagatctcccgtatgcatggagttccagtaccaggctaccggaggtcgtggcgtcgcactgcaggtggtaagagaagccagccaagagtctaagctgctctgggttattagagaagaccagggtggcgaatggaagcacgggcgtattattttgccgagctatgacatggagtaccagatcgtgtttgagggcgtgatcggaaaggggcgttccggagaaattgctatagacgacatccggatttcaacagatgtgcctttggagaattgtatggagcccatctccgcattcgccggtgaaaactttaagggtggtacgctgctgccgggtactgagccgacagttgacactgtaccaatgcagcccatacctgcttactggtactatgtgatggctgctggaggtgctgtcctggtgttagtgagtgtggcactggctctcgtactgcactaccataggtttaggtatgccgcaaagaagactgatcattccataacttacaagaccagtcattacacaaacggcgctccactggctgtcgagcctacactcaccatcaagctcgaacaagatagaggctcacattgctag

SEQ ID NO: 198926 - protein, 463 aa, Artificial Sequence
  derived and/or modified sequence
MAQGLVTFADVAIDFSQEEWACLNSAQRDLYWDVMLENYSNLVSLDLESAYENKSLPTEKNIHEIRASKRNSDRRSKSLGRNWICEGTLERPQRSRGRYVNQMIINYVKRPATREGTPPRTHQRHHKENSFECKDCGKAFSRGYQLSQHQKIHTGEKPYECKECKKAFRWGNQLTQHQKIHTGEKPYECKDCGKAFRWGSSLVIHKRIHTGEKPYECKDCGKAFRRGDELTQHQRFHTGEKDYECKDCGKTFSRVYKLIQHKRIHSGEKPYECKDCGKAFICGSSLIQHKRIHTGEKPYECQECGKAFTRVNYLTQHQKIHTGEKPHECKECGKAFRWGSSLVKHERIHTGEKPYKCTECGKAFNCGYHLTQHERIHTGETPYKCKECGKAFIYGSSLVKHERIHTGVKPYGCTECGKSFSHGHQLTQHQKTHSGAKSYECKECGKACNHLNHLREHQRIHNS

SEQ ID NO: 198927 - protein, 63 aa, Artificial Sequence
  derived and/or modified sequence
MAQGLVTFADVAIDFSQEEWACLNSAQRDLYWDVMLENYSNLVSLDLESAYENKSLPTEKNIH

SEQ ID NO: 198928 - protein, 85 aa, Artificial Sequence
  derived and/or modified sequence
MAQGLVTFADVAIDFSQEEWACLNSAQRDLYWDVMLENYSNLVSLDLESAYENKSLPTEKNIHEIRASKRNSDRRSKSLGRNWIC

SEQ ID NO: 198929 - protein, 66 aa, Artificial Sequence
  derived and/or modified sequence
MAQGLVTFADVAIDFSQEEWACLNSAQRDLYWDVMLENYSNLVSLDLESAYENKSLPTEKNIHEIR

SEQ ID NO: 198930 - protein, 64 aa, Artificial Sequence
  derived and/or modified sequence
MAQGLVTFADVAIDFSQEEWACLNSAQRDLYWDVMLENYSNLVSLDLESAYENKSLPTEKNIHE

SEQ ID NO: 198931 - protein, 177 aa, Artificial Sequence
  derived and/or modified sequence
MAQGLVTFADVAIDFSQEEWACLNSAQRDLYWDVMLENYSNLVSLDLESAYENKSLPTEKNIHEIRASKRNSDRRSKSLGRNWICEGTLERPQRSRGRYVNQMIINYVKRPATREGTPPRTHQRHHKENSFECKDCGKAFSRGYQLSQHQKIHTGEKPYECKECKKAFRWGNQLTQH

SEQ ID NO: 198932 - protein, 87 aa, Artificial Sequence
  derived and/or modified sequence
MAQGLVTFADVAIDFSQEEWACLNSAQRDLYWDVMLENYSNLVSLDLESAYENKSLPTEKNIHEIRASKRNSDRRSKSLGRNWICEG

SEQ ID NO: 198933 - protein, 47 aa, Artificial Sequence
  derived and/or modified sequence
MAQGLVTFADVAIDFSQEEWACLNSAQRDLYWDVMLENYSNLVSLDL

SEQ ID NO: 198934 - protein, 105 aa, Artificial Sequence
  derived and/or modified sequence
MAQGLVTFADVAIDFSQEEWACLNSAQRDLYWDVMLENYSNLVSLDLESAYENKSLPTEKNIHEIRASKRNSDRRSKSLGRNWICEGTLERPQRSRGRYVNQMII

SEQ ID NO: 198935 - protein, 98 aa, Artificial Sequence
  derived and/or modified sequence
MAQGLVTFADVAIDFSQEEWACLNSAQRDLYWDVMLENYSNLVSLDLESAYENKSLPTEKNIHEIRASKRNSDRRSKSLGRNWICEGTLERPQRSRGR

SEQ ID NO: 198936 - protein, 167 aa, Artificial Sequence
  derived and/or modified sequence
MAQGLVTFADVAIDFSQEEWACLNSAQRDLYWDVMLENYSNLVSLDLESAYENKSLPTEKNIHEIRASKRNSDRRSKSLGRNWICEGTLERPQRSRGRYVNQMIINYVKRPATREGTPPRTHQRHHKENSFECKDCGKAFSRGYQLSQHQKIHTGEKPYECKECKKA

SEQ ID NO: 198937 - protein, 100 aa, Artificial Sequence
  derived and/or modified sequence
MAQGLVTFADVAIDFSQEEWACLNSAQRDLYWDVMLENYSNLVSLDLESAYENKSLPTEKNIHEIRASKRNSDRRSKSLGRNWICEGTLERPQRSRGRYV

SEQ ID NO: 198938 - DNA, 5163 bp, Artificial Sequence
  derived and/or modified sequence
atttgcgccgtgtagagttgcatgctgggaaacactgacgggcgcccttccagctgcgtcgaagcttctctggtttcgcattacatttcccagagggccttggggcacagtccaatgaggagcgagccgggtggccggctgaggggcgtgcttcatgctcgcgggatttttaaaaatggtttctcctggatcttatcccaactgcgcctgagaccttgtttcacctcctgatgtgctgggtgtggttaggcctcgagccgggagctatttgcctcccaggaggaagccagggcagggttccgcggggaatggcggtgagggagccactcgggacgcggaggccctaaaatgaagaagcttcggcctgaggcttcgggagcggcgagcagggaagtgggagtgtgtgtgagtgtgtgtgtgtgtgtgtgtgtgtgtgtgtgaataagccagaggctgcctggtggggccccgccgtggcccagtgactgagataattgtcttcgtctgtggggtaatgcgaacaagccccgttcccctaagccgtgatgcatgcggggttgacgcggccgggctctgtccccataaactgtgacacaggtgtgtgtagacgtctatgagggccatagcgccgggctgtaagggcatctgtaggggtgacgcagccgggctgtgtctctgcacctccgttctgtgcgaggtcaatgctggtggggtctgcagaggtggcacggccaggacgggtctccgtgtctctgaaatgtgcctttgcacttctgtcaggttgacagggacaggcagtgtccctctggtgtgagcgtctgtgggtgtgaaagggccagcgagtgtgcggctgtgactggtcgggatcgggcctgggtgcatggccttttgagtgagcacaggtgtgtgcgaccatgtcacctgtctttctagtgtctccgttgcttcctgtgccttggccttccagccatgtggtacctgctagggagcagtggtcccaaagtgacgtgagaggctctacgctattgtgaaaatgaccaagaagaaggcttcacaagtcacgagatggcagttttggagccagaagtgctctccgtgcacactacctggacgacaagaggaagtaacctcaagaatagaattccttttggggaagaaagagctggccttcaggaaaagcatcccggaggaggaagaagaagtgttatatgtcctaaagtaaggtttcaggccagcatccttcagaaaaagcatccccgaggaggaagacgaatcgttaaacatctgaaagggtcaggccagcatccttcagaaaaagcatccccgaggaggaagacgaatcgttaaacatcttaggtcagctctagcctctcggaatttgtcttcttcagtggaaaccccgagaagactgatcagttcttcagttctaaaacaatggcccagggtttggtgacgttcgccgacgtagccatagacttttctcaggaggagtgggcctgtctgaactctgctcagagggacctgtactgggacgtgatgctggagaactacagtaacttggtctcactggatttggagtcagcatatgaaaataagagtttacctacagaaaaaaacattcatgaaataagggcttccaaaaggaattcagatagaagaagtaaatcccttggccgtaactggatatgtgaaggtacgcttgaaagaccacagcgctccagagggaggtatgtcaatcagatgatcatcaattatgtcaaaagacctgctactagagaaggcacccctcctagaacacatcagagacatcataaggagaattcctttgaatgtaaggactgtgggaaggcctttagtcgtggctatcaacttagtcaacatcagaaaatccatactggtgagaaaccttatgaatgtaaagaatgtaagaaggccttccgttggggcaatcagcttactcaacatcaaaaaattcatactggggagaagccctacgaatgtaaagactgtgggaaggcttttcgatggggctcaagcctcgttattcataagaggattcatactggtgaaaaaccctatgaatgtaaagactgtggaaaggcctttcggcgtggtgatgagctcactcagcaccagagattccacactggggagaaagactacgaatgcaaagactgtgggaagacctttagccgtgtgtataaacttattcagcacaagagaattcatagtggggagaagccttacgagtgtaaagactgtgggaaggcttttatttgtggttcaagcctcattcagcataaaagaattcacacaggtgagaaaccctatgaatgtcaagaatgtgggaaggcctttactcgagtcaattaccttactcagcatcagaagatccacaccggtgagaagcctcacgaatgtaaggagtgtgggaaggcctttcgctggggttcgagcctcgttaagcacgagaggatacatacgggcgagaagccgtacaagtgcacagaatgtgggaaggccttcaattgtggctatcacctcactcagcacgagagaatccacacaggcgaaaccccgtataaatgtaaggagtgtgggaaggctttcatttatggatcgagcctcgtgaaacatgagagaattcataccggggtgaaaccctatgggtgtacagaatgtgggaagagctttagtcacggccatcagcttacacaacatcagaaaacgcacagtggggcgaaatcctacgaatgtaaggagtgcgggaaggcatgtaaccacctaaaccatctccgagaacatcagaggatccacaacagttgaagagccttttgaacgcagtagcccgctcgtatctatggtttcgctttccacagtttgttacctgcagtcaactgcagttcaaaaatattaaatggaaaattccagaaataaagaattttaagtctcaaatggtgtgcccttctgagtagcgtgatgaaatctctcgctgtccggctccagccggccggggatgtgagtcatcccttggtccagcacatccacgctgtatacgccacccaccctgctagtgacttagtagccgtcttggtgatcagatcaactatcccagcatcacagtgcctgtgcccaagcagtcctcactttgcttaacagtggccccagagagcaggagtagtgatgctggtgattcggatatgccaaagagaagccacaaagtgcttccttttaaatgaaaaggtgaaagttctcaacttaaaaaagaaaagaaaaaaatcatatactgaggttgctaagatctacatgacaataagatattttgggagagagatacgttcacataattttattacatatattgttacaattgttctattttgttagttactgttggtaatctcttactgtgcctaatttataaattaaactttagatatgtatgtacaggaaaaaatgtagtatatagtatcgtatatatgtacaggaaaaaaacgtactatctgtggtttcaggtgtccactgcgggtcttcaaacgtacccccctcaggtgagaggggactgctgtacaaagaatataggaaggcctctagactacatccattccttcctcaacaggaggaaaattcctggtacagtttaacgtaaggcttcactgatcactgttgtttttgtttttgtttttgtttttttgagacagagtctcactcttgcccaggctggagtgcagtggcacggtcttggctcactgcaacctccacctcccaggttccagcaattctcctgcctcagcctccccagtagctgggattacagacatgcaccaccacacctggctaatttttgtatttttagtagagacagttttcaccatgttgtccaggctggtctcaactcctgacctcaggtgatccacccaccttgccctcccaaagtgctaggattacaggcgtgagccactgcacctagcccactgatcactcttctgcttacagaatatcagaagtcattctagaggcaaatttgaagagtggaaaaatcactttttctgaatgatcttgtttttggtgtagatgtttttattgtgtgggttagtttaatgaatacataaagactaccagtaccattctgtctttactccgtggcatctgtggaataaccctgctaatgtaacacgtgagaaagcctttggtcatgccacccactctaccagttgtccccaccatcccccgccctcctccctgtgagacactgggccaaaggctcactacccctgtgcgttgtccagcacacagacactatgtgcattatttgtacataaggataatcacatctacctgagactgctatcatggaaattaaatgtttggtacatgtaaagtctttgaaagtgtaactggaatattgtgtaattttaataaataataactattgttgtttttatgatcattactaccatttgtgttgccattagtgaatttttacaagaaaactccctgtgggtgcaatgagtctggaaaagaccattgagtcttctagaagaaaacattaagagattattggcacagccgtgggttacgcaatgatttcttagtacacaaaacacagcaaacataaaaagttgttacacttcatcaaaagtacaaagttctgttcatcaaatgatgctgttaagatagggaaaagacaagaaacaggactggaagaagatgtttgctctaaggtacacctgacaaaggaactctcatagaaaatataaagaatccctcaagttgaaaaaaaaatcaatttaaaggggagaaaacttcagcacgtctcaacagaagaccaccaaatggccaataagtaagtgaaaatgtattcaatgtcattgctcctcaaggaactgtagagtaaaaccacaatgtgctgtcactctagacagtcaccaggatgattaaatttaaatcacaataacaaggctgatttcagatgtctcaccacaaagaaggaggataagggagcgaggtgatggatatgttaattagcttgatttaatccttccacattgtatacatgtatcagaacatcacattgtactccatcaatataatacaattattatttgtcaatcaaatattaataaaatcaaagatgagcaggaaaaaaaaaaaaaaaaaaaa

SEQ ID NO: 198939 - DNA, 1392 bp, Artificial Sequence
  derived and/or modified sequence
atggcccagggcctggtgaccttcgccgacgtggccatcgacttcagccaggaggagtgggcctgcctgaacagcgcccagagagacctgtactgggacgtgatgctggagaactacagcaacctggtgagcctggacctggagagcgcctacgagaacaagagcctgcccaccgagaagaacatccacgagatcagagccagcaagagaaacagcgacagaagaagcaagagcctgggcagaaactggatctgcgagggcaccctggagagaccccagagaagcagaggcagatacgtgaaccagatgatcatcaactacgtgaagagacccgccaccagagagggcaccccccccagaacccaccagagacaccacaaggagaacagcttcgagtgcaaggactgcggcaaggccttcagcagaggctaccagctgagccagcaccagaagatccacaccggcgagaagccctacgagtgcaaggagtgcaagaaggccttcagatggggcaaccagctgacccagcaccagaagatccacaccggcgagaagccctacgagtgcaaggactgcggcaaggccttcagatggggcagcagcctggtgatccacaagagaatccacaccggcgagaagccctacgagtgcaaggactgcggcaaggccttcagaagaggcgacgagctgacccagcaccagagattccacaccggcgagaaggactacgagtgcaaggactgcggcaagaccttcagcagagtgtacaagctgatccagcacaagagaatccacagcggcgagaagccctacgagtgcaaggactgcggcaaggccttcatctgcggcagcagcctgatccagcacaagagaatccacaccggcgagaagccctacgagtgccaggagtgcggcaaggccttcaccagagtgaactacctgacccagcaccagaagatccacaccggcgagaagccccacgagtgcaaggagtgcggcaaggccttcagatggggcagcagcctggtgaagcacgagagaatccacaccggcgagaagccctacaagtgcaccgagtgcggcaaggccttcaactgcggctaccacctgacccagcacgagagaatccacaccggcgagaccccctacaagtgcaaggagtgcggcaaggccttcatctacggcagcagcctggtgaagcacgagagaatccacaccggcgtgaagccctacggctgcaccgagtgcggcaagagcttcagccacggccaccagctgacccagcaccagaagacccacagcggcgccaagagctacgagtgcaaggagtgcggcaaggcctgcaaccacctgaaccacctgagagagcaccagagaatccacaacagctag

SEQ ID NO: 198940 - DNA, 192 bp, Artificial Sequence
  derived and/or modified sequence
atggcccagggcctggtgaccttcgccgacgtggccatcgacttcagccaggaggagtgggcctgcctgaacagcgcccagagagacctgtactgggacgtgatgctggagaactacagcaacctggtgagcctggacctggagagcgcctacgagaacaagagcctgcccaccgagaagaacatccactag

SEQ ID NO: 198941 - DNA, 258 bp, Artificial Sequence
  derived and/or modified sequence
atggcccagggcctggtgaccttcgccgacgtggccatcgacttcagccaggaggagtgggcctgcctgaacagcgcccagagagacctgtactgggacgtgatgctggagaactacagcaacctggtgagcctggacctggagagcgcctacgagaacaagagcctgcccaccgagaagaacatccacgagatcagagccagcaagagaaacagcgacagaagaagcaagagcctgggcagaaactggatctgctag

SEQ ID NO: 198942 - DNA, 201 bp, Artificial Sequence
  derived and/or modified sequence
atggcccagggcctggtgaccttcgccgacgtggccatcgacttcagccaggaggagtgggcctgcctgaacagcgcccagagagacctgtactgggacgtgatgctggagaactacagcaacctggtgagcctggacctggagagcgcctacgagaacaagagcctgcccaccgagaagaacatccacgagatcagatag

SEQ ID NO: 198943 - DNA, 195 bp, Artificial Sequence
  derived and/or modified sequence
atggcccagggcctggtgaccttcgccgacgtggccatcgacttcagccaggaggagtgggcctgcctgaacagcgcccagagagacctgtactgggacgtgatgctggagaactacagcaacctggtgagcctggacctggagagcgcctacgagaacaagagcctgcccaccgagaagaacatccacgagtag

SEQ ID NO: 198944 - DNA, 534 bp, Artificial Sequence
  derived and/or modified sequence
atggcccagggcctggtgaccttcgccgacgtggccatcgacttcagccaggaggagtgggcctgcctgaacagcgcccagagagacctgtactgggacgtgatgctggagaactacagcaacctggtgagcctggacctggagagcgcctacgagaacaagagcctgcccaccgagaagaacatccacgagatcagagccagcaagagaaacagcgacagaagaagcaagagcctgggcagaaactggatctgcgagggcaccctggagagaccccagagaagcagaggcagatacgtgaaccagatgatcatcaactacgtgaagagacccgccaccagagagggcaccccccccagaacccaccagagacaccacaaggagaacagcttcgagtgcaaggactgcggcaaggccttcagcagaggctaccagctgagccagcaccagaagatccacaccggcgagaagccctacgagtgcaaggagtgcaagaaggccttcagatggggcaaccagctgacccagcactag

SEQ ID NO: 198945 - DNA, 264 bp, Artificial Sequence
  derived and/or modified sequence
atggcccagggcctggtgaccttcgccgacgtggccatcgacttcagccaggaggagtgggcctgcctgaacagcgcccagagagacctgtactgggacgtgatgctggagaactacagcaacctggtgagcctggacctggagagcgcctacgagaacaagagcctgcccaccgagaagaacatccacgagatcagagccagcaagagaaacagcgacagaagaagcaagagcctgggcagaaactggatctgcgagggctag

SEQ ID NO: 198946 - DNA, 144 bp, Artificial Sequence
  derived and/or modified sequence
atggcccagggcctggtgaccttcgccgacgtggccatcgacttcagccaggaggagtgggcctgcctgaacagcgcccagagagacctgtactgggacgtgatgctggagaactacagcaacctggtgagcctggacctgtag

SEQ ID NO: 198947 - DNA, 318 bp, Artificial Sequence
  derived and/or modified sequence
atggcccagggcctggtgaccttcgccgacgtggccatcgacttcagccaggaggagtgggcctgcctgaacagcgcccagagagacctgtactgggacgtgatgctggagaactacagcaacctggtgagcctggacctggagagcgcctacgagaacaagagcctgcccaccgagaagaacatccacgagatcagagccagcaagagaaacagcgacagaagaagcaagagcctgggcagaaactggatctgcgagggcaccctggagagaccccagagaagcagaggcagatacgtgaaccagatgatcatctag

SEQ ID NO: 198948 - DNA, 297 bp, Artificial Sequence
  derived and/or modified sequence
atggcccagggcctggtgaccttcgccgacgtggccatcgacttcagccaggaggagtgggcctgcctgaacagcgcccagagagacctgtactgggacgtgatgctggagaactacagcaacctggtgagcctggacctggagagcgcctacgagaacaagagcctgcccaccgagaagaacatccacgagatcagagccagcaagagaaacagcgacagaagaagcaagagcctgggcagaaactggatctgcgagggcaccctggagagaccccagagaagcagaggcagatag

SEQ ID NO: 198949 - DNA, 504 bp, Artificial Sequence
  derived and/or modified sequence
atggcccagggcctggtgaccttcgccgacgtggccatcgacttcagccaggaggagtgggcctgcctgaacagcgcccagagagacctgtactgggacgtgatgctggagaactacagcaacctggtgagcctggacctggagagcgcctacgagaacaagagcctgcccaccgagaagaacatccacgagatcagagccagcaagagaaacagcgacagaagaagcaagagcctgggcagaaactggatctgcgagggcaccctggagagaccccagagaagcagaggcagatacgtgaaccagatgatcatcaactacgtgaagagacccgccaccagagagggcaccccccccagaacccaccagagacaccacaaggagaacagcttcgagtgcaaggactgcggcaaggccttcagcagaggctaccagctgagccagcaccagaagatccacaccggcgagaagccctacgagtgcaaggagtgcaagaaggcctag

SEQ ID NO: 198950 - DNA, 303 bp, Artificial Sequence
  derived and/or modified sequence
atggcccagggcctggtgaccttcgccgacgtggccatcgacttcagccaggaggagtgggcctgcctgaacagcgcccagagagacctgtactgggacgtgatgctggagaactacagcaacctggtgagcctggacctggagagcgcctacgagaacaagagcctgcccaccgagaagaacatccacgagatcagagccagcaagagaaacagcgacagaagaagcaagagcctgggcagaaactggatctgcgagggcaccctggagagaccccagagaagcagaggcagatacgtgtag

SEQ ID NO: 198951 - DNA, 1392 bp, Artificial Sequence
  derived and/or modified sequence
atggcacagggactcgttaccttcgcagatgtagcgatcgatttctcacaagaagaatgggcctgcctcaattccgctcagcgcgatctctattgggatgtgatgctcgagaattacagcaatttagtctctctcgatctggaatccgcgtatgagaataagtccctccctacagagaagaatatccatgagatccgggccagcaagcgtaacagtgaccgacggagtaagtctcttgggcgaaactggatttgtgagggcaccctggagcgcccccaaaggtcacgcggtagatacgtgaatcagatgatcattaattacgtcaaaaggccggccacaagagagggtactcccccacgcactcaccagagacatcacaaggagaactcttttgagtgcaaggattgtgggaaggcattctcacgcggctaccagctctctcaacatcagaaaattcatactggcgagaaaccttacgaatgcaaagagtgcaagaaggcatttaggtggggcaatcaactgacccagcatcagaagatccacacaggagaaaagccatacgagtgtaaagactgcgggaaagcctttcgctggggctctagcctggtaatccataagcgcatccacactggggaaaagccatacgagtgcaaagactgcgggaaagcatttcggcgcggagacgagctgacccagcaccagagatttcacacgggcgaaaaggactatgaatgcaaagattgtggcaaaacattctccagagtttacaaattaattcagcataaacgcatccattcaggagaaaaaccgtatgagtgtaaggactgtgggaaagcctttatttgcgggtcttctttaattcagcataagaggatccataccggcgaaaaaccgtatgagtgtcaagagtgcggcaaggccttcaccagggtgaattacttaacacagcatcagaagatccatacaggcgagaagcctcacgaatgtaaagagtgtggcaaagcctttcgctgggggagctcactagtgaagcacgagagaattcacaccggcgagaaaccttacaagtgtacagagtgtggaaaagcatttaactgtggctatcacctcacccagcacgagcgaattcatactggagaaacgccgtacaagtgtaaagaatgcggcaaggcctttatttatggcagtagcctggtaaaacacgagcgaattcatacgggcgtgaaaccgtatggttgtaccgagtgcggcaagagcttcagccacggccatcagctaacccagcatcagaagacacactctggggcaaagtcctatgaatgtaaagagtgtggcaaggcctgcaaccacctgaatcatcttcgagagcaccagcgaattcataactcatag

SEQ ID NO: 198952 - DNA, 1392 bp, Artificial Sequence
  derived and/or modified sequence
atggcccagggcctggtaactttcgcagacgtggccattgactttagccaagaggagtgggcttgtctcaattctgctcagcgggatctctactgggatgtgatgttggagaactacagtaacctcgtatcacttgacttagaaagcgcttacgagaacaagtccctcccaacagaaaagaacatccacgaaatccgggcctcgaagcgaaacagtgatcggcggagcaaaagcttggggagaaattggatttgcgagggcacactggaaagacctcagagaagccgcggacggtatgtgaatcagatgataattaactatgtcaagcgacccgccacacgagagggaaccccacccaggacacaccaacgccatcataaagaaaacagcttcgaatgtaaggattgcggtaaggctttttctcggggctaccaattgtcccagcaccagaaaattcacaccggggagaaaccgtacgaatgcaaggaatgcaagaaggcattcaggtgggggaaccagttgacacagcatcaaaagattcacacaggggaaaagccatacgagtgcaaggactgcggtaaggccttccgctggggcagctcactggtgatccataaaagaattcatacgggagagaaaccctacgagtgtaaggactgtggcaaagcctttcgccggggagatgagctaacacagcaccagaggttccatacgggagaaaaagattatgagtgtaaggactgcggtaagacgtttagtagggtttataagctcatccagcataagcgcattcactctggtgagaagccctatgaatgtaaggactgtggcaaggcgttcatctgcggcagctctttaatccaacacaagcgaattcacacaggagagaaaccatacgagtgccaggaatgcggcaaagcgtttacccgtgtgaactacctgactcagcatcaaaaaattcacactggagagaaaccccacgaatgtaaagagtgtggaaaagcgttccggtgggggtcatcactggtgaagcacgagcgcatccacacaggggagaaaccgtacaagtgtaccgaatgtggcaaagcgttcaactgcggctaccacctgacacaacacgagagaattcacactggcgagaccccgtataagtgtaaagagtgcgggaaggcatttatatatgggtcatcattggtaaaacatgagaggattcatactggggtaaagccctatggctgtaccgagtgtggcaagtcattctctcacgggcaccagctgacacagcatcaaaagacccatagtggggctaagagctacgaatgcaaagaatgtggtaaggcctgtaaccacctgaaccatctcagagagcatcaaaggattcacaacagctag

SEQ ID NO: 198953 - DNA, 1392 bp, Artificial Sequence
  derived and/or modified sequence
atggcccagggtctggtgactttcgccgatgtggccatcgacttttcccaggaggaatgggcctgcctaaattcagcccagcgggatttatactgggatgtaatgctggaaaattactctaatctggtcagtttagacctcgaaagcgcatatgagaataaatccctgcctacagagaaaaacatccacgagatccgtgctagtaagcgaaattcagaccgtagaagcaagtccctcggcaggaattggatctgtgagggcaccctggagagacctcagcgctctcgcgggcgatacgtgaaccagatgataatcaattacgtcaaacgacctgcgacccgagaaggaacaccacccaggacacatcagcggcaccataaagagaattcttttgagtgcaaggattgtggaaaagctttcagcaggggataccagctctcccagcatcagaagatccacacgggggagaagccgtacgaatgtaaggagtgcaagaaagcttttcggtgggggaatcagcttacccaacatcaaaagatccacactggcgaaaagccatatgagtgcaaggactgtggtaaagcttttcggtggggttcttccctggtgattcataaaagaatccatacaggagagaaaccgtatgagtgcaaagattgtgggaaggccttccgccgcggcgatgagctgactcagcatcagcgattccataccggggagaaagactatgaatgcaaggattgtggaaagacttttagcagggtttacaagctcatccagcataagcgaattcatagtggcgagaagccctacgagtgcaaagactgcgggaaagcgttcatttgtggatccagtctgatccagcacaagcgtatccacactggtgaaaaaccatacgagtgtcaggaatgtgggaaggcgttcacacgtgtgaattatctcactcagcaccaaaagatccataccggtgaaaagcctcacgaatgtaaagaatgtggcaaagcttttcgctggggttcctccctggtgaaacatgaacgaatccacaccggtgagaaaccatacaagtgcacagaatgtggaaaggcgttcaactgtgggtatcacctgactcagcatgagagaattcacaccggggagaccccttacaagtgtaaggagtgcggcaaagcattcatctatggtagttcgctggtgaaacacgagcggatccacacaggcgttaaaccatatgggtgcacagaatgcgggaagagcttctcacatggacatcagctgacacagcaccagaaaacgcattccggtgctaaaagttacgaatgcaaagaatgtggcaaggcctgtaatcatctcaatcatctcagggagcaccaacgtattcataactcctag

SEQ ID NO: 198954 - DNA, 192 bp, Artificial Sequence
  derived and/or modified sequence
atggcgcagggattagtcactttcgccgacgttgctattgacttctcacaggaggaatgggcctgcctgaatagtgctcagcgagacctgtactgggacgtgatgctagagaattactcgaatctcgtgtccctggacctagagtctgcttacgaaaacaaatccctgccaacagaaaagaacattcattag

SEQ ID NO: 198955 - DNA, 258 bp, Artificial Sequence
  derived and/or modified sequence
atggctcagggactggtgaccttcgccgatgttgctattgatttttcccaggaagagtgggcatgtctgaacagtgcccaacgcgatctgtactgggatgtgatgctagagaactattcgaacctggtgtcactagaccttgaatccgcttatgagaataagtcccttcccacagaaaagaacatccatgagatcagggcttcaaaaaggaactcggaccgccgctcaaagagtctgggtagaaattggatctgctag

SEQ ID NO: 198956 - DNA, 201 bp, Artificial Sequence
  derived and/or modified sequence
atggctcagggccttgtgacctttgcagatgtcgcgatagatttctcacaagaagaatgggcttgtcttaattctgctcagagggacctgtactgggatgtcatgttagagaattacagtaatctcgtttccttggacctcgaatcagcctacgaaaataagagtctgcccacggagaagaatatacatgagatcagatag

SEQ ID NO: 198957 - DNA, 195 bp, Artificial Sequence
  derived and/or modified sequence
atggcccagggactggtgaccttcgccgatgtagccatcgactttagtcaggaggagtgggcatgtctcaacagcgctcagagagacttgtactgggacgttatgcttgaaaactactccaacctggtctcattggaccttgagtctgcctacgagaataaatctttaccaactgaaaaaaacattcatgagtag

SEQ ID NO: 198958 - DNA, 534 bp, Artificial Sequence
  derived and/or modified sequence
atggcccaagggctggttactttcgctgacgttgcaattgacttcagccaggaggagtgggcttgtctgaattccgctcaaagggatctgtattgggacgttatgttagagaattacagcaacctggtgagcctggacctcgagagtgcctacgaaaataaatccctaccaaccgaaaaaaatatacacgaaattagagcctccaagcgaaatagtgaccggcggagcaagtcccttggaagaaactggatttgtgagggcacactggaaaggcctcagcgcagtagaggacgctatgtgaatcaaatgataatcaactacgtgaaacgcccagccacccgagagggcacccccccaagaacccaccagagacatcacaaggaaaacagtttcgagtgcaaagattgcggcaaagccttctctagagggtatcagctctctcaacatcagaaaattcatactggagaaaagccttacgagtgcaaggagtgcaaaaaggccttccgatggggcaatcagttgacccagcattag

SEQ ID NO: 198959 - DNA, 264 bp, Artificial Sequence
  derived and/or modified sequence
atggcccaggggcttgtgacttttgctgatgtggcaatcgatttttcccaggaagagtgggcctgcctcaacagtgctcagagagacctgtattgggatgtgatgctggaaaattattccaacctggtgagtctggacctggaaagtgcctatgagaataaatcactgcccacagagaagaacatccacgaaatccgggcttccaaaagaaattcggataggcgctcgaagagcctcggtagaaattggatctgtgagggttag

SEQ ID NO: 198960 - DNA, 144 bp, Artificial Sequence
  derived and/or modified sequence
atggctcaagggttggtaaccttcgcagacgtggcaatcgactttagccaggaagagtgggcttgcttgaactcagcgcagagggacctgtattgggatgtcatgctggaaaattacagtaacttggtttcacttgatctctag

SEQ ID NO: 198961 - DNA, 1392 bp, Artificial Sequence
  derived and/or modified sequence
atggcacagggactggttacatttgcagacgtcgcgattgacttcagtcaagaggagtgggcctgccttaacagcgcgcaaagagacttgtactgggacgtgatgctagagaactattccaatctggtatccctagatctggagtcagcctatgagaataagtccttacctaccgagaaaaacatccatgagatacgcgctagcaagcgtaatagcgaccggcgatcgaagagtctgggacgtaattggatttgtgagggcacgttagagcgaccgcagcgttcaagaggcaggtacgtcaatcagatgatcatcaattacgtcaagagaccggccacgagggaaggcacgccaccccggacccaccagcgccaccacaaggagaattcatttgagtgcaaggactgtggcaaggcctttagcaggggttatcagctgtcacagcaccagaagatccacactggcgagaaaccttatgagtgtaaggagtgtaagaaagctttccggtggggcaaccagttgactcagcaccaaaagattcacaccggagagaaaccttacgagtgtaaagactgtggaaaagcctttaggtggggaagctctctggtgattcacaagaggattcacactggagaaaaaccatacgagtgcaaagactgcggaaaagcatttagacggggcgatgaattaacacagcaccagaggtttcacactggggagaaggattacgagtgtaaggactgcgggaaaaccttttccagagtgtataagctgatccagcacaagaggatacacagcggcgagaagccctacgaatgtaaggactgcggaaaggcctttatttgtgggtcaagcctgatccagcataaacggatccatactggggaaaaaccttatgagtgccaagagtgcgggaaggccttcaccagggtgaactacctgacacagcatcagaaaatccacacgggcgaaaaacctcacgaatgcaaagagtgtggcaaggccttccggtgggggagttctcttgttaagcatgagcgcattcacactggggaaaagccttataaatgcactgagtgcgggaaggctttcaattgcgggtaccacctcacccagcatgagaggatccatacgggggaaactccttacaaatgtaaagaatgtggcaaagcattcatctacggatcctctctggtaaaacacgaacggatccacacaggtgtaaagccatatggatgcacggagtgcggtaagagctttagtcatgggcatcagctcactcaacaccagaagacacatagcggcgctaaatcctacgaatgcaaggaatgcggaaaggcgtgcaaccatctcaaccacctgagggaacaccagaggatccacaatagctag

SEQ ID NO: 198962 - DNA, 318 bp, Artificial Sequence
  derived and/or modified sequence
atggcacagggattggttaccttcgctgatgttgctatcgacttttcccaggaggagtgggcatgcttgaattccgcgcagagggacctgtattgggatgtgatgctggaaaattatagtaacctagtctcccttgacctcgaatccgcctatgagaacaaaagcctgcctaccgagaagaatattcacgaaattcgtgcttcaaagcggaactccgatagaaggtccaaatcactgggacgaaactggatttgtgaaggcactctggaaagaccgcagcggtctcggggtaggtacgtgaatcagatgattatatag

SEQ ID NO: 198963 - DNA, 1392 bp, Artificial Sequence
  derived and/or modified sequence
atggcccagggacttgtcacatttgccgacgttgcgatagattttagccaagaagaatgggcatgtctgaacagcgctcaaagggatctgtactgggacgtaatgctggaaaactacagtaacctcgtctcactagacctggaatccgcttatgaaaacaaatcactcccaaccgagaaaaacattcacgagattcgtgcaagtaaacgaaactctgacagacgtagcaaaagcttgggccggaactggatctgcgaaggaacactagagcggccccaaagaagccgcgggcgctacgttaaccagatgattatcaactacgtgaagaggccagccacaagagaggggactccccctcgcacacaccagaggcatcacaaggagaactctttcgagtgtaaggactgtggaaaagccttctctagaggctatcagctctcccagcatcagaagattcatactggcgaaaagccctacgaatgtaaagagtgcaagaaagccttcaggtggggtaaccagctgactcagcatcaaaaaatccacactggcgaaaaaccatacgagtgcaaggattgcgggaaagctttcagatggggttcttcccttgttattcacaagagaatacataccggagagaagccctacgaatgcaaggattgcggaaaggcttttagacgcggggacgagttgacgcagcatcagcgcttccataccggagagaaggactatgaatgcaaagattgcggtaaaactttctcacgagtctacaaacttatccagcacaagcggatccatagcggggaaaaaccgtacgaatgcaaggattgcgggaaagcctttatatgcgggtcctctctgatccagcacaagcggattcacaccggggagaagccttacgaatgtcaggaatgcggtaaggcctttacaagagtgaactacctgacccagcaccagaagatccacactggcgaaaaaccccatgagtgcaaagaatgcgggaaagcgttccgatgggggtcatcactagtgaaacatgagagaatccatactggggaaaaaccatacaaatgtacggaatgtgggaaggccttcaattgtggctatcatctgacacagcacgagaggattcataccggcgagaccccatacaagtgcaaggagtgcggcaaggcctttatctacggatcctccttggtaaaacacgagcgcatacataccggcgttaagccttatggatgcacagagtgtgggaagtctttttcacacggccaccagctgacacagcatcagaagacccactcaggtgccaaaagctacgaatgcaaggagtgcgggaaggcgtgtaaccatttaaaccacttaagggagcaccagaggattcacaactcttag

SEQ ID NO: 198964 - DNA, 1392 bp, Artificial Sequence
  derived and/or modified sequence
atggcccaggggttggtcacattcgccgacgtggccatcgactttagccaggaagaatgggcctgtctcaattcagcgcagagagatctttactgggatgttatgctagagaactactctaacttagtaagtttggatctcgagtccgcgtacgagaataaaagcctgcccaccgaaaagaatatccatgagattcgggcctcaaaacgaaactctgatcgacgatccaaatccctgggtagaaactggatctgtgagggaacccttgagagaccgcagaggagccgcggaagatatgtgaaccagatgattatcaactacgtcaagcgccccgccactcgtgaagggacccctcccagaactcaccagcggcatcacaaggagaactcgtttgagtgcaaggactgcgggaaagcgttttctcggggataccagcttagtcaacatcagaagattcacacaggagaaaaaccttacgaatgcaaagagtgtaaaaaagccttccgctggggcaatcagctcactcagcatcagaagattcacactggtgagaagccatatgaatgcaaagactgcggcaaagctttccggtgggggtcctctcttgtcatccacaaacggatacacactggagaaaagccatatgagtgtaaggattgtggaaaagcctttcggagaggcgacgaactgacgcagcatcagcgctttcacaccggggaaaaggattacgaatgcaaagattgtggaaagacgtttagcagggtatataagctcattcagcataagcggatacatagcggagagaagccctatgaatgcaaagactgcgggaaagcatttatctgtggctcatccctgatccaacataaaagaatccacaccggcgaaaagccatacgaatgccaggagtgcggcaaagcattcacccgcgtgaactatctgactcaacatcagaagattcataccggagaaaaacctcacgagtgcaaagaatgtggtaaggcttttcgttggggcagcagtttggttaaacacgagaggattcacacaggggaaaagccatataaatgcactgagtgtggtaaagccttcaattgtggatatcatcttacccagcatgaacggatccataccggcgaaaccccctacaaatgcaaggaatgtgggaaggccttcatttatgggtcgagtctcgtgaagcacgagagaattcacaccggggtgaaaccgtacggctgtacagaatgtggcaagagcttctcacacggtcaccagctcacccaacatcaaaagacgcattcaggcgcaaagtcttacgaatgtaaggaatgcggaaaggcgtgcaaccatttaaaccatctgagagaacaccagcgcatccacaacagctag

SEQ ID NO: 198965 - DNA, 297 bp, Artificial Sequence
  derived and/or modified sequence
atggcgcaagggctagtaacctttgctgatgtagccatcgacttcagccaggaagagtgggcatgcctgaatagcgcccaaagagatctgtactgggatgtcatgcttgagaattacagcaacctggtctctcttgacctggagtctgcgtacgagaacaaatctttaccgaccgagaagaatattcacgagattcgcgctagcaaacggaattccgaccggcgaagcaagtccctcggaaggaattggatctgcgaagggacattggagcgccctcaacgtagtagagggaggtag

SEQ ID NO: 198966 - DNA, 1392 bp, Artificial Sequence
  derived and/or modified sequence
atggcccaaggtctcgtaacgtttgccgatgtcgccatcgacttttcccaagaagaatgggcctgtctgaactctgcccaaagagatctctattgggacgttatgctcgagaattactccaacctggtaagccttgatttagagtcagcatacgagaacaaatctctgcccacagaaaagaacattcacgaaatccgtgccagtaaaaggaactctgatcgacgctctaagtctcttggcagaaattggatatgcgaaggcaccctggaacgaccccagcgtagtcgggggagatatgttaaccagatgataattaactatgtcaaacgacccgccacgagagaaggtaccccccccaggactcaccagcgtcatcacaaggaaaattcttttgagtgcaaggattgcgggaaagcattctcacggggctaccagctgtcccaacaccaaaaaattcacacaggggagaagccttacgagtgtaaagaatgtaagaaggcgttccgatggggcaaccagctcacccagcaccagaaaattcatactggcgagaagccatacgaatgtaaagattgcggaaaagcatttcggtggggttcctcactggtgatacacaagaggattcacacaggcgagaagccatatgagtgcaaggactgtggaaaggccttccggaggggggacgaactcacgcagcatcagcgcttccacactggcgagaaagactacgagtgcaaggattgcggcaagacgttctctcgggtgtataagctgatccaacacaagcgcatccattcaggcgagaagccctacgaatgtaaggactgtggaaaggcattcatctgcggctcgagtctgatacaacataaacggatccacactggggaaaagccgtatgagtgtcaagagtgcggcaaggcctttacccgcgtgaattacctgacgcagcatcagaagattcacacgggtgaaaaaccccatgagtgcaaagagtgcggcaaggcttttaggtggggcagctccctggtaaaacacgagcggatacacactggcgaaaagccatataagtgtacggagtgcggcaaggcgttcaattgtgggtatcacctcacccaacacgagcggatccataccggtgaaaccccttacaagtgcaaggagtgtggaaaggcattcatctacggatcgagtctcgttaaacacgagcggatccatacgggagtcaagccgtatggatgcacagaatgcggaaagagcttttctcacggtcatcagctcacccagcaccagaagacacactcaggagccaaaagctacgaatgcaaagaatgcggaaaagcttgcaatcacttgaaccatctgagagaacaccagcggatccataacagctag

SEQ ID NO: 198967 - DNA, 504 bp, Artificial Sequence
  derived and/or modified sequence
atggctcaggggttggtgaccttcgccgacgtggcaatagacttctcccaagaggagtgggcatgtctgaactctgctcagcgggacctatattgggatgtgatgctggaaaattattccaacctcgtgtctctcgatctggagtctgcttatgagaataaaagtcttccgacggaaaaaaatattcatgagatccgggcgtccaagcgcaatagcgacaggcgctccaagagtctgggccgtaactggatctgcgaagggactctggaacgaccccagagaagtaggggaaggtatgtgaatcagatgattattaactatgtaaagcgccccgctactagggaggggactccgcctcggactcatcaacggcaccataaagagaacagcttcgaatgcaaggattgcggcaaggccttctcacggggttaccagctaagccagcaccagaagatccacactggagagaagccgtatgagtgcaaggagtgtaaaaaagcctag

SEQ ID NO: 198968 - DNA, 303 bp, Artificial Sequence
  derived and/or modified sequence
atggcacaaggtctggtcacattcgccgatgtggccattgactttagccaggaggaatgggcctgtctgaatagtgcacagagagacctttactgggacgtgatgctcgagaactactcaaaccttgtgtccctggacctggaaagcgcatacgagaacaagagtctgcctaccgagaagaacattcacgagatacgcgcttcaaagaggaattctgacagacgctccaagagcctggggcgaaactggatctgtgaaggtactctggaacgcccccagcgcagcagaggacgctacgtgtag

SEQ ID NO: 198969 - DNA, 1392 bp, Artificial Sequence
  derived and/or modified sequence
atggcccagggcctggtgacctttgctgatgtggccatcgacttcagccaggaggagtgggcctgcctgaacagcgcccagagggacctgtactgggatgtgatgctggagaactacagcaacctggtgtccctggacctggagagcgcctatgagaacaagagcctgcccacagagaagaacatccacgagatccgggccagcaagaggaacagcgaccggcgcagcaagagcctgggcaggaactggatctgtgagggcaccctggagcggccccagaggagccggggccgctacgtgaaccagatgatcatcaactacgtgaagaggcctgccacccgggagggcaccccacccaggacccaccagaggcaccacaaggagaacagctttgagtgcaaggactgtgggaaggccttcagccggggctaccagctgagccagcaccagaagatccacactggagagaagccctatgagtgcaaggagtgcaagaaggccttccgctggggcaaccagctgacccagcaccagaagatccacactggagagaagccctatgagtgcaaggactgtgggaaggccttccgctggggcagcagcctggtgatccacaagaggatccacactggagagaagccctatgagtgcaaggactgtgggaaggccttcagaagaggagatgagctgacccagcaccagcgcttccacactggagagaaggactatgagtgcaaggactgtgggaagaccttcagccgggtgtacaagctgatccagcacaagaggatccacagcggggagaagccctatgagtgcaaggactgtgggaaggccttcatctgtggcagcagcctcatccagcacaagaggatccacactggagagaagccctatgagtgccaggagtgtgggaaggccttcaccagggtgaactacctgacccagcaccagaagatccacactggagagaagccccatgagtgcaaggaatgtgggaaggccttccgctggggcagcagcctggtgaagcatgagcgcatccacactggagagaagccctacaagtgcacagaatgtgggaaggccttcaactgtggctaccacctgacccagcacgagcgcatccacactggagagaccccctacaagtgcaaggaatgtgggaaggccttcatctacggcagcagcctggtgaagcatgagcgcatccacactggagtgaagccctacggctgcacagaatgtgggaagagcttcagccacggccaccagctgacccagcaccagaagacccacagcggggccaagagctatgagtgcaaggaatgtgggaaggcctgcaaccacctgaaccacctgcgggagcaccagaggatccacaacagctag

SEQ ID NO: 198970 - DNA, 192 bp, Artificial Sequence
  derived and/or modified sequence
atggcccagggcctggtgacctttgctgatgtggccatcgacttcagccaggaggagtgggcctgcctgaacagcgcccagagggacctgtactgggatgtgatgctggagaactacagcaacctggtgtccctggacctggagagcgcctatgagaacaagagcctgcccacagagaagaacatccactag

SEQ ID NO: 198971 - DNA, 258 bp, Artificial Sequence
  derived and/or modified sequence
atggcccagggcctggtgacctttgctgatgtggccatcgacttcagccaggaggagtgggcctgcctgaacagcgcccagagggacctgtactgggatgtgatgctggagaactacagcaacctggtgtccctggacctggagagcgcctatgagaacaagagcctgcccacagagaagaacatccacgagatccgggccagcaagaggaacagcgaccggcgcagcaagagcctgggcaggaactggatctgctag

SEQ ID NO: 198972 - DNA, 201 bp, Artificial Sequence
  derived and/or modified sequence
atggcccagggcctggtgacctttgctgatgtggccatcgacttcagccaggaggagtgggcctgcctgaacagcgcccagagggacctgtactgggatgtgatgctggagaactacagcaacctggtgtccctggacctggagagcgcctatgagaacaagagcctgcccacagagaagaacatccacgagatcagatag

SEQ ID NO: 198973 - DNA, 195 bp, Artificial Sequence
  derived and/or modified sequence
atggcccagggcctggtgacctttgctgatgtggccatcgacttcagccaggaggagtgggcctgcctgaacagcgcccagagggacctgtactgggatgtgatgctggagaactacagcaacctggtgtccctggacctggagagcgcctatgagaacaagagcctgcccacagagaagaacatccatgaatag

SEQ ID NO: 198974 - DNA, 534 bp, Artificial Sequence
  derived and/or modified sequence
atggcccagggcctggtgacctttgctgatgtggccatcgacttcagccaggaggagtgggcctgcctgaacagcgcccagagggacctgtactgggatgtgatgctggagaactacagcaacctggtgtccctggacctggagagcgcctatgagaacaagagcctgcccacagagaagaacatccacgagatccgggccagcaagaggaacagcgaccggcgcagcaagagcctgggcaggaactggatctgtgagggcaccctggagcggccccagaggagccggggccgctacgtgaaccagatgatcatcaactacgtgaagaggcctgccacccgggagggcaccccacccaggacccaccagaggcaccacaaggagaacagctttgagtgcaaggactgtgggaaggccttcagccggggctaccagctgagccagcaccagaagatccacactggagagaagccctatgagtgcaaggagtgcaagaaggccttccgctggggcaaccagctgacccagcactag

SEQ ID NO: 198975 - DNA, 264 bp, Artificial Sequence
  derived and/or modified sequence
atggcccagggcctggtgacctttgctgatgtggccatcgacttcagccaggaggagtgggcctgcctgaacagcgcccagagggacctgtactgggatgtgatgctggagaactacagcaacctggtgtccctggacctggagagcgcctatgagaacaagagcctgcccacagagaagaacatccacgagatccgggccagcaagaggaacagcgaccggcgcagcaagagcctgggcaggaactggatctgtgagggctag

SEQ ID NO: 198976 - DNA, 144 bp, Artificial Sequence
  derived and/or modified sequence
atggcccagggcctggtgacctttgctgatgtggccatcgacttcagccaggaggagtgggcctgcctgaacagcgcccagagggacctgtactgggatgtgatgctggagaactacagcaacctggtgtccctggacctgtag

SEQ ID NO: 198977 - DNA, 318 bp, Artificial Sequence
  derived and/or modified sequence
atggcccagggcctggtgacctttgctgatgtggccatcgacttcagccaggaggagtgggcctgcctgaacagcgcccagagggacctgtactgggatgtgatgctggagaactacagcaacctggtgtccctggacctggagagcgcctatgagaacaagagcctgcccacagagaagaacatccacgagatccgggccagcaagaggaacagcgaccggcgcagcaagagcctgggcaggaactggatctgtgagggcaccctggagcggccccagaggagccggggccgctacgtgaaccagatgatcatctag

SEQ ID NO: 198978 - DNA, 297 bp, Artificial Sequence
  derived and/or modified sequence
atggcccagggcctggtgacctttgctgatgtggccatcgacttcagccaggaggagtgggcctgcctgaacagcgcccagagggacctgtactgggatgtgatgctggagaactacagcaacctggtgtccctggacctggagagcgcctatgagaacaagagcctgcccacagagaagaacatccacgagatccgggccagcaagaggaacagcgaccggcgcagcaagagcctgggcaggaactggatctgtgagggcaccctggagcggccccagaggagccggggccgctag

SEQ ID NO: 198979 - DNA, 504 bp, Artificial Sequence
  derived and/or modified sequence
atggcccagggcctggtgacctttgctgatgtggccatcgacttcagccaggaggagtgggcctgcctgaacagcgcccagagggacctgtactgggatgtgatgctggagaactacagcaacctggtgtccctggacctggagagcgcctatgagaacaagagcctgcccacagagaagaacatccacgagatccgggccagcaagaggaacagcgaccggcgcagcaagagcctgggcaggaactggatctgtgagggcaccctggagcggccccagaggagccggggccgctacgtgaaccagatgatcatcaactacgtgaagaggcctgccacccgggagggcaccccacccaggacccaccagaggcaccacaaggagaacagctttgagtgcaaggactgtgggaaggccttcagccggggctaccagctgagccagcaccagaagatccacactggagagaagccctatgagtgcaaggagtgcaagaaggcctag

SEQ ID NO: 198980 - DNA, 303 bp, Artificial Sequence
  derived and/or modified sequence
atggcccagggcctggtgacctttgctgatgtggccatcgacttcagccaggaggagtgggcctgcctgaacagcgcccagagggacctgtactgggatgtgatgctggagaactacagcaacctggtgtccctggacctggagagcgcctatgagaacaagagcctgcccacagagaagaacatccacgagatccgggccagcaagaggaacagcgaccggcgcagcaagagcctgggcaggaactggatctgtgagggcaccctggagcggccccagaggagccggggccgctacgtgtag

SEQ ID NO: 198981 - DNA, 1392 bp, Artificial Sequence
  derived and/or modified sequence
atggcccagggcctggtgaccttcgccgacgtggccatcgacttctctcaagaagaatgggcctgcctgaactccgctcagagggatctttactgggatgtcatgttggagaactactctaacctcgtcagcctcgaccttgagagcgcctacgagaacaaatctctcccaactgagaaaaatattcacgaaataagagcatcaaaacgcaattcagaccgtcggtccaagagtctcggccggaactggatttgcgagggtactcttgagcgaccccagagatctaggggccggtacgtgaatcaaatgataataaactacgttaagcggcccgccacgcgcgaggggacgccaccccgcactcaccagagacaccataaagagaattcgttcgaatgcaaagactgtggaaaggctttttctcggggataccaattgagtcagcaccagaagatccatactggagagaaaccctacgaatgcaaggagtgcaaaaaggcattcaggtgggggaaccagcttacacagcaccagaagattcatacgggcgagaagccctacgaatgtaaagactgcggcaaagcttttagatggggctcatccctggttattcataaacgtatccacacgggagagaagccctacgagtgcaaggattgcggaaaggccttcagacggggggacgagttgacccagcatcagcggttccatactggggagaaagactacgaatgtaaagattgtgggaagaccttctcacgcgtatataagctcattcaacacaagcgcatccatagtggggagaaaccctatgagtgtaaggactgcgggaaggcattcatttgcggtagtagtctgatccaacacaaacggattcatacgggtgaaaagccttacgaatgccaggagtgcggaaaagctttcactcgtgtcaattacctgacccaacatcagaagatccacactggtgagaaaccacatgaatgtaaagaatgtgggaaagcattccgttgggggagtagcttagtgaagcatgaacgcatccacaccggcgaaaagccttataaatgtacggagtgcgggaaggcgttcaactgcgggtaccacttgacacagcacgagcggatccacaccggagagaccccctacaagtgtaaggaatgtggcaaggcgtttatttacgggtctagcttggtgaaacacgaaagaatccacactggagttaagccatacggctgtacagagtgtggaaagtctttttcgcacggacatcaattaacccagcatcagaagacccattctggggcaaaaagttacgaatgtaaggagtgtggcaaggcatgcaatcatttgaaccacctcagagagcaccaacgcattcacaacagttag

SEQ ID NO: 198982 - DNA, 1392 bp, Artificial Sequence
  derived and/or modified sequence
atggcccagggcctggtgaccttcgccgacgtggccatcgacttctcgcaggaagagtgggcctgcctgaactcagctcagcgagatctctattgggatgtgatgctggagaattattcgaatctggtaagcctcgacttagagagtgcttacgaaaataagtctctgcccaccgaaaaaaacatccacgagattcgcgcctctaagcgaaacagcgaccgtcgaagcaagagcctgggtcggaattggatctgtgagggcaccttagaacgtccgcagaggagtaggggacggtatgtaaatcaaatgatcattaactacgtgaagcgccccgctacgcgcgaggggacacctccgcggactcatcagcgccatcataaagaaaattccttcgaatgcaaggactgcggtaaggctttcagccgcggctatcagctcagtcagcaccagaagatccataccggcgaaaagccgtatgagtgcaaggagtgcaagaaggcctttaggtgggggaaccagctaacacaacatcaaaagattcacaccggggagaaaccttatgaatgtaaagactgcggtaaagccttcaggtggggttcttctctcgtcatccacaaacgaatccacacaggagaaaaaccatatgaatgtaaagattgtggtaaggcttttagaaggggtgacgaactcactcagcatcaacgttttcatacaggtgagaaggattacgagtgtaaagattgtggcaaaaccttttcaagagtctacaaactcatacagcacaaacggatccacagcggagagaagccatatgagtgcaaagactgtggcaaagcatttatctgcggcagcagcttaatccaacataagcgaatacacaccggggaaaaaccctacgagtgccaggaatgtgggaaggctttcacccgagttaattatctgacgcaacatcagaagattcacaccggcgagaaacctcatgagtgtaaggaatgtggcaaggcgtttaggtggggctcatcattagtgaaacacgaaagaattcatacaggggaaaagccctacaaatgcacagaatgtggtaaagcctttaactgtggctaccacttaacccagcacgaaaggatacatacgggcgagaccccttataaatgcaaagagtgcggaaaggccttcatctacgggtcaagcttggtgaagcatgagcgtatccacactggcgtaaagccttacggatgtaccgagtgtggtaaatcatttagccacggccaccagctcacccagcatcagaagacgcatagcggagcaaagtcgtacgagtgtaaggaatgcgggaaggcctgtaaccacttgaaccaccttcgggagcaccagagaatccacaactcatag

SEQ ID NO: 198983 - DNA, 1392 bp, Artificial Sequence
  derived and/or modified sequence
atggcccagggcctggtgaccttcgccgacgtggccatcgacttctcccaggaagagtgggcctgcctgaacagcgctcaacgggatctctattgggatgtgatgctggaaaactattcaaatcttgtcagcttggatctggagagcgcttatgaaaataagagcctacctaccgaaaagaatattcacgagataagggcgagtaagcgaaattccgatagacgatcaaaaagcctggggcgtaactggatttgtgaagggacactcgagaggccacagaggagtcggggcagatatgtgaaccagatgataatcaattacgtgaagcgcccagctacgcgtgaggggacaccaccccgcacgcaccagagacaccacaaggagaactcgttcgaatgcaaggactgtggcaaagcgttctcccgcgggtaccagctgagccagcaccagaagatccataccggggagaagccttatgaatgcaaggagtgcaaaaaggccttcagatggggcaatcagctgactcaacatcaaaagatccacacaggggaaaagccctatgagtgcaaagattgcggcaaggcttttaggtgggggtcgtcactggtgatccataagagaatccacaccggagaaaagccatacgaatgcaaggactgcggcaaagcatttcggcgcggagacgaattgacacagcaccagaggtttcacacaggtgagaaggactacgagtgtaaggactgcggtaaaactttctcaagggtctataagttgatccaacataaacgaattcactcgggggagaagccatacgagtgtaaggactgtgggaaggccttcatttgcggcagttccctaatccagcacaaacgcattcacaccggcgagaagccctatgaatgccaagaatgtgggaaggcgttcactcgggtcaattatcttacacagcatcagaaaattcacactggggagaagccgcatgagtgcaaggaatgtggcaaggctttccgatgggggtcaagcctcgtgaagcacgagcggattcacaccggggagaaaccatacaaatgcactgagtgcggaaaggccttcaattgtggatatcatcttacacagcatgagaggattcacaccggcgagacaccctacaaatgtaaagaatgtggaaaggcctttatttatggaagttctttggtgaaacacgaaagaattcacacgggagtgaaaccttatggatgtacagagtgtggtaagagcttttctcatggccatcaattaacccagcatcagaaaactcacagcggggccaagtcttacgaatgcaaagaatgtggaaaagcatgcaatcacctaaatcacttaagagaacatcagaggatccataattcctag

SEQ ID NO: 198984 - DNA, 192 bp, Artificial Sequence
  derived and/or modified sequence
atggcccagggcctggtgaccttcgccgacgtggccatcgacttctcccaggaggagtgggcctgtttgaacagcgcccagagggacctttactgggatgtgatgctcgaaaattactctaatctcgtcagcctggacctcgagtcagcttacgagaataaatccctgcctacagagaaaaatattcactag

SEQ ID NO: 198985 - DNA, 258 bp, Artificial Sequence
  derived and/or modified sequence
atggcccagggcctggtgaccttcgccgacgtggccatcgacttctcgcaggaggagtgggcctgcttgaattcagcccagagagatctatactgggatgtgatgcttgaaaattactcaaacttggtgtctctcgatctggagtcggcttacgagaacaagtcattacctaccgagaaaaacatacatgaaatccgcgcctcaaagagaaacagcgaccgcagaagcaagagccttgggcgcaactggatatgctag

SEQ ID NO: 198986 - DNA, 201 bp, Artificial Sequence
  derived and/or modified sequence
atggcccagggcctggtgaccttcgccgacgtggccatcgacttcagccaggaggagtgggcctgtctcaattctgctcagcgcgacctctactgggatgtcatgctcgagaactatagcaaccttgtgagcctggatttagagtcagcatatgagaataagtcgcttcccaccgaaaagaatattcatgaaattaggtag

SEQ ID NO: 198987 - DNA, 195 bp, Artificial Sequence
  derived and/or modified sequence
atggcccagggcctggtgaccttcgccgacgtggccatcgacttctcacaggaggagtgggcgtgtctgaatagtgcccagagagatctctattgggacgtcatgctcgaaaattactccaatttagtgagcctggatctggagtcagcttatgagaataagtctctgcccaccgagaaaaatatacacgaatag

SEQ ID NO: 198988 - DNA, 534 bp, Artificial Sequence
  derived and/or modified sequence
atggcccagggcctggtgaccttcgccgacgtggccatcgacttcagccaagaggagtgggcctgcttaaactccgcccagagggacctctactgggacgtcatgctggaaaattatagcaaccttgtgtccctcgatctggagtctgcctatgaaaacaaatctctcccgactgagaaaaacatccatgaaatcagggctagtaagcggaactccgacaggcgaagcaagagtctcggacggaactggatctgcgagggtacactggagcgaccacagagatcgcggggacgctacgtgaatcagatgatcattaactacgtgaaacgccctgccacccgggagggtactcctcctaggacacaccagcgtcatcacaaggagaattctttcgagtgcaaggattgtgggaaggccttttctaggggctaccaactaagtcagcatcaaaagatacatacaggagaaaaaccatatgagtgcaaggagtgtaagaaagcatttcgttggggcaaccaactcacacaacactag

SEQ ID NO: 198989 - DNA, 264 bp, Artificial Sequence
  derived and/or modified sequence
atggcccagggcctggtgaccttcgccgacgtggccatcgacttcagtcaggaggagtgggcctgtctgaattccgcccagagagacctttattgggacgttatgttggagaattacagcaatcttgtctcattggatctggaatccgcctacgagaataaaagcctgcctaccgagaaaaatatccacgaaatcagagcaagcaagcgcaatagcgatcgtcgcagtaagtctctcgggcgtaattggatctgtgagggttag

SEQ ID NO: 198990 - DNA, 144 bp, Artificial Sequence
  derived and/or modified sequence
atggcccagggcctggtgaccttcgccgacgtggccatcgacttcagccaggaagaatgggcctgtctgaattccgcacagcgcgatttgtattgggatgttatgcttgagaactactcaaatctggtgtccttggacctgtag

SEQ ID NO: 198991 - DNA, 1392 bp, Artificial Sequence
  derived and/or modified sequence
atggcccagggcctggtgaccttcgccgacgtggccatcgacttctcgcaggaagaatgggcttgcctgaacagtgctcagcgtgacctctactgggacgttatgctggaaaactattccaaccttgtgtctctcgacctcgagtccgcatatgagaataaaagcctccctacagaaaagaacatccacgaaattagagcaagcaaaaggaactctgaccggcgttccaagagcctaggacgcaactggatttgtgaaggtacactggagagaccacagcgctccaggggccgatatgtcaaccagatgatcatcaattacgtgaagcggccagccaccagagaaggtacacccccccgaactcaccagcggcaccacaaagagaattcatttgaatgtaaggactgcgggaaggccttcagcaggggatatcagctctcacagcatcaaaaaattcataccggagagaagccatacgagtgcaaagaatgtaaaaaggccttccggtgggggaatcagttaacgcagcaccagaaaatccacaccggggagaaaccttacgagtgcaaggactgtggaaaagcgtttagatggggctctagtctggtcattcacaaaaggatacatactggcgagaaaccctatgaatgtaaagactgcggaaaggcttttagaagaggtgacgagctgactcagcaccagcggttccacacgggggagaaagactacgagtgtaaagactgtgggaagacctttagtcgcgtgtataagctgatccaacataaacgaattcattcaggtgagaaaccctatgagtgcaaggactgcggcaaggcattcatttgcggttcaagtctgatccagcacaagaggattcacacaggcgagaagccatatgagtgccaggagtgcgggaaggccttcacgagggtgaattaccttactcagcaccagaagattcacacaggcgaaaaaccacatgagtgtaaagagtgcggtaaagcttttcggtggggttctagccttgtcaagcatgaaaggattcatactggcgagaaaccctataaatgcaccgagtgtggtaaggcctttaattgtggttaccacctgacccagcatgagcgaatccacaccggcgagacaccttataaatgtaaagaatgtggtaaagcattcatatacgggtcaagcctcgtgaaacatgagcggatacacaccggtgtgaagccctatggctgtaccgagtgcggtaagtcctttagtcatggtcatcagctcactcaacatcagaagacacattcaggtgctaaaagttatgaatgcaaagagtgtggcaaggcatgtaaccatctaaatcacctgagagagcaccagaggattcacaacagctag

SEQ ID NO: 198992 - DNA, 318 bp, Artificial Sequence
  derived and/or modified sequence
atggcccagggcctggtgaccttcgccgacgtggccatcgacttctctcaggaagagtgggcatgcctgaattccgcccagcgcgatctctactgggacgttatgttagagaattactcaaatctagtgagtttggacctggaatccgcctacgagaataagtcattgccaaccgaaaaaaatatccacgaaattcgcgcttccaagagaaactccgaccggagaagtaagtccttaggacggaactggatatgcgagggcacacttgagaggcctcaacgcagtaggggtcgttacgtgaaccagatgatcatctag

SEQ ID NO: 198993 - DNA, 1392 bp, Artificial Sequence
  derived and/or modified sequence
atggcccagggcctggtgaccttcgccgacgtggccatcgacttcagccaggaggaatgggcgtgtctaaatagcgcacagcgggatctctattgggacgtgatgctggagaactacagtaacctggtgagcctggacttagaatctgcttatgaaaacaagagtctgccaacggagaaaaatatccacgaaatccgcgctagcaagcgcaatagcgatcggcgatccaagtctcttggccggaactggatctgtgagggcacactggagcgcccccagcggtctcgcgggaggtacgtgaatcagatgatcatcaactacgtgaaacgacctgctacccgagaggggacaccacctaggacacaccagaggcaccataaggagaattcatttgagtgtaaggactgtgggaaggccttttcaagaggatatcagctatcgcagcaccagaagatccacactggggagaagccatatgaatgcaaggagtgtaagaaagcctttaggtggggtaatcagctcacccagcaccagaaaattcacaccggagagaagccttacgagtgcaaagattgcgggaaagcttttcggtggggcagctccctcgtcatccataaacggattcacacaggcgagaaaccatacgaatgcaaagattgcggcaaggctttccgccggggcgatgaattaacacagcaccagcgcttccacactggagaaaaagattacgaatgcaaagattgtgggaagaccttcagccgggtgtataagttgatccaacacaaacgcatccactctggagaaaagccttatgaatgtaaagattgtggaaaggcgtttatttgtggttcctctctgatacaacacaaaaggattcacaccggcgagaaaccatacgagtgtcaggagtgcggaaaggctttcactcgagtgaattacttaacccagcatcaaaagatccacaccggtgaaaaaccgcatgagtgtaaggagtgcggtaaggcgttccggtggggcagcagcttggtgaagcacgagaggattcacactggtgagaaaccctacaagtgcactgaatgcgggaaggcctttaattgcggctatcatcttacccaacacgaaagaatccacacgggcgagacaccctacaaatgcaaggagtgtggcaaggccttcatttatggttcctcccttgtaaagcatgagagaattcacaccggtgtcaagccctacggttgtactgagtgcggcaagtcattctctcacgggcaccagttgacacagcaccagaaaacacactctggtgccaaatcttacgaatgtaaggaatgtggaaaagcatgcaaccaccttaatcacctgcgagaacaccagaggatccacaattcttag

SEQ ID NO: 198994 - DNA, 1392 bp, Artificial Sequence
  derived and/or modified sequence
atggcccagggcctggtgaccttcgccgacgtggccatcgacttcagccaagaagagtgggcctgcctgaatagcgcccagagggacttatactgggacgtgatgctggagaattacagcaacctggtaagcctagacctggagagtgcctacgagaacaaaagtctacctaccgagaaaaacatccacgagatccgagcgtccaagcgaaatagcgaccggcgatcaaagtcgttggggcgaaattggatttgtgagggaactctagaacgcccgcagcgcagcagggggaggtatgtgaaccagatgatcattaactatgtgaagagaccagccacccgagagggcacccctcctagaactcaccagcggcaccacaaagagaattccttcgaatgcaaggactgcggaaaggcttttagccggggctatcagctgtcccagcatcagaagattcacactggagaaaaaccctatgagtgtaaagaatgcaaaaaggcctttcgatggggaaaccagctcacgcagcaccagaagatccacacgggggagaaaccatatgagtgcaaggattgtggcaaggcattccggtggggtagttctctggtgatacacaagcgcatccacactggcgaaaagccttacgaatgtaaggactgtggaaaggcctttagacggggtgatgaactgacgcaacaccagcggttccacacgggcgaaaaagactatgaatgcaaggactgtggcaaaacattttcaagggtgtacaagctgatccagcacaaacgcatccatagtggcgaaaaaccctatgaatgtaaagattgcggcaaggcattcatttgcggctccagcttaattcagcacaagagaatccacaccggtgagaaaccctacgaatgccaggagtgtgggaaggccttcacaagggtgaactacctgacacagcatcagaagattcacactggcgagaagccgcatgagtgtaaggagtgtgggaaagcattcagatgggggtcctcactcgtgaaacacgaacggattcataccggagaaaagccttacaaatgcaccgagtgcggaaaggccttcaactgtggctaccacctcactcagcacgaacggatccacaccggcgagaccccttacaagtgcaaagaatgtggtaaagcttttatttacgggagctccttggtcaagcatgaacgcattcacaccggcgtgaaaccatacggctgcacagagtgtggaaagtcattctcacacgggcaccaactgactcagcatcagaaaacacactccggagcaaaaagctacgagtgcaaagagtgcgggaaggcatgtaaccacctgaaccatctccgggaacaccagagaatccataacagttag

SEQ ID NO: 198995 - DNA, 297 bp, Artificial Sequence
  derived and/or modified sequence
atggcccagggcctggtgaccttcgccgacgtggccatcgacttctcgcaggaggagtgggcttgtctgaattctgctcagcgcgacctgtattgggacgtgatgcttgagaactatagcaatctggtttccctggatctcgaatccgcgtacgagaataaaagtctgcctaccgagaagaatattcacgagatcagagcctctaaacgaaactccgaccgacggagcaagtccttagggagaaattggatttgtgaaggtactctggagcggccacagaggtcccggggcagatag

SEQ ID NO: 198996 - DNA, 1392 bp, Artificial Sequence
  derived and/or modified sequence
atggcccagggcctggtgaccttcgccgacgtggccatcgacttcagccaagaagaatgggcttgtctgaactcagcccagcgcgacctgtactgggatgtgatgctagaaaactacagcaacctcgtgtcccttgatttagagtcagcctacgagaacaagagtctgcccaccgagaagaatatccatgagataagggcatcaaagagaaattccgacagacgcagtaagtcccttgggagaaactggatctgcgaaggcaccttggagcgcccccagagatctcgcggacggtacgtcaaccaaatgatcataaattatgtgaagcggccagcgactcgagagggtaccccccctaggacgcaccagaggcaccataaagagaattcgttcgagtgtaaggattgtggaaaggccttctcaaggggttatcagctctcacagcaccaaaaaatacatacgggcgaaaagccgtatgaatgcaaagaatgcaagaaagcatttagatgggggaatcagctcacccagcaccagaagatccatacaggcgagaaaccctatgagtgtaaagactgtgggaaggcctttagatggggtagtagcttagttattcacaagcgtatccacacgggggaaaagccctacgaatgcaaggactgcgggaaggccttccgcagaggagacgagctcacacaacaccagcgttttcacaccggagagaaagactacgagtgtaaggactgcgggaagaccttctcgcgcgtgtataagttaattcagcacaagaggattcatagcggagaaaagccctatgagtgcaaggactgtggaaaagcgttcatctgcggttcatcactgatacagcacaagcgaatccacacaggagagaaaccgtatgaatgccaagaatgcggtaaggcctttacacgcgtgaactacctgacgcagcaccagaaaatacatactggtgaaaaacctcacgaatgtaaggaatgtggtaaggcatttcggtgggggtcttccttggtgaagcatgaacgcattcataccggcgaaaagccatataagtgcaccgagtgcggaaaagcatttaactgcgggtatcatctgactcaacatgagcgaattcacacaggagagactccttataagtgtaaagagtgcggcaaggccttcatctacggttcgagcttggtcaagcatgagcgaattcacactggggtaaaaccctacggatgtacggaatgtggcaagtccttttcccatgggcaccagctcacacaacaccagaagacacatagtggtgctaagagctatgaatgtaaagagtgcgggaaggcttgtaatcatctgaatcaccttcgggagcaccaacggatccacaactcatag

SEQ ID NO: 198997 - DNA, 504 bp, Artificial Sequence
  derived and/or modified sequence
atggcccagggcctggtgaccttcgccgacgtggccatcgacttctcccaagaggaatgggcctgcctgaactcagcccagcgagatctgtactgggatgtcatgcttgaaaactatagcaatttagtgtctttagacctggaatcagcatatgagaacaaatcactgccaaccgagaaaaacatccatgagatccgggcatctaaacggaactctgaccgcagaagcaaatcgctcggtcgcaactggatttgcgagggaacattagaacgcccccaacggagccgcgggcgatatgtgaaccagatgataataaattacgtgaagaggccggctacgcgcgaagggacccctcctagaactcaccagcggcatcataaggaaaattcctttgaatgtaaggattgtgggaaggccttcagcagaggctaccagctgtcacagcatcagaaaatccacactggtgaaaaaccttatgagtgtaaggaatgtaagaaagcgtag

SEQ ID NO: 198998 - DNA, 303 bp, Artificial Sequence
  derived and/or modified sequence
atggcccagggcctggtgaccttcgccgacgtggccatcgacttcagccaggaggaatgggcttgcttgaattcggcacaacgcgacctgtattgggatgtcatgctggaaaattacagcaacctggtatcactggacctggagagtgcctacgagaataaaagcctacccactgaaaagaatattcatgagatccgggcttcgaaacgcaactctgaccggcgaagcaagagtttgggcagaaattggatttgcgagggtactttagaaagacctcagcggagcagaggacgatacgtgtag

SEQ ID NO: 198999 - DNA, 1392 bp, Artificial Sequence
  derived and/or modified sequence
atggcccagggcctcgttactttcgccgacgtcgccatcgacttctcgcaggaggaatgggcctgtctgaactcagcgcaaagagacctatattgggacgtcatgctggaaaactactccaatctcgttagtttggatctggagtcagcatacgagaacaaatcactgccgaccgagaagaacatccacgaaattcgcgcttctaagcggaattccgaccggcgttccaagtccttggggcgtaattggatatgtgaaggtaccctggagagacctcagagatcccggggtcgatacgtgaaccagatgatcattaattacgtgaaaagacccgcaacccgggaaggaacaccaccaaggactcaccaacggcaccacaaggaaaactcattcgaatgcaaggattgcggtaaagcattttcgagaggctaccagctttcccaacatcaaaagatccacaccggagagaaaccttatgagtgtaaagagtgcaagaaagcctttcgttggggcaaccagctgacccaacaccagaagattcacacaggggagaaaccttacgaatgtaaggattgcggcaaagcttttagatggggtagcagtctggttatccacaagcggatccatacaggagagaagccgtacgagtgcaaggattgcggcaaagcttttcgcagaggtgatgagttgacccagcaccagaggtttcacaccggagagaaggactatgagtgcaaggattgcgggaagacattctctagagtctataagctgatacagcacaaaagaatccactcaggcgagaagccatatgagtgcaaagattgtggcaaggcttttatctgtgggtcatctctcatacagcataagcgcatccacactggggaaaaaccatacgaatgccaggagtgcggcaaggcttttacaagggtgaattacctgacccaacaccagaagatacataccggcgaaaaaccccacgagtgcaaagagtgtggtaaggcattcagatggggctcttcactggtgaaacatgagagaatccacactggcgaaaaaccctataaatgcactgagtgtggaaaggcatttaattgcggctatcacctcacgcaacacgagagaattcatacaggcgagacgccatacaaatgtaaagaatgcggcaaggcgttcatctacggttcgtcactggttaagcacgagaggattcataccggtgtcaagccttatggctgcaccgaatgtgggaaaagttttagccatggccaccagctgacacagcaccaaaagacccatagcggagcaaaatcctacgaatgtaaggagtgcggcaaagcatgtaatcatttgaatcacctgcgcgagcaccagagaattcacaacagctag

SEQ ID NO: 199000 - DNA, 1392 bp, Artificial Sequence
  derived and/or modified sequence
atggcacagggtctcgtcactttcgcagacgtcgctatcgactttagccaggaggagtgggcctgtcttaatagcgcacagcgcgacctctattgggatgtgatgttggaaaactattcgaacctagtgagtctggacctggaatccgcctatgagaacaaatctctgcctacagaaaaaaatatccatgagattagagcaagtaaaaggaacagtgaccgacggagcaagagcttgggcaggaattggatctgcgagggaaccctcgaaagacctcagcgctcccgcggaagatatgtgaaccagatgataattaattacgtaaagcgccctgcaacacgcgagggtacacctcccagaacccaccaacggcaccataaggagaactctttcgagtgtaaggattgtggcaaggcgtttagtagaggatatcagttatctcaacaccaaaagatccatacaggcgagaagccttacgaatgcaaggagtgcaaaaaagccttcaggtgggggaaccagctgacccagcaccagaaaatccatactggagaaaaaccctacgagtgcaaggactgtggcaaggcctttaggtggggtagttctttggtgattcacaagcgcatccacaccggtgaaaaaccatacgagtgcaaggactgcggcaaagccttccgcaggggggatgagctcactcaacaccagcgattccataccggagaaaaggattatgaatgcaaggattgcgggaaaactttctctagagtgtataagctgattcagcataaacggatccacagcggcgaaaaaccatacgagtgcaaagattgtggaaaggctttcatatgtggatccagcctgattcagcataaacgcattcacaccggtgaaaagccttatgagtgccaagagtgtggaaaggcattcacacgtgtgaattatctgacccagcatcagaagattcataccggggagaaacctcacgagtgcaaagagtgcggtaaggccttccgctggggctcctctctggtcaaacacgagaggatccacacaggtgagaagccctataaatgtacagagtgcggcaaggcctttaactgtggctatcacttgacgcaacatgagagaatccacactggcgaaaccccatacaaatgtaaggagtgcgggaaagctttcatttatggctcctctctggtcaaacacgaaagaatccataccggggtcaaaccgtatggctgcactgagtgcgggaagagcttttctcacggccaccaacttacccagcatcagaagacccacagtggcgcaaaatcatacgaatgcaaagagtgcggcaaagcttgtaaccaccttaaccacctgagggagcaccagaggatccacaacagctag

SEQ ID NO: 199001 - DNA, 1392 bp, Artificial Sequence
  derived and/or modified sequence
atggctcaggggctggtcactttcgctgacgtggctattgacttctcccaagaggaatgggcctgcctgaacagtgcgcagcgggacctgtattgggacgttatgcttgaaaattactccaacctggtgtcactggacttggagagcgcctatgagaataaaagcttgcctactgagaagaacatccatgaaatacgggcttctaaacgtaatagtgaccggagatcaaagagcttggggaggaattggatttgtgagggcaccttggagcggccacagcgctctcggggtaggtatgtgaaccagatgatcattaattacgtgaagagacccgctactagagaggggacaccccctcgcacccaccagcggcatcacaaggagaacagctttgaatgcaaggactgcggcaaggccttcagccgtggataccagctgtcacagcaccagaaaatccacactggcgaaaagccgtatgagtgtaaggagtgcaagaaggccttccggtgggggaaccaattgacccagcatcagaagatccacacaggtgaaaagccttatgagtgcaaagattgtgggaaagcctttcggtggggatcctccctggtgatacataaacgtatacatactggtgaaaaaccttacgagtgcaaggactgtgggaaggctttccgcaggggcgacgaactgacacagcaccagcgcttccacacaggcgaaaaagattacgagtgtaaagattgtggaaaaacattttctcgtgtatataagctcatacagcacaaaaggatccacagcggggagaagccatatgagtgtaaagactgtgggaaggcttttatttgcggtagcagcttaatccagcacaagaggatccacacaggagaaaaaccttatgagtgtcaggagtgcggaaaagctttcacccgcgtcaattacctcacacagcaccagaaaatccacacaggggagaaaccacatgagtgtaaggagtgcggcaaggcattccgctggggcagctcccttgtcaaacatgaacgaattcatacgggcgagaaaccatataagtgcacagagtgtgggaaagcctttaattgtggctatcatcttacccaacacgaaagaattcacactggagagacaccgtacaagtgcaaagaatgcggaaaggcattcatctacgggagttcactggttaagcacgagcgcattcacacgggcgtcaaaccctacgggtgtacagagtgtggaaaatctttctcacacggccaccagctgactcagcatcagaaaacccacagtggcgctaaatcatatgagtgcaaggaatgtggtaaggcctgcaaccacctaaatcaccttagagagcatcaaagaatccataactcgtag

SEQ ID NO: 199002 - DNA, 192 bp, Artificial Sequence
  derived and/or modified sequence
atggcccagggactggttacattcgcagacgttgcaattgacttttcccaggaagaatgggcatgtcttaattccgctcagcgcgatttatactgggacgtcatgctggaaaactactccaatctggttagcctcgacctcgagtctgcttacgagaacaaatccctaccgactgagaagaacattcactag

SEQ ID NO: 199003 - DNA, 258 bp, Artificial Sequence
  derived and/or modified sequence
atggcacagggactggtgacctttgccgacgtggccattgacttctctcaggaggagtgggcttgtctcaactccgcacaacgggatctgtactgggacgtgatgctcgaaaactacagcaatcttgtgagtctggacctggagtccgcgtacgagaacaaatccttgcctaccgaaaaaaacatccacgagatcagagcttctaaaaggaattccgaccgcaggagtaaatcgctgggccgaaactggatttgctag

SEQ ID NO: 199004 - DNA, 201 bp, Artificial Sequence
  derived and/or modified sequence
atggcacaaggacttgttacgtttgccgacgtggctattgatttttcgcaagaggagtgggcctgcttgaactctgcacagcgcgacctgtattgggatgtgatgctggaaaattatagcaacttggtatccttggacctggagtcggcttatgaaaacaagagtctgcccacagagaagaatattcacgaaatcaggtag

SEQ ID NO: 199005 - DNA, 195 bp, Artificial Sequence
  derived and/or modified sequence
atggcccaaggattggtgacgtttgcagatgtagctatcgatttttcgcaggaggagtgggcctgccttaatagcgctcagagagacctttactgggatgtaatgttagaaaattatagcaatctggtgtcgctcgatctggaaagtgcatatgaaaacaagtccttaccaaccgagaaaaacatccatgagtag

SEQ ID NO: 199006 - DNA, 534 bp, Artificial Sequence
  derived and/or modified sequence
atggcacagggtttggtcacattcgccgacgttgctattgatttctcccaagaggaatgggcatgcctgaactccgcccagagagacctgtattgggatgttatgctcgaaaattattctaacttggtaagcctggacctggagtccgcctacgagaacaagtctttgcctactgaaaagaacatccatgaaattcgagcaagcaagaggaattctgacaggcggtcgaagagcctaggacggaactggatctgtgagggtacacttgagcgccctcagcgcagccgcggtcgttacgtcaatcagatgatcataaactatgtgaaacgcccagctacgcgagaaggcaccccacctagaacccatcaaagacaccataaagagaacagctttgagtgtaaagactgcggtaaagcatttagccgcggataccagctttcccagcaccagaaaatccacacaggcgagaaaccatacgaatgcaaggaatgtaagaaggccttcagatggggcaatcagctgacacaacattag

SEQ ID NO: 199007 - DNA, 264 bp, Artificial Sequence
  derived and/or modified sequence
atggcccaaggccttgttacgtttgcagatgtggctatcgactttagccaagaggagtgggcctgcctgaactcggctcagcgcgatctttattgggatgtgatgttggagaattactctaaccttgttagtttggatttggaatccgcctatgagaacaagagtctgcctaccgagaagaacattcatgagattcgcgcttccaaacgaaattctgaccgccgaagtaagtcccttggccgtaactggatttgcgaaggatag

SEQ ID NO: 199008 - DNA, 144 bp, Artificial Sequence
  derived and/or modified sequence
atggcacaggggcttgtgacattcgcagacgttgctatcgactttagccaggaggaatgggcctgtttaaactctgctcagcgggacctttattgggatgtaatgttagagaactactccaatcttgtatcgcttgatttatag

SEQ ID NO: 199009 - DNA, 1392 bp, Artificial Sequence
  derived and/or modified sequence
atggcacagggacttgtaacttttgccgacgtggctatcgacttctcacaagaagaatgggcctgtctcaacagcgcccaacgcgacctgtactgggatgtgatgttagagaattactctaacctggtgtccctggacctggagagtgcctatgagaacaaaagtttgccaacagagaaaaacatacacgaaattcgggctagtaagcggaactcagatcgcaggagtaagagtcttgggaggaattggatctgcgaagggaccctcgaacggcctcaaagatcccgaggacggtacgtcaaccaaatgatcattaactatgtgaaacggccagcaactagagagggcacacctcccaggactcaccaacgccatcataaagagaattccttcgagtgcaaagattgtggcaaggccttcagtagggggtaccagctatctcagcatcaaaaaattcacactggggagaagccctacgagtgtaaagagtgtaagaaggctttcagatgggggaaccagctgacccagcaccaaaagatccatactggcgagaaaccatatgaatgcaaagactgcggaaaggccttcaggtggggatcatccttggtgatacataaaagaatccacacgggagagaaaccctacgagtgcaaagactgtgggaaggcatttagacgcggagatgagctgacccagcatcaaaggttccacaccggggagaaggattacgagtgcaaagactgcgggaagaccttctccagggtttataagctcattcagcacaaaaggatccatagcggcgaaaagccctacgagtgtaaggattgtggcaaagcgtttatttgtggctcctccctaattcaacacaaacgtatacataccggggagaagccctacgaatgccaggagtgtggcaaggcctttacccgagttaattatctaacacaacatcagaagattcacacaggggaaaaaccacatgagtgtaaggaatgcggaaaagccttccgttgggggtccagtctggttaagcacgagcggatccatacaggcgagaagccatacaagtgtacagaatgtggaaaggcattcaactgcggttaccatctcacgcagcatgagcggatccacactggcgaaaccccctataaatgcaaggagtgcggcaaagcttttatttacggaagctcactggttaaacatgagcgaatccatacgggggtaaaaccctacggctgcacagagtgtggtaagagtttttcccacggccatcagctcacacagcatcaaaagacacactccggagccaagagttatgagtgtaaagagtgtggtaaagcctgtaatcatttgaatcatctgcgcgagcatcagcgcattcacaatagctag

SEQ ID NO: 199010 - DNA, 318 bp, Artificial Sequence
  derived and/or modified sequence
atggcccaggggctagtgacgtttgccgacgttgctattgatttctcacaagaggaatgggcctgcctgaatagcgcacagagggatctttactgggatgttatgttggaaaactactcaaatctggtgtccctcgatctggagtctgcatacgaaaacaagagtctcccaacagaaaaaaatattcacgagatacgcgcatcgaagagaaacagcgatagaagaagcaagtccctgggaaggaactggatctgcgaggggacactcgagaggccacaacggagtcgaggcaggtacgtgaaccagatgatcatttag

SEQ ID NO: 199011 - DNA, 1392 bp, Artificial Sequence
  derived and/or modified sequence
atggcccaagggttagttacctttgccgatgtggccatcgacttcagccaagaagagtgggcatgcctgaatagcgctcagagagacctgtactgggacgtaatgctggaaaactattctaacctggtcagcctcgatcttgaaagcgcctacgaaaataagagcctgccaacagagaagaacatccatgaaattcgagcaagcaagaggaacagcgataggcgatctaagtcattgggcagaaactggatttgtgaagggacactggagcgccctcagcgctcgcggggacgctatgtgaaccaaatgattattaactacgttaagcgccctgccacacgggaagggacccctccaaggacccatcagcgacatcataaagagaacagttttgagtgcaaggactgtggcaaggcgttttctagaggttatcagctcagccaacaccaaaaaatccatacaggagaaaaaccctatgagtgcaaagagtgtaagaaggcatttaggtgggggaatcagttaacacagcatcaaaaaatccatacaggtgagaaaccctacgagtgtaaggactgtggaaaagcctttagatgggggtcaagtttggtgatacataagcggattcacacaggagagaagccctacgaatgcaaggattgtgggaaggcatttcggagaggcgatgaactaactcagcaccagcgttttcacacaggtgaaaaggactatgaatgcaaagactgtgggaaaaccttcagtcgagtgtacaaattaatccagcacaaacgcatccactccggcgagaaaccctacgaatgtaaagactgcggaaaagcctttatatgtggcagttccctgatccagcacaaacggattcatacgggcgagaagccttatgagtgccaagagtgcggaaaggcttttacaagggtcaactacctgactcaacaccagaaaatccataccggggaaaagccacacgagtgcaaggagtgcggaaaggctttccgatggggatccagcctggtcaagcacgaacgaatccacacaggggagaaaccatataagtgtactgagtgtggaaaagcgttcaattgcggttaccaccttacccagcatgaacgcattcacacaggggagacgccctacaagtgcaaagagtgcggaaaggcattcatatacggcagcagtctcgtcaagcatgagagaatccataccggggtcaagccttatggctgcaccgagtgcggtaagagtttcagccacgggcatcagctgacgcagcatcagaagacacattcaggggctaagagttacgagtgtaaagagtgcggcaaagcctgcaaccacctgaaccacctgagggagcaccaaagaatacacaactcatag

SEQ ID NO: 199012 - DNA, 1392 bp, Artificial Sequence
  derived and/or modified sequence
atggctcagggccttgtgacattcgcagacgtagcgatcgatttctcacaggaagaatgggcatgccttaattctgcccagagggacctgtactgggatgtgatgttagaaaactatagcaatctggtgagcctcgacctggaatcagcctatgaaaacaagagcctccctacagaaaaaaacattcacgaaattcgagcttccaaacgcaattctgaccggaggagtaaaagcctgggcaggaattggatctgtgagggaacgttagaacggcctcagaggtctaggggacggtacgtcaaccagatgattataaactatgtaaagcgacccgcaacaagagagggcactcccccacggacacaccagagacaccacaaagagaatagcttcgagtgcaaagactgtggtaaagctttctccagaggctaccagcttagtcagcatcaaaagatacacaccggtgagaagccatatgaatgcaaggagtgcaaaaaggcttttcgctggggtaaccagctcacacaacaccaaaagatccacaccggagagaagccatacgaatgtaaggactgcggaaaagcgttccgctggggaagctctctggtcatccataaacgcattcacacaggtgagaaaccatatgagtgtaaggactgtggcaaggccttccggagaggcgatgaacttactcagcaccagagattccacacgggtgagaaggactacgaatgcaaggactgtggcaagaccttctctcgcgtctacaagctgatacagcacaagcgtatacattcaggagagaaaccctacgagtgtaaagattgtggcaaggcattcatttgcggatccagtttgattcagcacaagcgtatacatacaggtgagaaaccgtacgaatgccaagaatgtggcaaagcttttaccagggttaattacctgacacaacaccagaaaatccatacaggggaaaaaccccatgagtgcaaagaatgcggcaaagcgttccgctggggctccagtcttgttaagcacgaaaggattcataccggtgagaagccgtataagtgtactgagtgtggtaaagccttcaactgtgggtatcaccttacccagcatgagagaatccacacaggtgagacaccatacaaatgcaaggagtgcggaaaagcgtttatctacggctccagccttgttaagcatgaacgcatccacacgggggtgaaaccgtatggctgcacagagtgcgggaagtcgttttcccatggccatcagttgacccagcaccagaaaactcacagtggcgctaaatcctatgaatgcaaggagtgtggaaaggcttgcaatcatctgaaccatctccgggagcaccagagaatccataatagctag

SEQ ID NO: 199013 - DNA, 297 bp, Artificial Sequence
  derived and/or modified sequence
atggcgcagggactggtaacatttgcagatgtcgccatcgacttttctcaggaagagtgggcttgcctgaacagcgctcagcgcgatctctattgggatgtgatgctggaaaactactctaatttagtttccctagatcttgagagtgcctacgagaataaaagcttgcctaccgagaaaaacatccacgagatacgtgcaagtaaaagaaacagcgatagaaggtccaaaagcctggggagaaactggatctgtgaaggtactcttgagagaccccagaggtcaagaggccgatag

SEQ ID NO: 199014 - DNA, 1392 bp, Artificial Sequence
  derived and/or modified sequence
atggcacaaggtctagtgaccttcgctgatgtggctattgatttttcccaagaggagtgggcttgtctgaatagcgctcagagagatttatactgggacgttatgctggagaattactccaatctagtctcactcgacctggagtcagcgtacgagaataagagcctgcctaccgagaagaacatccacgagattcgagcctccaagcgtaactctgataggagaagcaagtctctgggccgtaattggatctgtgaggggaccttggagagacctcagaggtcacggggtcggtatgtcaatcagatgattatcaattacgttaagcgcccagccacaagagagggcacaccccctaggacccatcaacggcaccacaaagagaacagttttgagtgtaaggactgtggaaaggctttctcacggggatatcaactctcacaacatcagaagattcacactggtgaaaagccctatgaatgcaaggagtgcaagaaagcgtttcgatggggcaaccagctcacgcaacatcagaagattcacaccggagagaagccttacgaatgcaaggattgcggaaaggcttttaggtggggaagttcactggtgattcacaaaagaattcacacaggcgaaaaaccgtacgagtgcaaggattgcggaaaagccttcaggcgcggagacgaactgacacagcatcagcggttccacacgggagaaaaggattacgaatgtaaagattgtggtaaaaccttctcccgggtgtacaagcttattcagcataaacgcattcactctggggagaaaccctatgaatgtaaggactgcgggaaggccttcatatgcggctcctcgctgattcagcacaagagaatccacacaggggaaaaaccatacgaatgtcaggaatgcggaaaggccttcacccgtgtgaattacctgacacaacaccagaagatccacacgggcgaaaagcctcatgagtgcaaagaatgcggcaaagcgtttcgttggggcagttcccttgtgaaacacgaaagaatccacactggcgagaagccctataagtgtactgaatgcggtaaagccttcaactgcgggtaccaccttacccagcacgagagaatacataccggtgaaaccccctacaagtgcaaagagtgcggtaaggccttcatctacggctcgtcgctggttaagcacgagagaattcacactggtgtaaagccatacggatgtactgagtgcggaaaatcattctcccacgggcatcagctcacccaacatcagaagactcacagcggggctaaaagttatgagtgcaaggagtgtggaaaggcttgtaatcatctaaaccatctgcgcgagcatcagagaattcacaactcttag

SEQ ID NO: 199015 - DNA, 504 bp, Artificial Sequence
  derived and/or modified sequence
atggcacaaggtctcgtgacctttgcggacgtggcaatagattttagtcaagaagaatgggcttgcctgaattctgcccagagggatctttactgggacgttatgctcgaaaattattcgaatcttgtttcacttgatctcgagtctgcctatgaaaacaaaagtttgcctactgagaaaaacattcatgagatccgcgcttccaaaagaaattcagatcgacggagcaagagcctgggaagaaattggatatgtgaagggaccctggaacgaccccagaggtcgagaggaaggtacgtcaaccagatgattattaactacgtcaaaaggccggctacaagagaagggactcccccacggacacatcagaggcaccataaggagaatagctttgagtgcaaggactgtggtaaagctttcagtcggggttaccaactctcccagcatcagaaaatccatactggcgaaaaaccgtatgaatgcaaagaatgtaagaaggcttag

SEQ ID NO: 199016 - DNA, 303 bp, Artificial Sequence
  derived and/or modified sequence
atggctcagggtcttgtgaccttcgcggacgttgccatcgatttttcacaggaggaatgggcctgtcttaactcagcccagcgagatctttattgggacgtgatgctggagaattattctaacttggtgtctctcgacctggagtccgcttatgagaacaaaagcctgcccaccgaaaagaacatccacgagatccgcgctagtaagagaaactccgacagacggagtaagtctctagggagaaattggatctgtgagggcacactggagcggcctcaaaggagtaggggcagatacgtttag

SEQ ID NO: 199017 - DNA, 5042 bp, Artificial Sequence
  derived and/or modified sequence
ggggcacagtccaatgaggagcgagccgggtggccggctgaggggcgtgcttcatgctcgcgggatttttaaaaatggtttctcctggatcttatcccaactgcgcctgagaccttgtttcacctcctgatgtgctgggtgtggttaggcctcgagccgggagctatttgcctcccaggaggaagccagggcagggttccgcggggaatggcggtgagggagccactcgggacgcggaggccctaaaatgaagaagcttcggcctgaggcttcgggagcggcgagcagggaagtgggagtgtgtgtgagtgtgtgtgtgtgtgtgtgtgtgtgtgtgtgaataagccagaggctgcctggtggggccccgccgtggcccagtgactgagataattgtcttcgtctgtggggtaatgcgaacaagccccgttcccctaagccgtgatgcatgcggggttgacgcggccgggctctgtccccataaactgtgacacaggtgtgtgtagacgtctatgagggccatagcgccgggctgtaagggcatctgtaggggtgacgcagccgggctgtgtctctgcacctccgttctgtgcgaggtcaatgctggtggggtctgcagaggtggcacggccaggacgggtctccgtgtctctgaaatgtgcctttgcacttctgtcaggttgacagggacaggcagtgtccctctggtgtgagcgtctgtgggtgtgaaagggccagcgagtgtgcggctgtgactggtcgggatcgggcctgggtgcatggccttttgagtgagcacaggtgtgtgcgaccatgtcacctgtctttctagtgtctccgttgcttcctgtgccttggccttccagccatgtggtacctgctagggagcagtggtcccaaagtgacgtgagaggctctacgctattgtgaaaatgaccaagaagaaggcttcacaagtcacgagatggcagttttggagccagaagtgctctccgtgcacactacctggacgacaagaggaagtaacctcaagaatagaattccttttggggaagaaagagctggccttcaggaaaagcatcccggaggaggaagaagaagtgttatatgtcctaaagtaaggtttcaggccagcatccttcagaaaaagcatccccgaggaggaagacgaatcgttaaacatctgaaagggtcaggccagcatccttcagaaaaagcatccccgaggaggaagacgaatcgttaaacatcttaggtcagctctagcctctcggaatttgtcttcttcagtggaaaccccgagaagactgatcagttcttcagttctaaaacaatggcccagggtttggtgacgttcgccgacgtagccatagacttttctcaggaggagtgggcctgtctgaactctgctcagagggacctgtactgggacgtgatgctggagaactacagtaacttggtctcactggatttggagtcagcatatgaaaataagagtttacctacagaaaaaaacattcatgaaataagggcttccaaaaggaattcagatagaagaagtaaatcccttggccgtaactggatatgtgaaggtacgcttgaaagaccacagcgctccagagggaggtatgtcaatcagatgatcatcaattatgtcaaaagacctgctactagagaaggcacccctcctagaacacatcagagacatcataaggagaattcctttgaatgtaaggactgtgggaaggcctttagtcgtggctatcaacttagtcaacatcagaaaatccatactggtgagaaaccttatgaatgtaaagaatgtaagaaggccttccgttggggcaatcagcttactcaacatcaaaaaattcatactggggagaagccctacgaatgtaaagactgtgggaaggcttttcgatggggctcaagcctcgttattcataagaggattcatactggtgaaaaaccctatgaatgtaaagactgtggaaaggcctttcggcgtggtgatgagctcactcagcaccagagattccacactggggagaaagactacgaatgcaaagactgtgggaagacctttagccgtgtgtataaacttattcagcacaagagaattcatagtggggagaagccttacgagtgtaaagactgtgggaaggcttttatttgtggttcaagcctcattcagcataaaagaattcacacaggtgagaaaccctatgaatgtcaagaatgtgggaaggcctttactcgagtcaattaccttactcagcatcagaagatccacaccggtgagaagcctcacgaatgtaaggagtgtgggaaggcctttcgctggggttcgagcctcgttaagcacgagaggatacatacgggcgagaagccgtacaagtgcacagaatgtgggaaggccttcaattgtggctatcacctcactcagcacgagagaatccacacaggcgaaaccccgtataaatgtaaggagtgtgggaaggctttcatttatggatcgagcctcgtgaaacatgagagaattcataccggggtgaaaccctatgggtgtacagaatgtgggaagagctttagtcacggccatcagcttacacaacatcagaaaacgcacagtggggcgaaatcctacgaatgtaaggagtgcgggaaggcatgtaaccacctaaaccatctccgagaacatcagaggatccacaacagttgaagagccttttgaacgcagtagcccgctcgtatctatggtttcgctttccacagtttgttacctgcagtcaactgcagttcaaaaatattaaatggaaaattccagaaataaagaattttaagtctcaaatggtgtgcccttctgagtagcgtgatgaaatctctcgctgtccggctccagccggccggggatgtgagtcatcccttggtccagcacatccacgctgtatacgccacccaccctgctagtgacttagtagccgtcttggtgatcagatcaactatcccagcatcacagtgcctgtgcccaagcagtcctcactttgcttaacagtggccccagagagcaggagtagtgatgctggtgattcggatatgccaaagagaagccacaaagtgcttccttttaaatgaaaaggtgaaagttctcaacttaaaaaagaaaagaaaaaaatcatatactgaggttgctaagatctacatgacaataagatattttgggagagagatacgttcacataattttattacatatattgttacaattgttctattttgttagttactgttggtaatctcttactgtgcctaatttataaattaaactttagatatgtatgtacaggaaaaaatgtagtatatagtatcgtatatatgtacaggaaaaaaacgtactatctgtggtttcaggtgtccactgcgggtcttcaaacgtacccccctcaggtgagaggggactgctgtacaaagaatataggaaggcctctagactacatccattccttcctcaacaggaggaaaattcctggtacagtttaacgtaaggcttcactgatcactgttgtttttgtttttgtttttgtttttttgagacagagtctcactcttgcccaggctggagtgcagtggcacggtcttggctcactgcaacctccacctcccaggttccagcaattctcctgcctcagcctccccagtagctgggattacagacatgcaccaccacacctggctaatttttgtatttttagtagagacagttttcaccatgttgtccaggctggtctcaactcctgacctcaggtgatccacccaccttgccctcccaaagtgctaggattacaggcgtgagccactgcacctagcccactgatcactcttctgcttacagaatatcagaagtcattctagaggcaaatttgaagagtggaaaaatcactttttctgaatgatcttgtttttggtgtagatgtttttattgtgtgggttagtttaatgaatacataaagactaccagtaccattctgtctttactccgtggcatctgtggaataaccctgctaatgtaacacgtgagaaagcctttggtcatgccacccactctaccagttgtccccaccatcccccgccctcctccctgtgagacactgggccaaaggctcactacccctgtgcgttgtccagcacacagacactatgtgcattatttgtacataaggataatcacatctacctgagactgctatcatggaaattaaatgtttggtacatgtaaagtctttgaaagtgtaactggaatattgtgtaattttaataaataataactattgttgtttttatgatcattactaccatttgtgttgccattagtgaatttttacaagaaaactccctgtgggtgcaatgagtctggaaaagaccattgagtcttctagaagaaaacattaagagattattggcacagccgtgggttacgcaatgatttcttagtacacaaaacacagcaaacataaaaagttgttacacttcatcaaaagtacaaagttctgttcatcaaatgatgctgttaagatagggaaaagacaagaaacaggactggaagaagatgtttgctctaaggtacacctgacaaaggaactctcatagaaaatataaagaatccctcaagttgaaaaaaaaatcaatttaaaggggagaaaacttcagcacgtctcaacagaagaccaccaaatggccaataagtaagtgaaaatgtattcaatgtcattgctcctcaaggaactgtagagtaaaaccacaatgtgctgtcactctagacagtcaccaggatgattaaatttaaatcacaataacaaggctgatttcagatgtctcaccacaaagaaggaggataagggagcgaggtgatggatatgttaattagcttgatttaatccttccacattgtatacatgtatcagaacatcacattgtactccatcaatataatacaattattatttgtcaatcaaatattaataaaatcaaagatgagcagg

SEQ ID NO: 199018 - DNA, 2248 bp, Artificial Sequence
  derived and/or modified sequence
gcggccgctgggtgcgcgtgcgcatgcgcgctggcctccagggggtggcgggaccgagtgtgtgacgcacttgcgtgggagtacgaggctgacgcggcggccctgtccccgtaactgtgacacgggtgcacgcgagcgtcattgggggcgatgggggccgtgctgggtgcgcgtttgcaccagtgacgcagccgctgcatctccgccagtccgcgcaggccagcatccttcagaaaaagcatccccgaggaggaagacgaatcgttaaacatctgaaagggtcaggccagcatccttcagaaaaagcatccccgaggaggaagacgaatcgttaaacatcttaggtcagctctagcctctcggaatttgtcttcttcagtggaaaccccgagaagactgatcagttcttcagttctaaaacaatggcccagggtttggtgacgttcgccgacgtagccatagacttttctcaggaggagtgggcctgtctgaactctgctcagagggacctgtactgggacgtgatgctggagaactacagtaacttggtctcactggatttggagtcagcatatgaaaataagagtttacctacagaaaaaaacattcatgaaataagggcttccaaaaggaattcagatagaagaagtaaatcccttggccgtaactggatatgtgaaggtacgcttgaaagaccacagcgctccagagggaggtatgtcaatcagatgatcatcaattatgtcaaaagacctgctactagagaaggcacccctcctagaacacatcagagacatcataaggagaattcctttgaatgtaaggactgtgggaaggcctttagtcgtggctatcaacttagtcaacatcagaaaatccatactggtgagaaaccttatgaatgtaaagaatgtaagaaggccttccgttggggcaatcagcttactcaacatcaaaaaattcatactggggagaagccctacgaatgtaaagactgtgggaaggcttttcgatggggctcaagcctcgttattcataagaggattcatactggtgaaaaaccctatgaatgtaaagactgtggaaaggcctttcggcgtggtgatgagctcactcagcaccagagattccacactggggagaaagactacgaatgcaaagactgtgggaagacctttagccgtgtgtataaacttattcagcacaagagaattcatagtggggagaagccttacgagtgtaaagactgtgggaaggcttttatttgtggttcaagcctcattcagcataaaagaattcacacaggtgagaaaccctatgaatgtcaagaatgtgggaaggcctttactcgagtcaattaccttactcagcatcagaagatccacaccggtgagaagcctcacgaatgtaaggagtgtgggaaggcctttcgctggggttcgagcctcgttaagcacgagaggatacatacgggcgagaagccgtacaagtgcacagaatgtgggaaggccttcaattgtggctatcacctcactcagcacgagagaatccacacaggcgaaaccccgtataaatgtaaggagtgtgggaaggctttcatttatggatcgagcctcgtgaaacatgagagaattcataccggggtgaaaccctatgggtgtacagaatgtgggaagagctttagtcacggccatcagcttacacaacatcagaaaacgcacagtggggcgaaatcctacgaatgtaaggagtgcgggaaggcatgtaaccacctaaaccatctccgagaacatcagaggatccacaacagttgaagagccttttgaacgcagtagcccgctcgtatctatggtttcgctttccacagtttgttacctgcagtcaactgcagttcaaaaatattaaatggaaaattccagaaataaagaattttaagtctcaaatggtgtgcccttctgagtagcgtgatgaaatctctcgctgtccggctccagccggccggggatgtgagtcatcccttggtccagcacatccacgctgtatacgccacccaccctgctagtgacttagtagccgtcttggtgatcagatcaactatcccagcatcacagtgcctgtgcccaagcagtcctcactttgcttaacagtggccccagagagcaggagtagtgatgctggtgattcggatatgccaaagagaagccacaaagtgcttccttttaaatgaaaaggtgaaagttctcaactt

SEQ ID NO: 199019 - DNA, 3817 bp, Artificial Sequence
  derived and/or modified sequence
gttttaccagtgaggaaactttaccacactgtgaactctagcctctcggaatttgtcttcttcagtggaaaccccgagaagactgatcagttcttcagttctaaaacaatggcccagggtttggtgacgttcgccgacgtagccatagacttttctcaggaggagtgggcctgtctgaactctgctcagagggacctgtactgggacgtgatgctggagaactacagtaacttggtctcactggatttggagtcagcatatgaaaataagagtttacctacagaaaaaaacattcatgaaataagggcttccaaaaggaattcagatagaagaagtaaatcccttggccgtaactggatatgtgaaggtacgcttgaaagaccacagcgctccagagggaggtatgtcaatcagatgatcatcaattatgtcaaaagacctgctactagagaaggcacccctcctagaacacatcagagacatcataaggagaattcctttgaatgtaaggactgtgggaaggcctttagtcgtggctatcaacttagtcaacatcagaaaatccatactggtgagaaaccttatgaatgtaaagaatgtaagaaggccttccgttggggcaatcagcttactcaacatcaaaaaattcatactggggagaagccctacgaatgtaaagactgtgggaaggcttttcgatggggctcaagcctcgttattcataagaggattcatactggtgaaaaaccctatgaatgtaaagactgtggaaaggcctttcggcgtggtgatgagctcactcagcaccagagattccacactggggagaaagactacgaatgcaaagactgtgggaagacctttagccgtgtgtataaacttattcagcacaagagaattcatagtggggagaagccttacgagtgtaaagactgtgggaaggcttttatttgtggttcaagcctcattcagcataaaagaattcacacaggtgagaaaccctatgaatgtcaagaatgtgggaaggcctttactcgagtcaattaccttactcagcatcagaagatccacaccggtgagaagcctcacgaatgtaaggagtgtgggaaggcctttcgctggggttcgagcctcgttaagcacgagaggatacatacgggcgagaagccgtacaagtgcacagaatgtgggaaggccttcaattgtggctatcacctcactcagcacgagagaatccacacaggcgaaaccccgtataaatgtaaggagtgtgggaaggctttcatttatggatcgagcctcgtgaaacatgagagaattcataccggggtgaaaccctatgggtgtacagaatgtgggaagagctttagtcacggccatcagcttacacaacatcagaaaacgcacagtggggcgaaatcctacgaatgtaaggagtgcgggaaggcatgtaaccacctaaaccatctccgagaacatcagaggatccacaacagttgaagagccttttgaacgcagtagcccgctcgtatctatggtttcgctttccacagtttgttacctgcagtcaactgcagttcaaaaatattaaatggaaaattccagaaataaagaattttaagtctcaaatggtgtgcccttctgagtagcgtgatgaaatctctcgctgtccggctccagccggccggggatgtgagtcatcccttggtccagcacatccacgctgtatacgccacccaccctgctagtgacttagtagccgtcttggtgatcagatcaactatcccagcatcacagtgcctgtgcccaagcagtcctcactttgcttaacagtggccccagagagcaggagtagtgatgctggtgattcggatatgccaaagagaagccacaaagtgcttccttttaaatgaaaaggtgaaagttctcaacttaaaaaagaaaagaaaaaaatcatatactgaggttgctaagatctacatgacaataagatattttgggagagagatacgttcacataattttattacatatattgttacaattgttctattttgttagttactgttggtaatctcttactgtgcctaatttataaattaaactttagatatgtatgtacaggaaaaaatgtagtatatagtatcgtatatatgtacaggaaaaaaacgtactatctgtggtttcaggtgtccactgcgggtcttcaaacgtacccccctcaggtgagaggggactgctgtacaaagaatataggaaggcctctagactacatccattccttcctcaacaggaggaaaattcctggtacagtttaacgtaaggcttcactgatcactgttgtttttgtttttgtttttgtttttttgagacagagtctcactcttgcccaggctggagtgcagtggcacggtcttggctcactgcaacctccacctcccaggttccagcaattctcctgcctcagcctccccagtagctgggattacagacatgcaccaccacacctggctaatttttgtatttttagtagagacagttttcaccatgttgtccaggctggtctcaactcctgacctcaggtgatccacccaccttgccctcccaaagtgctaggattacaggcgtgagccactgcacctagcccactgatcactcttctgcttacagaatatcagaagtcattctagaggcaaatttgaagagtggaaaaatcactttttctgaatgatcttgtttttggtgtagatgtttttattgtgtgggttagtttaatgaatacataaagactaccagtaccattctgtctttactccgtggcatctgtggaataaccctgctaatgtaacacgtgagaaagcctttggtcatgccacccactctaccagttgtccccaccatcccccgccctcctccctgtgagacactgggccaaaggctcactacccctgtgcgttgtccagcacacagacactatgtgcattatttgtacataaggataatcacatctacctgagactgctatcatggaaattaaatgtttggtacatgtaaagtctttgaaagtgtaactggaatattgtgtaattttaataaataataactattgttgtttttatgatcattactaccatttgtgttgccattagtgaatttttacaagaaaactccctgtgggtgcaatgagtctggaaaagaccattgagtcttctagaagaaaacattaagagattattggcacagccgtgggttacgcaatgatttcttagtacacaaaacacagcaaacataaaaagttgttacacttcatcaaaagtacaaagttctgttcatcaaatgatgctgttaagatagggaaaagacaagaaacaggactggaagaagatgtttgctctaaggtacacctgacaaaggaactctcatagaaaatataaagaatccctcaagttgaaaaaaaaatcaatttaaaggggagaaaacttcagcacgtctcaacagaagaccaccaaatggccaataagtaagtgaaaatgtattcaatgtcattgctcctcaaggaactgtagagtaaaaccacaatgtgctgtcactctagacagtcaccaggatgattaaatttaaatcacaataacaaggctgatttcagatgtctcaccacaaagaaggaggataagggagcgaggtgatggatatgttaattagcttgatttaatccttccacattgtatacatgtatcagaacatcacattgtactccatcaatataatacaattattatttgtcaatcaaatattaataaaatcaaagatgagcagg

SEQ ID NO: 199020 - DNA, 670 bp, Artificial Sequence
  derived and/or modified sequence
gtcacctgtctttctagtgtctccgttgcttcctgtgccttggccttccagccatgtggtacctgctagggagcagtggtcccaaagtgacgtgagaggctctacgctattgtgaaaatgaccaagaagaaggcttcacaagtcacgagatggcagttttggagccagaagtgctctccgtgcacactacctggacgacaagaggaagtaacctcaagaatagaattccttttggggaagaaagaggccagcatccttcagaaaaagcatccccgaggaggaagacgaatcgttaaacatctgaaagggtcaggccagcatccttcagaaaaagcatccccgaggaggaagacgaatcgttaaacatcttaggtcagctttaccagtgaggaaaccgacactgtgagctctagcctctcggaatttgtcttcttcagtggaaaccccgagaagactgatcagttcttcagttctaaaacaatggcccagggtttggtgacgttcgccgacgtagccatagacttttctcaggaggagtgggcctgtctgaactctgctcagagggacctgtactgggacgtgatgctggagaactacagtaacttggtctcactggatttggagtcagcatatgaaaataagagtttacctacagaaaaaaacattcatg

SEQ ID NO: 199021 - DNA, 573 bp, Artificial Sequence
  derived and/or modified sequence
ggtgatcgggccttctgggtgacgcaggtgtgtgtgacagcacaacctgtagttccagcgtctctgtgctgagatgggtgatcgggccttctgggtgacgcaggtgtgtgtgacaacacaacctgtagctccagcttctctgtgctgggatggatgatcgggccttctgggtgacgcaggccagcatccttcagaaaaagcatccccgaggaggaagacgaatcgttaaacatcttaggtcagctctagcctctcggaatttgtcttcttcagtggaaaccccgagaagactgatcagttcttcagttctaaaacaatggcccagggtttggtgacgttcgccgacgtagccatagacttttctcaggaggagtgggcctgtctgaactctgctcagagggacctgtactgggacgtgatgctggagaactacagtaacttggtctcactggatttggagtcagcatatgaaaataagagtttacctacagaaaaaaacattcatgaaataagggcttccaaaaggaattcagatagaagaagtaaatcccttggccgtaactggatatgtga

SEQ ID NO: 199022 - DNA, 641 bp, Artificial Sequence
  derived and/or modified sequence
gctgagatgggtgatcgggccttctgggtgacgcaggtgtgtgtgacaacacaacctgtagctccagcttctctgtgctgggatggatgatcgggccttctgggtgacgcaggtgtgtgtgacagcacaacctgtagctccagcgtctctgctgcttcccctgccttcacctcctaaccaagcggtacctgcctgagaacaagggccgcggaaggacgggagtgcctgagccctgccaggaaattcaccaacaagaaggcagaaacagccatgaggccagcatccttcagaaaaagcatccccgaggaggaagacgaatcgttaaacatcttaggtcagctttaccagtgaggaaaccgacactgtgagctctagcctctcggaatttgtcttcttcagtggaaaccccgagaagactgatcagttcttcagttctaaaacaatggcccagggtttggtgacgttcgccgacgtagccatagacttttctcaggaggagtgggcctgtctgaactctgctcagagggacctgtactgggacgtgatgctggagaactacagtaacttggtctcactggatttggagtcagcatatgaaaataagagtttacctacagaaaaaaacattcatgaaataaggg

SEQ ID NO: 199023 - DNA, 688 bp, Artificial Sequence
  derived and/or modified sequence
agcggtacctgcctgagaacaagggccgcggaaggacgggagtgcctgagccctgccaggaaattcaccaacaagaaggcagaaacagccatgaggtgacgctttcagagctagaagtgctctccactcagggcgcctgagtgacaggagacggtggcctcaggagtagaattcctcctgtagagggacacgtccctgatgtgggagacagggagaggggcagctccacgcttcatcatctcagttaccacagcgtgctcttcaggaatctcccagaaactccatctcggggcctcgtatttctcattggttttattaggtatggcaggtgttacccttctggttctgttttccccaggccagcatccttcagaaaaagcatccccgaggaggaagacgaatcgttaaacatcttaggtcagctctagcctctcggaatttgtcttcttcagtggaaaccccgagaagactgatcagttcttcagttctaaaacaatggcccagggtttggtgacgttcgccgacgtagccatagacttttctcaggaggagtgggcctgtctgaactctgctcagagggacctgtactgggacgtgatgctggagaactacagtaacttggtctcactggatttggagtcagcatatgaaaataagagtttacctacagaaaaaaacattcatgaaa

SEQ ID NO: 199024 - DNA, 761 bp, Artificial Sequence
  derived and/or modified sequence
ggggcgacggaacccgcacctgtgaacctcggcagtgcgtccccgggactctgttctgtgaggccagcatccttcagaaaaagcatccccgaggaggaagacgaatcgttaaacatcttaggtcagctttaccagtgaggaaaccgacactgtgagctctagcctctcggaatttgtcttcttcagtggaaaccccgagaagactgatcagttcttcagttctaaaacaatggcccagggtttggtgacgttcgccgacgtagccatagacttttctcaggaggagtgggcctgtctgaactctgctcagagggacctgtactgggacgtgatgctggagaactacagtaacttggtctcactggatttggagtcagcatatgaaaataagagtttacctacagaaaaaaacattcatgaaataagggcttccaaaaggaattcagatagaagaagtaaatcccttggccgtaactggatatgtgaaggtacgcttgaaagaccacagcgctccagagggaggtatgtcaatcagatgatcatcaattatgtcaaaagacctgctactagagaaggcacccctcctagaacacatcagagacatcataaggagaattcctttgaatgtaaggactgtgggaaggcctttagtcgtggctatcaacttagtcaacatcagaaaatccatactggtgagaaaccttatgaatgtaaagaatgtaagaaggccttccgttggggcaatcagcttactcaacatc

SEQ ID NO: 199025 - DNA, 670 bp, Artificial Sequence
  derived and/or modified sequence
agtccgcgcaggtgagattggtgcgcgtggctccgaggggagacgggcacggggcttctgacggtgacgcacttgctggagagtgtggggtgacacagccgggctctccccataactggtgaccgggggtgctccagaggctttgggtcaacgcagcccgtgcctgtgaacctcggcggtgcgtccctgggactctgctccgtgaggccagcatccttcagaaaaagcatccccgaggaggaagacgaatcgttaaacatctgaaagggtcaggccagcatccttcagaaaaagcatccccgaggaggaagacgaatcgttaaacatcttaggtcagctctagcctctcggaatttgtcttcttcagtggaaaccccgagaagactgatcagttcttcagttctaaaacaatggcccagggtttggtgacgttcgccgacgtagccatagacttttctcaggaggagtgggcctgtctgaactctgctcagagggacctgtactgggacgtgatgctggagaactacagtaacttggtctcactggatttggagtcagcatatgaaaataagagtttacctacagaaaaaaacattcatgaaataagggcttccaaaaggaattcagatagaagaagtaaatcccttggccgtaactggatatgtgaagg

SEQ ID NO: 199026 - DNA, 562 bp, Artificial Sequence
  derived and/or modified sequence
ggtgcgcgtggctccgaggggagacgggcacggggcttctgacggtgacgcacttgctggagagtgtggggtgacacagccgggctctccccataactggtgaccgggggtgctccagaggctttgggtcaacgcagcccgtgcctgtgaacctcggcggtgcgtccctgggactctgctccgtgaggccagcatccttcagaaaaagcatccccgaggaggaagacgaatcgttaaacatctgaaagggtcaggccagcatccttcagaaaaagcatccccgaggaggaagacgaatcgttaaacatcttaggtcagctttaccagtgaggaaaccgacactgtgagctctagcctctcggaatttgtcttcttcagtggaaaccccgagaagactgatcagttcttcagttctaaaacaatggcccagggtttggtgacgttcgccgacgtagccatagacttttctcaggaggagtgggcctgtctgaactctgctcagagggacctgtactgggacgtgatgctggagaactacagtaacttggtctcactggatttg

SEQ ID NO: 199027 - DNA, 2120 bp, Artificial Sequence
  derived and/or modified sequence
acgcacttgcgtgggagtacgaggctgacgcggcggccctgtccccgtaactgtgacacgggtgcacgcgagcgtcattgggggcgatgggggccgtgctgggtgcgcgtttgcaccagtgacgcagccgctgcatctccgccagtccgcgcaggccagcatccttcagaaaaagcatccccgaggaggaagacgaatcgttaaacatctgaaagggtcagctctagcctctcggaatttgtcttcttcagtggaaaccccgagaagactgatcagttcttcagttctaaaacaatggcccagggtttggtgacgttcgccgacgtagccatagacttttctcaggaggagtgggcctgtctgaactctgctcagagggacctgtactgggacgtgatgctggagaactacagtaacttggtctcactggatttggagtcagcatatgaaaataagagtttacctacagaaaaaaacattcatgaaataagggcttccaaaaggaattcagatagaagaagtaaatcccttggccgtaactggatatgtgaaggtacgcttgaaagaccacagcgctccagagggaggtatgtcaatcagatgatcatcaattatgtcaaaagacctgctactagagaaggcacccctcctagaacacatcagagacatcataaggagaattcctttgaatgtaaggactgtgggaaggcctttagtcgtggctatcaacttagtcaacatcagaaaatccatactggtgagaaaccttatgaatgtaaagaatgtaagaaggccttccgttggggcaatcagcttactcaacatcaaaaaattcatactggggagaagccctacgaatgtaaagactgtgggaaggcttttcgatggggctcaagcctcgttattcataagaggattcatactggtgaaaaaccctatgaatgtaaagactgtggaaaggcctttcggcgtggtgatgagctcactcagcaccagagattccacactggggagaaagactacgaatgcaaagactgtgggaagacctttagccgtgtgtataaacttattcagcacaagagaattcatagtggggagaagccttacgagtgtaaagactgtgggaaggcttttatttgtggttcaagcctcattcagcataaaagaattcacacaggtgagaaaccctatgaatgtcaagaatgtgggaaggcctttactcgagtcaattaccttactcagcatcagaagatccacaccggtgagaagcctcacgaatgtaaggagtgtgggaaggcctttcgctggggttcgagcctcgttaagcacgagaggatacatacgggcgagaagccgtacaagtgcacagaatgtgggaaggccttcaattgtggctatcacctcactcagcacgagagaatccacacaggcgaaaccccgtataaatgtaaggagtgtgggaaggctttcatttatggatcgagcctcgtgaaacatgagagaattcataccggggtgaaaccctatgggtgtacagaatgtgggaagagctttagtcacggccatcagcttacacaacatcagaaaacgcacagtggggcgaaatcctacgaatgtaaggagtgcgggaaggcatgtaaccacctaaaccatctccgagaacatcagaggatccacaacagttgaagagccttttgaacgcagtagcccgctcgtatctatggtttcgctttccacagtttgttacctgcagtcaactgcagttcaaaaatattaaatggaaaattccagaaataaagaattttaagtctcaaatggtgtgcccttctgagtagcgtgatgaaatctctcgctgtccggctccagccggccggggatgtgagtcatcccttggtccagcacatccacgctgtatacgccacccaccctgctagtgacttagtagccgtcttggtgatcagatcaactatcccagcatcacagtgcctgtgcccaagcagtcctcactttgcttaacagtggccccagagagcaggagtagtgatgctggtgattcggatatgccaaagagaagccacaaagtgcttccttttaaatgaaaaggtgaaagttctcaactt

SEQ ID NO: 199028 - DNA, 540 bp, Artificial Sequence
  derived and/or modified sequence
gtgcacgcaagcgtcattgggggtgatgggggccgtgctcggtgcgcttctgcaccggtgacgcaaccgctgtgtctccgccagtccgcgcaggccagcatccttcagaaaaagcatccccgaggaggaagacgaatcgttaaacatcttagctctagcctctcggaatttgtcttcttcagtggaaaccccgagaagactgatcagttcttcagttctaaaacaatggcccagggtttggtgacgttcgccgacgtagccatagacttttctcaggaggagtgggcctgtctgaactctgctcagagggacctgtactgggacgtgatgctggagaactacagtaacttggtctcactggatttggagtcagcatatgaaaataagagtttacctacagaaaaaaacattcatgaaataagggcttccaaaaggaattcagatagaagaagtaaatcccttggccgtaactggatatgtgaaggtacgcttgaaagaccacagcgctccagagggaggtatgtcaatcagatgatcatc

SEQ ID NO: 199029 - DNA, 2180 bp, Artificial Sequence
  derived and/or modified sequence
atcccaactgcgcctgagaccttgtttcacctcctgatgtgctgggtgtggttaggcctcgagccgggagctatttgcctcccaggaggaagccagggcagggttccgcggggaatggcggtgagggagccactcgggacgcggaggccctaaaatgaagaagcttcggcctgaggcttcgggagcggcgagcagtgtctccgttgcttcctgtgccttggccttccagccatgtggtacctgctagggagcagtggtcccaaagtgacgtgagaggctctacgctattgtgaaaatgaccaagaagaaggcttcacaagtcacgagatggcagttttggagccagaagtgctctccgtgcacactacctggacgacaagaggaagtaacctcaagaatagaattccttttggggaagaaagagctggccttcaggaaaagcatcccggaggaggaagaagaagtgttatatgtcctaaagtaaggtttcaggccagcatccttcagaaaaagcatccccgaggaggaagacgaatcgttaaacatcttaggtcagctttaccagtgaggaaaccgacactgtgagctctagcctctcggaatttgtcttcttcagtggaaaccccgagaagactgatcagttcttcagttctaaaacaatggcccagggtttggtgacgttcgccgacgtagccatagacttttctcaggaggagtgggcctgtctgaactctgctcagagggacctgtactgggacgtgatgctggagaactacagtaacttggtctcactggatttggagtcagcatatgaaaataagagtttacctacagaaaaaaacattcatgaaataagggcttccaaaaggaattcagatagaagaagtaaatcccttggccgtaactggatatgtgaaggtacgcttgaaagaccacagcgctccagagggaggtatgtcaatcagatgatcatcaattatgtcaaaagacctgctactagagaaggcacccctcctagaacacatcagagacatcataaggagaattcctttgaatgtaaggactgtgggaaggcctttagtcgtggctatcaacttagtcaacatcagaaaatccatactggtgagaaaccttatgaatgtaaagaatgtaagaaggccttccgttggggcaatcagcttactcaacatcaaaaaattcatactggggagaagccctacgaatgtaaagactgtgggaaggcttttcgatggggctcaagcctcgttattcataagaggattcatactggtgaaaaaccctatgaatgtaaagactgtggaaaggcctttcggcgtggtgatgagctcactcagcaccagagattccacactggggagaaagactacgaatgcaaagactgtgggaagacctttagccgtgtgtataaacttattcagcacaagagaattcatagtggggagaagccttacgagtgtaaagactgtgggaaggcttttatttgtggttcaagcctcattcagcataaaagaattcacacaggtgagaaaccctatgaatgtcaagaatgtgggaaggcctttactcgagtcaattaccttactcagcatcagaagatccacaccggtgagaagcctcacgaatgtaaggagtgtgggaaggcctttcgctggggttcgagcctcgttaagcacgagaggatacatacgggcgagaagccgtacaagtgcacagaatgtgggaaggccttcaattgtggctatcacctcactcagcacgagagaatccacacaggcgaaaccccgtataaatgtaaggagtgtgggaaggctttcatttatggatcgagcctcgtgaaacatgagagaattcataccggggtgaaaccctatgggtgtacagaatgtgggaagagctttagtcacggccatcagcttacacaacatcagaaaacgcacagtggggcgaaatcctacgaatgtaaggagtgcgggaaggcatgtaaccacctaaaccatctccgagaacatcagaggatccacaacagttgaagagccttttgaacgcagtagcccgctcgtatctatggtttcgctttccacagtttgttacctgcagtcaactgcagttcaaaaatattaaatggaaaattccagaaataaagaattttaagtctcaaa

SEQ ID NO: 199030 - DNA, 2130 bp, Artificial Sequence
  derived and/or modified sequence
gactgtgtgacgcacttgcgtgggagtgcgaggctgacgcggcggctctatctcccgtaactgtgacacgggtgcacgcaagcgtcattgggggtgatgggggccgtgctcggtgcgcttctgcaccggtgacgcaaccgctgtgtctccgccagtccgcgcaggccagcatccttcagaaaaagcatccccgaggaggaagacgaatcgttaaacatcttaggtcagctctagcctctcggaatttgtcttcttcagtggaaaccccgagaagactgatcagttcttcagttctaaaacaatggcccagggtttggtgacgttcgccgacgtagccatagacttttctcaggaggagtgggcctgtctgaactctgctcagagggacctgtactgggacgtgatgctggagaactacagtaacttggtctcactggatttggagtcagcatatgaaaataagagtttacctacagaaaaaaacattcatgaaataagggcttccaaaaggaattcagatagaagaagtaaatcccttggccgtaactggatatgtgaaggtacgcttgaaagaccacagcgctccagagggaggtatgtcaatcagatgatcatcaattatgtcaaaagacctgctactagagaaggcacccctcctagaacacatcagagacatcataaggagaattcctttgaatgtaaggactgtgggaaggcctttagtcgtggctatcaacttagtcaacatcagaaaatccatactggtgagaaaccttatgaatgtaaagaatgtaagaaggccttccgttggggcaatcagcttactcaacatcaaaaaattcatactggggagaagccctacgaatgtaaagactgtgggaaggcttttcgatggggctcaagcctcgttattcataagaggattcatactggtgaaaaaccctatgaatgtaaagactgtggaaaggcctttcggcgtggtgatgagctcactcagcaccagagattccacactggggagaaagactacgaatgcaaagactgtgggaagacctttagccgtgtgtataaacttattcagcacaagagaattcatagtggggagaagccttacgagtgtaaagactgtgggaaggcttttatttgtggttcaagcctcattcagcataaaagaattcacacaggtgagaaaccctatgaatgtcaagaatgtgggaaggcctttactcgagtcaattaccttactcagcatcagaagatccacaccggtgagaagcctcacgaatgtaaggagtgtgggaaggcctttcgctggggttcgagcctcgttaagcacgagaggatacatacgggcgagaagccgtacaagtgcacagaatgtgggaaggccttcaattgtggctatcacctcactcagcacgagagaatccacacaggcgaaaccccgtataaatgtaaggagtgtgggaaggctttcatttatggatcgagcctcgtgaaacatgagagaattcataccggggtgaaaccctatgggtgtacagaatgtgggaagagctttagtcacggccatcagcttacacaacatcagaaaacgcacagtggggcgaaatcctacgaatgtaaggagtgcgggaaggcatgtaaccacctaaaccatctccgagaacatcagaggatccacaacagttgaagagccttttgaacgcagtagcccgctcgtatctatggtttcgctttccacagtttgttacctgcagtcaactgcagttcaaaaatattaaatggaaaattccagaaataaagaattttaagtctcaaatggtgtgcccttctgagtagcgtgatgaaatctctcgctgtccggctccagccggccggggatgtgagtcatcccttggtccagcacatccacgctgtatacgccacccaccctgctagtgacttagtagccgtcttggtgatcagatcaactatcccagcatcacagtgcctgtgcccaagcagtcctcactttgcttaacagtggccccagagagcaggagtagtgatgctggtgattcggatatgccaaagagaagccacaaagtgcttccttttaaatgaaaaggtgaaagttctcaacttaaa

SEQ ID NO: 199031 - DNA, 739 bp, Artificial Sequence
  derived and/or modified sequence
ggggcgacggaacccgcacctgtgaacctcggcagtgcgtccccgggactctgttctgtgaggccagcatccttcagaaaaagcatccccgaggaggaagacgaatcgttaaacatcttaggtcagctctagcctctcggaatttgtcttcttcagtggaaaccccgagaagactgatcagttcttcagttctaaaacaatggcccagggtttggtgacgttcgccgacgtagccatagacttttctcaggaggagtgggcctgtctgaactctgctcagagggacctgtactgggacgtgatgctggagaactacagtaacttggtctcactggatttggagtcagcatatgaaaataagagtttacctacagaaaaaaacattcatgaaataagggcttccaaaaggaattcagatagaagaagtaaatcccttggccgtaactggatatgtgaaggtacgcttgaaagaccacagcgctccagagggaggtgagaaaccctatgaatgtcaagaatgtgggaaggcctttactcgagtcaattaccttactcagcatcagaagatccacaccggtgagaagcctcacgaatgtaaggagtgtgggaaggcctttcgctggggttcgagcctcgttaagcacgagaggatacatacgggcgagaagccgtacaagtgcacagaatgtgggaaggccttcaattgtggctatcacctcactcagcacgagagaatcca

SEQ ID NO: 199032 - DNA, 1890 bp, Artificial Sequence
  derived and/or modified sequence
aggtgtgtgtgacagtgcaacttgtagctccagcgtctctgctgcttcccctgccttcacctcctaaccaagcggtacctgcctgagaacaagggccgcggagggacgtgagcgcctgagcctcgcctggaaattcaccagcaagaaggcagaaacagccatgaggccagcatccttcagaaaaagcatccccgaggaggaagacgaatcgttaaacatctgaaagggtcaggccagcatccttcagaaaaagcatccccgaggaggaagacgaatcgttaaacatcttaggtcagctctagcctctcggaatttgtcttcttcagtggaaaccccgagaagactgatcagttcttcagttctaaaacaatggcccagggtttggtgacgttcgccgacgtagccatagacttttctcaggaggagtgggcctgtctgaactctgctcagagggacctgtactgggacgtgatgctggagaactacagtaacttggtctcactggatttggagtcagcatatgaaaataagagtttacctacagaaaaaaacattcatgaaataagggcttccaaaaggaattcagatagaagaagtaaatcccttggccgtaactggatatgtgaaggtacgcttgaaagaccacagcgctccagagggaggtatgtcaatcagatgatcatcaattatgtcaaaagacctgctactagagaaggcacccctcctagaacacatcagagacatcataaggagaattcctttgaatgtaaggactgtgggaaggcctttagtcgtggctatcaacttagtcaacatcagaaaatccatactggtgagaaaccttatgaatgtaaagaatgtaagaaggccttccgttggggcaatcagcttactcaacatcaaaaaattcatactggggagaagccctacgaatgtaaagactgtgggaaggcttttcgatggggctcaagcctcgttattcataagaggattcatactggtgaaaaaccctatgaatgtaaagactgtggaaaggcctttcggcgtggtgatgagctcactcagcaccagagattccacactggggagaaagactacgaatgcaaagactgtgggaagacctttagccgtgtgtataaacttattcagcacaagagaattcatagtggggagaagccttacgagtgtaaagactgtgggaaggcttttatttgtggttcaagcctcattcagcataaaagaattcacacaggtgagaaaccctatgaatgtcaagaatgtgggaaggcctttactcgagtcaattaccttactcagcatcagaagatccacaccggtgagaagcctcacgaatgtaaggagtgtgggaaggcctttcgctggggttcgagcctcgttaagcacgagaggatacatacgggcgagaagccgtacaagtgcacagaatgtgggaaggccttcaattgtggctatcacctcactcagcacgagagaatccacacaggcgaaaccccgtataaatgtaaggagtgtgggaaggctttcatttatggatcgagcctcgtgaaacatgagagaattcataccggggtgaaaccctatgggtgtacagaatgtgggaagagctttagtcacggccatcagcttacacaacatcagaaaacgcacagtggggcgaaatcctacgaatgtaaggagtgcgggaaggcatgtaaccacctaaaccatctccgagaacatcagaggatccacaacagttgaagagccttttgaacgcagtagcccgctcgtatctatggtttcgctttccacagtttgttacctgcagtcaactgcagttcaaaaatattaaatggaaaattccagaaataaagaattttaagtctcaaa

SEQ ID NO: 199033 - DNA, 913 bp, Artificial Sequence
  derived and/or modified sequence
gtcattgggggtgatgggggccgtgctcggtgcgcttctgcaccggtgacgcaaccgctgtgtctccgccagtccgcgcaggtgagattggcgcccatggctccaaggggagacgggcacggagcttctagcggtgacgcacttgctggagagggtgtggggtgacgcagccgggctctccccataactagggctggggtgctcccgaggctttggggcgacggaacccgcacctgtgaacctcggcagtgcgtccccgggactctgttctgtgaggccagcatccttcagaaaaagcatccccgaggaggaagacgaatcgttaaacatcttaggtcagctctagcctctcggaatttgtcttcttcagtggaaaccccgagaagactgatcagttcttcagttctaaaacaatggcccagggtttggtgacgttcgccgacgtagccatagacttttctcaggaggagtgggcctgtctgaactctgctcagagggacctgtactgggacgtgatgctggagaactacagtaacttggtctcactggatttggagtcagcatatgaaaataagagtttacctacagaaaaaaacattcatgaaataagggcttccaaaaggaattcagatagaagaagtaaatcccttggccgtaactggatatgtgaaggtacgcttgaaagaccacagcgctccagagggaggtatgtcaatcagatgatcatcaattatgtcaaaagacctgctactagagaaggcacccctcctagaacacatcagagacatcataaggagaattcctttgaatgtaaggactgtgggaaggcctttagtcgtggctatcaacttagtcaacatcagaaaatccatactggtgagaaaccttatgaatgtaaagaatgtaagaaggc

SEQ ID NO: 199034 - DNA, 574 bp, Artificial Sequence
  derived and/or modified sequence
ttcccccgacggccccgcgtcctcttctagcctcaccctctcccgaggccccagcgttgggggactaccgggccagcatccttcagaaaaagcatccccgaggaggaagacgaatcgttaaacatctgaaagggtcaggccagcatccttcagaaaaagcatccccgaggaggaagacgaatcgttaaacatcttaggtcagctctagcctctcggaatttgtcttcttcagtggaaaccccgagaagactgatcagttcttcagttctaaaacaatggcccagggtttggtgacgttcgccgacgtagccatagacttttctcaggaggagtgggcctgtctgaactctgctcagagggacctgtactgggacgtgatgctggagaactacagtaacttggtctcactggatttggagtcagcatatgaaaataagagtttacctacagaaaaaaacattcatgaaataagggcttccaaaaggaattcagatagaagaagtaaatcccttggccgtaactggatatgtgaaggtacgcttgaaagaccacagcgctccagagggaggtatgt

SEQ ID NO: 199035 - protein, 387 aa, Artificial Sequence
  derived and/or modified sequence
MPVPASWPHPPGPFLLLTLLLGLTEVAGEEELQMIQPEKLLLVTVGKTATLHCTVTSLLPVGPVLWFRGVGPGRELIYNQKEGHFPRVTTVSDLTKRNNMDFSIRISSITPADVGTYYCVKFRKGSPENVEFKSGPGTEMALGAKPSAPVVLGPAARTTPEHTVSFTCESHGFSPRDITLKWFKNGNELSDFQTNVDPTGQSVAYSIRSTARVVLDPWDVRSQVICEVAHVTLQGDPLRGTANLSEAIRVPPTLEVTQQPMRVGNQVNVTCQVRKFYPQSLQLTWSENGNVCQRETASTLTENKDGTYNWTSWFLVNISDQRDDVVLTCQVKHDGQLAVSKRLALEVTVHQKDQSSDATPGPASSLTALLLIAVLLGPIYVPWKQKT

SEQ ID NO: 199036 - DNA, 1164 bp, Artificial Sequence
  derived and/or modified sequence
atgccagtccccgcatcctggccgcaccctccaggtcctttcctgctccttactctcctgttgggactgaccgaggtagctggggaagaagagctgcaaatgatacagcctgagaaacttctactggtcacggtggggaaaactgccaccctacactgcaccgtgacttctctactccctgtcgggcctgtactttggttccgaggagtgggccctgggcgagagctgatatataaccagaaggaggggcattttccccgtgtgaccaccgtgagcgacctgaccaagcgtaacaacatggacttctcaatcaggattagctccatcacaccggcagatgtgggcacgtattattgcgtgaagtttcgcaaggggtccccagagaatgttgagttcaagtccggccctggcactgagatggcgttaggcgccaaacccagcgcgccagtagtgctgggaccagccgcccgcacaacaccagaacacacggtgtcgttcacctgcgaaagccacggctttagcccaagggacataaccctgaaatggtttaagaatggcaatgaactttccgattttcagactaacgtcgaccctaccggccaatctgtagcttactctatccggtcaaccgcccgggtggtactcgatccatgggacgttcgcagtcaggtaatttgtgaagtggcccacgtgacactgcagggagaccccctgcggggtacagctaacctgagtgaggcgatacgcgttccacccactttggaggtgactcagcagcctatgagagttgggaaccaggtcaatgtgacctgtcaggtccgcaaattctatccccaatccctccagctgacctggagtgaaaatggcaatgtttgtcagagagagacagccagtactcttactgaaaacaaagacggcacatataattggaccagctggttcctagtcaatatctccgatcagcgggacgatgtggtgctgacatgtcaagtcaaacacgatggccagcttgctgttagcaaacggcttgctcttgaggtcactgtgcatcagaaggaccagagcagcgatgccacccccgggccggcaagcagccttaccgcgctcctgctgatcgccgtactgttaggcccaatctacgttccttggaaacagaaaacgtag

SEQ ID NO: 199037 - DNA, 1164 bp, Artificial Sequence
  derived and/or modified sequence
atgcctgtgcctgcctcctggccccaccccccaggccccttcctgctgctgaccctgctgctgggcctgacagaggtggccggggaggaggagctgcagatgatccagcctgagaagctgctgctggtgacagtgggcaagacagccaccctgcactgcaccgtgaccagcctgctgcctgtgggccctgtgctgtggttccggggcgtgggccctggccgggagctgatctacaaccagaaggagggccacttcccccgggtgaccaccgtgtctgacctgaccaagaggaacaacatggacttcagcatccgcatcagcagcatcaccccagcagatgtgggcacctactactgtgtgaagttcaggaagggcagcccagaaaatgtggagttcaagagcggccctggaacagagatggccctgggcgccaagcccagcgcccctgtggtgctgggccctgctgcccggaccaccccagagcacacagtgtccttcacctgtgagagccacggcttcagcccccgggacatcaccctgaagtggttcaagaatggaaatgagctgagtgacttccagaccaacgtggaccccaccggccagagcgtggcctacagcatccgcagcacagcccgggtggtgctggacccctgggatgtgcgcagccaggtgatctgtgaggtggcccacgtgaccctgcagggcgaccccctgcggggcacagccaacctgtctgaggccatccgggtgccccccaccctggaggtgacccagcagcccatgagggtgggcaaccaggtgaatgtgacctgccaggtgaggaagttctacccccagagcctgcagctgacctggagcgaaaatggaaatgtgtgccagcgggagacagccagcaccctgacagagaacaaggatggcacctacaactggacctcctggttcctggtgaacatcagtgaccagagagatgatgtggtgctgacctgccaggtgaagcatgatggccagctggccgtgtccaagaggctggccctggaggtgacagtgcaccagaaggaccagagcagtgatgccaccccaggccctgccagcagcctgacagccctgctgctgattgctgtgctgctgggccccatctacgtgccctggaagcagaagacctag

SEQ ID NO: 199038 - DNA, 1164 bp, Artificial Sequence
  derived and/or modified sequence
atgcccgtgcccgccagctggccccacccccccggccccttcctgctcctgactttactactgggcctaaccgaggttgcgggcgaggaggagctgcagatgattcagccagaaaagctcctgctcgtgactgttggcaaaaccgctaccctgcattgcaccgtcactagcctgctgcctgtgggaccggtcctgtggtttcgcggtgtcggacccggccgggaactgatttataatcagaaagagggccacttcccccgggttacgacagtgagtgatctgacaaagagaaataacatggatttcagcattcgcatatctagtatcacccccgcagacgtaggtacatactattgtgtcaagttccggaagggcagcccagaaaatgtcgaatttaagagtggccccggcactgagatggccctcggagccaagcccagtgccccagtggtgttagggcccgccgccaggacaactcctgagcatactgtgtcttttacctgcgagagccacgggttcagtccgagggacatcactttaaagtggttcaaaaacggaaacgagctcagcgacttccaaactaacgttgatccaacaggccaatccgttgcgtatagcatacggagcaccgcgcgcgtggtcctggatccatgggacgtgcgcagccaggttatctgcgaggtcgcccatgttaccttacagggggacccgctccggggaacggccaatctgagtgaggctattagggtcccaccaacacttgaggtaacacaacagcccatgcgcgtaggaaaccaagtgaacgtgacctgccaggttcgcaaattctacccgcagtccctacagttgacatggtctgaaaatggcaacgtgtgccagagagagacagccagtacactcaccgagaacaaggatgggacctataactggacctcctggttcctcgttaacatctccgaccagcgggatgatgtggttttgacctgccaagttaaacatgacggtcagctggccgtgtctaagcggcttgcacttgaagtcaccgtgcaccaaaaggatcagagctcagatgccactcctggacctgccagcagcctcaccgctcttctcctgatcgcggtgctgctgggtccgatctacgtcccatggaagcagaaaacctag

SEQ ID NO: 199039 - DNA, 1164 bp, Artificial Sequence
  derived and/or modified sequence
atgccagtgccggcaagctggccgcaccctcctggcccttttttactccttacactgttgctcggtctgacagaagttgcaggagaagaggagctgcagatgatccagccagaaaagctgttactagtgacggtgggcaagactgcaacactccactgtaccgtaacttcactactgccagttggacctgtgctgtggttccgaggtgtggggcctggccgagagctcatatacaatcaaaaggaaggccatttcccaagggtaacaaccgtatctgacctgacgaagaggaataacatggacttcagtatacgaatctcatccataactcccgctgacgtcggtacctattattgtgtaaaattcaggaagggcagccccgagaacgtggaatttaaaagcggccctggaactgagatggccctgggggctaagcccagcgcccctgtggtactgggccctgccgctcgcactacccctgaacacactgtgagctttacatgtgagagccacggcttctctccgagagacatcactctgaaatggtttaagaacgggaatgagttgtctgacttccagaccaacgtggaccctacaggccagagtgtcgcgtatagcatccggtccaccgccagggtggtgctagacccctgggacgtccggagtcaagttatctgtgaggtggcacatgtgaccctccagggggatccgctccgtggtacggcaaacctgtccgaagctattcgagtcccccctacactcgaggttacacagcagcccatgcgagtggggaatcaggtgaacgtcacgtgtcaggtaaggaaattctaccctcaatccttacagcttacgtggtccgagaacggcaatgtgtgtcagcgggaaacagcctctacgctcaccgagaataaagacggcacatataattggacttcctggtttttggtgaatatttccgatcagagggatgatgtggttttgacttgtcaagtaaagcacgacggtcagcttgccgtgtccaagagactggctctggaggtcactgtgcaccagaaagatcaatcctcagatgcaactccgggacccgcttcatcactcactgcacttcttctgattgccgtgttactgggacccatctacgtaccttggaaacagaagacatag

SEQ ID NO: 199040 - DNA, 1716 bp, Artificial Sequence
  derived and/or modified sequence
agagcagggcctgacatctccccagaacagacgtttgaacagagcaggcttctgaggtctccaaaatgcctgtcccagcctcctggccccatcctcctggtcctttcctgcttctgactctactgctgggacttacagaagtggcaggtgaggaggagctacagatgattcagcctgagaagctcctgttggtcacagttggaaagacagccactctgcactgcactgtgacctccctgcttcccgtgggacccgtcctgtggttcagaggagttggaccaggccgggaattaatctacaatcaaaaagaaggccacttccccagggtaacaacagtttcagacctcacaaagagaaacaacatggacttttccatccgcatcagtagcatcaccccagcagatgtcggcacatactactgtgtgaagtttcgaaaagggagccctgagaacgtggagtttaagtctggaccaggcactgagatggctttgggtgccaaaccctctgcccccgtggtattgggccctgcggcgaggaccacacctgagcatacagtgagtttcacctgtgagtcccatggcttctctcccagagacatcaccctgaaatggttcaaaaatgggaatgagctctcagacttccagaccaacgtggaccccacaggacagagtgtggcctacagcatccgcagcacagccagggtggtactggacccctgggacgttcgctctcaggtcatctgcgaggtggcccatgtcaccttgcagggggaccctcttcgtgggactgccaacttgtctgaggccatccgagttccacccaccttggaggttactcaacagcccatgagggtggggaaccaggtaaacgtcacctgccaggtgaggaagttctacccccagagcctacagctgacctggtcggagaatggaaacgtgtgccagagagaaacagcctcgacccttacagagaacaaggatggtacctacaactggacaagctggttcctggtgaacatatctgaccaaagggatgatgtggtcctcacctgccaggtgaagcatgatgggcagctggcggtcagcaaacgccttgccctagaggtcacagtccaccagaaggaccagagctcagatgctacccctggcccggcatcatcccttactgcgctgctcctcatagctgtcctcctgggccccatctacgtcccctggaagcagaagacctgactctccttccttcctcccctgccacgtgggaccctcatctctgctgcctccttcctttcctgagaggctcagcttgagagaatgagccagtgagaagcttctctagacttggctccaaacatctcccctcccaagacatctgcctgcccacaggctcctgttgctccttcacacagacctggatgccccagagcaaggtcttcattcatggtcctgagcaggtgccatgggattgggctctgggcactgacttaacggcacctccctagaaggcgagaaacatgccaaatctaaacacaccaggactcccatccatcgccttgagactgaccgtaaaccacagacgctctccaggttctcaagagttatcctgccttccagattcctgcctatcccaactccccagccttgttgaggttctctattgcctcttgaatacaaatgcactcccaaagtggttttaagaaaataaaaagattatccttcc

SEQ ID NO: 199041 - DNA, 1732 bp, Artificial Sequence
  derived and/or modified sequence
aagcatgatgggttttactagaacgtttcagtgtcactaagtcacagaagaggaggacaagaagaggaattatggcagggaccagctttatcacagtggtgtacctggtttggcagggtgctcacaacttgtttgtgggatgtggaggtatcagaagtggcaggtgaggaggagctacagatgattcagcctgagaagctcctgttggtcacagttggaaagacagccactctgcactgcactgtgacctccctgcttcccgtgggacccgtcctgtggttcagaggagttggaccaggccgggaattaatctacaatcaaaaagaaggccacttccccagggtaacaacagtttcagacctcacaaagagaaacaacatggacttttccatccgcatcagtagcatcaccccagcagatgtcggcacatactactgtgtgaagtttcgaaaagggagccctgagaacgtggagtttaagtctggaccaggcactgagatggctttgggtgccaaaccctctgcccccgtggtattgggccctgcggcgaggaccacacctgagcatacagtgagtttcacctgtgagtcccatggcttctctcccagagacatcaccctgaaatggttcaaaaatgggaatgagctctcagacttccagaccaacgtggaccccacaggacagagtgtggcctacagcatccgcagcacagccagggtggtactggacccctgggacgttcgctctcaggtcatctgcgaggtggcccatgtcaccttgcagggggaccctcttcgtgggactgccaacttgtctgaggccatccgagttccacccaccttggaggttactcaacagcccatgagggtggggaaccaggtaaacgtcacctgccaggtgaggaagttctacccccagagcctacagctgacctggtcggagaatggaaacgtgtgccagagagaaacagcctcgacccttacagagaacaaggatggtacctacaactggacaagctggttcctggtgaacatatctgaccaaagggatgatgtggtcctcacctgccaggtgaagcatgatgggcagctggcggtcagcaaacgccttgccctagaggtcacagtccaccagaaggaccagagctcagatgctacccctggcccggcatcatcccttactgcgctgctcctcatagctgtcctcctgggccccatctacgtcccctggaagcagaagacctgactctccttccttcctcccctgccacgtgggaccctcatctctgctgcctccttcctttcctgagaggctcagcttgagagaatgagccagtgagaagcttctctagacttggctccaaacatctcccctcccaagacatctgcctgcccacaggctcctgttgctccttcacacagacctggatgccccagagcaaggtcttcattcatggtcctgagcaggtgccatgggattgggctctgggcactgacttaacggcacctccctagaaggcgagaaacatgccaaatctaaacacaccaggactcccatccatcgccttgagactgaccgtaaaccacagacgctctccaggttctcaagagttatcctgccttccagattcctgcctatcccaactccccagccttgttgaggttctctattgcctcttgaatacaaatgcactcccaaagtggttttaagaaaataaaaagattatccttcc

SEQ ID NO: 199042 - DNA, 1164 bp, Artificial Sequence
  derived and/or modified sequence
atgcccgtgcccgccagctggccccacccccccggccccttcctgctgctgaccctgctgctgggcctgaccgaggtggccggcgaggaggagctgcagatgatccagcccgagaagctgctgctggtgaccgtgggcaagaccgccaccctgcactgcaccgtgaccagcctgctgcccgtgggccccgtgctgtggttcagaggcgtgggccccggcagagagctgatctacaaccagaaggagggccacttccccagagtgaccaccgtgagcgacctgaccaagagaaacaacatggacttcagcatcagaatcagcagcatcacccccgccgacgtgggcacctactactgcgtgaagttcagaaagggcagccccgagaacgtggagttcaagagcggccccggcaccgagatggccctgggcgccaagcccagcgcccccgtggtgctgggccccgccgccagaaccacccccgagcacaccgtgagcttcacctgcgagagccacggcttcagccccagagacatcaccctgaagtggttcaagaacggcaacgagctgagcgacttccagaccaacgtggaccccaccggccagagcgtggcctacagcatcagaagcaccgccagagtggtgctggacccctgggacgtgagaagccaggtgatctgcgaggtggcccacgtgaccctgcagggcgaccccctgagaggcaccgccaacctgagcgaggccatcagagtgccccccaccctggaggtgacccagcagcccatgagagtgggcaaccaggtgaacgtgacctgccaggtgagaaagttctacccccagagcctgcagctgacctggagcgagaacggcaacgtgtgccagagagagaccgccagcaccctgaccgagaacaaggacggcacctacaactggaccagctggttcctggtgaacatcagcgaccagagagacgacgtggtgctgacctgccaggtgaagcacgacggccagctggccgtgagcaagagactggccctggaggtgaccgtgcaccagaaggaccagagcagcgacgccacccccggccccgccagcagcctgaccgccctgctgctgatcgccgtgctgctgggccccatctacgtgccctggaagcagaagacctag

SEQ ID NO: 199043 - protein, 4599 aa, Artificial Sequence
  derived and/or modified sequence
MSEFLLALLTLSGLLPIARVLTVGADRDQQLCDPGEFLCHDHVTCVSQSWLCDGDPDCPDDSDESLDTCPEEVEIKCPLNHIACLGTNKCVHLSQLCNGVLDCPDGYDEGVHCQELLSNCQQLNCQYKCTMVRNSTRCYCEDGFEITEDGRSCKDQDECAVYGTCSQTCRNTHGSYTCSCVEGYLMQPDNRSCKAKIEPTDRPPILLIANFETIEVFYLNGSKMATLSSVNGNEIHTLDFIYNEDMICWIESRESSNQLKCIQITKAGGLTDEWTINILQSFHNVQQMAIDWLTRNLYFVDHVGDRIFVCNSNGSVCVTLIDLELHNPKAIAVDPIAGKLFFTDYGNVAKVERCDMDGMNRTRIIDSKTEQPAALALDLVNKLVYWVDLYLDYVGVVDYQGKNRHTVIQGRQVRHLYGITVFEDYLYATNSDNYNIVRINRFNGTDIHSLIKIENAWGIRIYQKRTQPTVRSHACEVDPYGMPGGCSHICLLSSSYKTRTCRCRTGFNLGSDGRSCKRPKNELFLFYGKGRPGIVRGMDLNTKIADEYMIPIENLVNPRALDFHAETNYIYFADTTSFLIGRQKIDGTERETILKDDLDNVEGIAVDWIGNNLYWTNDGHRKTINVARLEKASQSRKTLLEGEMSHPRGIVVDPVNGWMYWTDWEEDEIDDSVGRIEKAWMDGFNRQIFVTSKMLWPNGLTLDFHTNTLYWCDAYYDHIEKVFLNGTHRKIVYSGRELNHPFGLSHHGNYVFWTDYMNGSIFQLDLITSEVTLLRHERPPLFGLQIYDPRKQQGDNMCRVNNGGCSTLCLAIPGGRVCACADNQLLDENGTTCTFNPGEALPHICKAGEFRCKNRHCIQARWKCDGDDDCLDGSDEDSVNCFNHSCPDDQFKCQNNRCIPKRWLCDGANDCGSNEDESNQTCTARTCQVDQFSCGNGRCIPRAWLCDREDDCGDQTDEMASCEFPTCEPLTQFVCKSGRCISSKWHCDSDDDCGDGSDEVGCVHSCFDNQFRCSSGRCIPGHWACDGDNDCGDFSDEAQINCTKEEIHSPAGCNGNEFQCHPDGNCVPDLWRCDGEKDCEDGSDEKGCNGTIRLCDHKTKFSCWSTGRCINKAWVCDGDIDCEDQSDEDDCDSFLCGPPKHPCANDTSVCLQPEKLCNGKKDCPDGSDEGYLCDECSLNNGGCSNHCSVVPGRGIVCSCPEGLQLNKDNKTCEIVDYCSNHLKCSQVCEQHKHTVKCSCYEGWKLDVDGESCTSVDPFEAFIIFSIRHEIRRIDLHKRDYSLLVPGLRNTIALDFHFNQSLLYWTDVVEDRIYRGKLSESGGVSAIEVVVEHGLATPEGLTVDWIAGNIYWIDSNLDQIEVAKLDGSLRTTLIAGAMEHPRAIALDPRYGILFWTDWDANFPRIESASMSGAGRKTIYKDMKTGAWPNGLTVDHFEKRIVWTDARSDAIYSALYDGTNMIEIIRGHEYLSHPFAVSLYGSEVYWTDWRTNTLSKANKWTGQNVSVIQKTSAQPFDLQIYHPSRQPQAPNPCAANDGKGPCSHMCLINHNRSAACACPHLMKLSSDKKTCYEMKKFLLYARRSEIRGVDIDNPYFNFITAFTVPDIDDVTVIDFDASEERLYWTDIKTQTIKRAFINGTGLETVISRDIQSIRGLAVDWVSRNLYWISSEFDETQINVARLDGSLKTSIIHGIDKPQCLAAHPVRGKLYWTDGNTINMANMDGSNSKILFQNQKEPVGLSIDYVENKLYWISSGNGTINRCNLDGGNLEVIESMKEELTKATALTIMDKKLWWADQNLAQLGTCSKRDGRNPTILRNKTSGVVHMKVYDKEAQQGSNSCQLNNGGCSQLCLPTSETTRTCMCTVGYYLQKNRMSCQGIESFLMYSVHEGIRGIPLEPSDKMDALMPISGTSFAVGIDFHAENDTIYWTDMGFNKISRAKRDQTWKEDIITNGLGRVEGIAVDWIAGNIYWTDHGFNLIEVARLNGSFRYVIISQGLDQPRSIAVHPEKGLLFWTEWGQMPCIGKARLDGSEKVVLVSMGIAWPNGISIDYEENKLYWCDARTDKIERIDLETGGNREMVLSGSNVDMFSVAVFGAYIYWSDRAHANGSVRRGHKNDATETITMRTGLGVNLKEVKIFNRVREKGTNVCARDNGGCKQLCLYRGNSRRTCACAHGYLAEDGVTCLRHEGYLLYSGRTILKSIHLSDETNLNSPIRPYENPRYFKNVIALAFDYNQRRKGTNRIFYSDAHFGNIQLIKDNWEDRQVIVENVGSVEGLAYHRAWDTLYWTSSTTSSITRHTVDQTRPGAFDREAVITMSEDDHPHVLALDECQNLMFWTNWNEQHPSIMRSTLTGKNAQVVVSTDILTPNGLTIDYRAEKLYFSDGSLGKIERCEYDGSQRHVIVKSGPGTFLSLAVYDNYIFWSDWGRRAILRSNKYTGGDTKILRSDIPHQPMGIIAVANDTNSCELSPCALLNGGCHDLCLLTPNGRVNCSCRGDRILLEDNRCVTKNSSCNAYSEFECGNGECIDYQLTCDGIPHCKDKSDEKLLYCENRSCRRGFKPCYNRRCIPHGKLCDGENDCGDNSDELDCKVSTCATVEFRCADGTCIPRSARCNQNIDCADASDEKNCNNTDCTHFYKLGVKTTGFIRCNSTSLCVLPTWICDGSNDCGDYSDELKCPVQNKHKCEENYFSCPSGRCILNTWICDGQKDCEDGRDEFHCDSSCSWNQFACSAQKCISKHWICDGEDDCGDGLDESDSICGAITCAADMFSCQGSRACVPRHWLCDGERDCPDGSDELSTAGCAPNNTCDENAFMCHNKVCIPKQFVCDHDDDCGDGSDESPQCGYRQCGTEEFSCADGRCLLNTQWQCDGDFDCPDHSDEAPLNPKCKSAEQSCNSSFFMCKNGRCIPSGGLCDNKDDCGDGSDERNCHINECLSKKVSGCSQDCQDLPVSYKCKCWPGFQLKDDGKTCVDIDECSSGFPCSQQCINTYGTYKCLCTDGYEIQPDNPNGCKSLSDEEPFLILADHHEIRKISTDGSNYTLLKQGLNNVIAIDFDYREEFIYWIDSSRPNGSRINRMCLNGSDIKVVHNTAVPNALAVDWIGKNLYWSDTEKRIIEVSKLNGLYPTILVSKRLKFPRDLSLDPQAGYLYWIDCCEYPHIGRVGMDGTNQSVVIETKISRPMALTIDYVNRRLYWADENHIEFSNMDGSHRHKVPNQDIPGVIALTLFEDYIYWTDGKTKSLSRAHKTSGADRLSLIYSWHAITDIQVYHSYRQPDVSKHLCMINNGGCSHLCLLAPGKTHTCACPTNFYLAADNRTCLSNCTASQFRCKTDKCIPFWWKCDTVDDCGDGSDEPDDCPEFRCQPGRFQCGTGLCALPAFICDGENDCGDNSDELNCDTHVCLSGQFKCTKNQKCIPVNLRCNGQDDCGDEEDERDCPENSCSPDYFQCKTTKHCISKLWVCDEDPDCADASDEANCDKKTCGPHEFQCKNNNCIPDHWRCDSQNDCSDNSDEENCKPQTCTLKDFLCANGDCVSSRFWCDGDFDCADGSDERNCETSCSKDQFRCSNGQCIPAKWKCDGHEDCKYGEDEKSCEPASPTCSSREYICASDGCISASLKCNGEYDCADGSDEMDCVTECKEDQFRCKNKAHCIPIRWLCDGIHDCVDGSDEENCERGGNICRADEFLCNNSLCKLHFWVCDGEDDCGDNSDEAPDMCVKFLCPSTRPHRCRNNRICLQSEQMCNGIDECGDNSDEDHCGGKLTYKARPCKKDEFACSNKKCIPMDLQCDRLDDCGDGSDEQGCRIAPTEYTCEDNVNPCGDDAYCNQIKTSVFCRCKPGFQRNMKNRQCEDLNECLVFGTCSHQCINVEGSYKCVCDQNFQERNNTCIAEGSEDQVLYIANDTDILGFIYPFNYSGDHQQISHIEHNSRITGMDVYYQRDMIIWSTQFNPGGIFYKRIHGREKRQANSGLICPEFKRPRDIAVDWVAGNIYWTDHSRMHWFSYYTTHWTSLRYSINVGQLNGPNCTRLLTNMAGEPYAIAVNPKRGMMYWTVVGDHSHIEEAAMDGTLRRILVQKNLQRPTGLAVDYFSERIYWADFELSIIGSVLYDGSNSVVSVSSKQGLLHPHRIDIFEDYIYGAGPKNGVFRVQKFGHGSVEYLALNIDKTKGVLISHRYKQLDLPNPCLDLACEFLCLLNPSGATCVCPEGKYLINGTCNDDSLLDDSCKLTCENGGRCILNEKGDLRCHCWPSYSGERCEVNHCSNYCQNGGTCVPSVLGRPTCSCALGFTGPNCGKTVCEDFCQNGGTCIVTAGNQPYCHCQPEYTGDRCQYYVCHHYCVNSESCTIGDDGSVECVCPTRYEGPKCEVDKCVRCHGGHCIINKDSEDIFCNCTNGKIASSCQLCDGYCYNGGTCQLDPETNVPVCLCSTNWSGTQCERPAPKSSKSDHISTRSIAIIVPLVLLVTLITTLVIGLVLCKRKRRTKTIRRQPIINGGINVEIGNPSYNMYEVDHDHNDGGLLDPGFMIDPTKARYIGGGPSAFKLPHTAPPIYLNSDLKGPLTAGPTNYSNPVYAKLYMDGQNCRNSLGSVDERKELLPKKIEIGIRETVA

SEQ ID NO: 199044 - protein, 4537 aa, Artificial Sequence
  derived and/or modified sequence
FLHSGPEEVEIKCPLNHIACLGTNKCVHLSQLCNGVLDCPDGYDEGVHCQGESICQQLNCTMYKYKCTMVRNSTRCYCEDGFEITEDGRSCKDQDECAVYGTCSQTCRNTHGSYTCSCVEGYLMQPDNRSCKAKIEPTDRPPILLIANFETIEVFYLNGSKMATLSSVNGNEIHTLDFIYNEDMICWIESRESSNQLKCIQITKAGGLTDEWTINILQSFHNVQQMAIDWLTRNLYFVDHVGDRIFVCNSNGSVCVTLIDLELHNPKAIAVDPIAGKLFFTDYGNVAKVERCDMDGMNRTRIIDSKTEQPAALALDLVNKLVYWVDLYLDYVGVVDYQGKNRHTVIQGRQVRHLYGITVFEDYLYATNSDNYNIVRINRFNGTDIHSLIKIENAWGIRIYQKRTQPTVRSHACEVDPYGMPGGCSHICLLSSSYKTRTCRCRTGFNLGSDGRSCKRPKNELFLFYGKGRPGIVRGMDLNTKIADEYMIPIENLVNPRALDFHAETNYIYFADTTSFLIGRQKIDGTERETILKDDLDNVEGIAVDWIGNNLYWTNDGHRKTINVARLEKASQSRKTLLEGEMSHPRGIVVDPVNGWMYWTDWEEDEIDDSVGRIEKAWMDGFNRQIFVTSKMLWPNGLTLDFHTNTLYWCDAYYDHIEKVFLNGTHRKIVYSGRELNHPFGLSHHGNYVFWTDYMNGSIFQLDLITSEVTLLRHERPPLFGLQIYDPRKQQGDNMCRVNNGGCSTLCLAIPGGRVCACADNQLLDENGTTCTFNPGEALPHICKAGEFRCKNRHCIQARWKCDGDDDCLDGSDEDSVNCFNHSCPDDQFKCQNNRCIPKRWLCDGANDCGSNEDESNQTCTARTCQVDQFSCGNGRCIPRAWLCDREDDCGDQTDEMASCEFPTCEPLTQFVCKSGRCISSKWHCDSDDDCGDGSDEVGCVHSCFDNQFRCSSGRCIPGHWACDGDNDCGDFSDEAQINCTKEEIHSPAGCNGNEFQCHPDGNCVPDLWRCDGEKDCEDGSDEKGCNGTIRLCDHKTKFSCWSTGRCINKAWVCDGDIDCEDQSDEDDCDSFLCGPPKHPCANDTSVCLQPEKLCNGKKDCPDGSDEGYLCDECSLNNGGCSNHCSVVPGRGIVCSCPEGLQLNKDNKTCEIVDYCSNHLKCSQVCEQHKHTVKCSCYEGWKLDVDGESCTSVDPFEAFIIFSIRHEIRRIDLHKRDYSLLVPGLRNTIALDFHFNQSLLYWTDVVEDRIYRGKLSESGGVSAIEVVVEHGLATPEGLTVDWIAGNIYWIDSNLDQIEVAKLDGSLRTTLIAGAMEHPRAIALDPRYGILFWTDWDANFPRIESASMSGAGRKTIYKDMKTGAWPNGLTVDHFEKRIVWTDARSDAIYSALYDGTNMIEIIRGHEYLSHPFAVSLYGSEVYWTDWRTNTLSKANKWTGQNVSVIQKTSAQPFDLQIYHPSRQPQAPNPCAANDGKGPCSHMCLINHNRSAACACPHLMKLSSDKKTCYEMKKFLLYARRSEIRGVDIDNPYFNFITAFTVPDIDDVTVIDFDASEERLYWTDIKTQTIKRAFINGTGLETVISRDIQSIRGLAVDWVSRNLYWISSEFDETQINVARLDGSLKTSIIHGIDKPQCLAAHPVRGKLYWTDGNTINMANMDGSNSKILFQNQKEPVGLSIDYVENKLYWISSGNGTINRCNLDGGNLEVIESMKEELTKATALTIMDKKLWWADQNLAQLGTCSKRDGRNPTILRNKTSGVVHMKVYDKEAQQGSNSCQLNNGGCSQLCLPTSETTRTCMCTVGYYLQKNRMSCQGIESFLMYSVHEGIRGIPLEPSDKMDALMPISGTSFAVGIDFHAENDTIYWTDMGFNKISRAKRDQTWKEDIITNGLGRVEGIAVDWIAGNIYWTDHGFNLIEVARLNGSFRYVIISQGLDQPRSIAVHPEKGLLFWTEWGQMPCIGKARLDGSEKVVLVSMGIAWPNGISIDYEENKLYWCDARTDKIERIDLETGGNREMVLSGSNVDMFSVAVFGAYIYWSDRAHANGSVRRGHKNDATETITMRTGLGVNLKEVKIFNRVREKGTNVCARDNGGCKQLCLYRGNSRRTCACAHGYLAEDGVTCLRHEGYLLYSGRTILKSIHLSDETNLNSPIRPYENPRYFKNVIALAFDYNQRRKGTNRIFYSDAHFGNIQLIKDNWEDRQVIVENVGSVEGLAYHRAWDTLYWTSSTTSSITRHTVDQTRPGAFDREAVITMSEDDHPHVLALDECQNLMFWTNWNEQHPSIMRSTLTGKNAQVVVSTDILTPNGLTIDYRAEKLYFSDGSLGKIERCEYDGSQRHVIVKSGPGTFLSLAVYDNYIFWSDWGRRAILRSNKYTGGDTKILRSDIPHQPMGIIAVANDTNSCELSPCALLNGGCHDLCLLTPNGRVNCSCRGDRILLEDNRCVTKNSSCNAYSEFECGNGECIDYQLTCDGIPHCKDKSDEKLLYCENRSCRRGFKPCYNRRCIPHGKLCDGENDCGDNSDELDCKVSTCATVEFRCADGTCIPRSARCNQNIDCADASDEKNCNNTDCTHFYKLGVKTTGFIRCNSTSLCVLPTWICDGSNDCGDYSDELKCPVQNKHKCEENYFSCPSGRCILNTWICDGQKDCEDGRDEFHCDSSCSWNQFACSAQKCISKHWICDGEDDCGDGLDESDSICGAITCAADMFSCQGSRACVPRHWLCDGERDCPDGSDELSTAGCAPNNTCDENAFMCHNKVCIPKQFVCDHDDDCGDGSDESPQCGYRQCGTEEFSCADGRCLLNTQWQCDGDFDCPDHSDEAPLNPKCKSAEQSCNSSFFMCKNGRCIPSGGLCDNKDDCGDGSDERNCHINECLSKKVSGCSQDCQDLPVSYKCKCWPGFQLKDDGKTCVDIDECSSGFPCSQQCINTYGTYKCLCTDGYEIQPDNPNGCKSLSDEEPFLILADHHEIRKISTDGSNYTLLKQGLNNVIAIDFDYREEFIYWIDSSRPNGSRINRMCLNGSDIKVVHNTAVPNALAVDWIGKNLYWSDTEKRIIEVSKLNGLYPTILVSKRLKFPRDLSLDPQAGYLYWIDCCEYPHIGRVGMDGTNQSVVIETKISRPMALTIDYVNRRLYWADENHIEFSNMDGSHRHKVPNQDIPGVIALTLFEDYIYWTDGKTKSLSRAHKTSGADRLSLIYSWHAITDIQVYHSYRQPDVSKHLCMINNGGCSHLCLLAPGKTHTCACPTNFYLAADNRTCLSNCTASQFRCKTDKCIPFWWKCDTVDDCGDGSDEPDDCPEFRCQPGRFQCGTGLCALPAFICDGENDCGDNSDELNCDTHVCLSGQFKCTKNQKCIPVNLRCNGQDDCGDEEDERDCPENSCSPDYFQCKTTKHCISKLWVCDEDPDCADASDEANCDKKTCGPHEFQCKNNNCIPDHWRCDSQNDCSDNSDEENCKPQTCTLKDFLCANGDCVSSRFWCDGDFDCADGSDERNCETSCSKDQFRCSNGQCIPAKWKCDGHEDCKYGEDEKSCEPASPTCSSREYICASDGCISASLKCNGEYDCADGSDEMDCVTECKEDQFRCKNKAHCIPIRWLCDGIHDCVDGSDEENCERGGNICRADEFLCNNSLCKLHFWVCDGEDDCGDNSDEAPDMCVKFLCPSTRPHRCRNNRICLQSEQMCNGIDECGDNSDEDHCGGKLTYKARPCKKDEFACSNKKCIPMDLQCDRLDDCGDGSDEQGCRIAPTEYTCEDNVNPCGDDAYCNQIKTSVFCRCKPGFQRNMKNRQCEDLNECLVFGTCSHQCINVEGSYKCVCDQNFQERNNTCIAEGSEDQVLYIANDTDILGFIYPFNYSGDHQQISHIEHNSRITGMDVYYQRDMIIWSTQFNPGGIFYKRIHGREKRQANSGLICPEFKRPRDIAVDWVAGNIYWTDHSRMHWFSYYTTHWTSLRYSINVGQLNGPNCTRLLTNMAGEPYAIAVNPKRGMMYWTVVGDHSHIEEAAMDGTLRRILVQKNLQRPTGLAVDYFSERIYWADFELSIIGSVLYDGSNSVVSVSSKQGLLHPHRIDIFEDYIYGAGPKNGVFRVQKFGHGSVEYLALNIDKTKGVLISHRYKQLDLPNPCLDLACEFLCLLNPSGATCVCPEGKYLINGTCNDDSLLDDSCKLTCENGGRCILNEKGDLRCHCWPSYSGERCEVNHCSNYCQNGGTCVPSVLGRPTCSCALGFTGPNCGKTVCEDFCQNGGTCIVTAGNQPYCHCQPEYTGDRCQYYVCHHYCVNSESCTIGDDGSVECVCPTRYEGPKCEVDKCVRCHGGHCIINKDSEDIFCNCTNGKIASSCQLCDGYCYNGGTCQLDPETNVPVCLCSTNWSGTQCERPAPKSSKSDHISTRSIAIIVPLVLLVTLITTLVIGLVLCKRKRRTKTIRRQPIINGGINVEIGNPSYNMYEVDHDHNDGGLLDPGFMIDPTKARYIGGGPSAFKLPHTAPPIYLNSDLKGPLTAGPTNYSNPVYAKLYMDGQNCRNSLGSVDERKELLPKKIEIGIRETVA

SEQ ID NO: 199045 - DNA, 13800 bp, Artificial Sequence
  derived and/or modified sequence
atgagcgagttcctgctggccctgctgaccctgagcggcctgctgcccatcgccagagtgctgaccgtgggcgccgacagagaccagcagctgtgcgaccccggcgagttcctgtgccacgaccacgtgacctgcgtgagccagagctggctgtgcgacggcgaccccgactgccccgacgacagcgacgagagcctggacacctgccccgaggaggtggagatcaagtgccccctgaaccacatcgcctgcctgggcaccaacaagtgcgtgcacctgagccagctgtgcaacggcgtgctggactgccccgacggctacgacgagggcgtgcactgccaggagctgctgagcaactgccagcagctgaactgccagtacaagtgcaccatggtgagaaacagcaccagatgctactgcgaggacggcttcgagatcaccgaggacggcagaagctgcaaggaccaggacgagtgcgccgtgtacggcacctgcagccagacctgcagaaacacccacggcagctacacctgcagctgcgtggagggctacctgatgcagcccgacaacagaagctgcaaggccaagatcgagcccaccgacagaccccccatcctgctgatcgccaacttcgagaccatcgaggtgttctacctgaacggcagcaagatggccaccctgagcagcgtgaacggcaacgagatccacaccctggacttcatctacaacgaggacatgatctgctggatcgagagcagagagagcagcaaccagctgaagtgcatccagatcaccaaggccggcggcctgaccgacgagtggaccatcaacatcctgcagagcttccacaacgtgcagcagatggccatcgactggctgaccagaaacctgtacttcgtggaccacgtgggcgacagaatcttcgtgtgcaacagcaacggcagcgtgtgcgtgaccctgatcgacctggagctgcacaaccccaaggccatcgccgtggaccccatcgccggcaagctgttcttcaccgactacggcaacgtggccaaggtggagagatgcgacatggacggcatgaacagaaccagaatcatcgacagcaagaccgagcagcccgccgccctggccctggacctggtgaacaagctggtgtactgggtggacctgtacctggactacgtgggcgtggtggactaccagggcaagaacagacacaccgtgatccagggcagacaggtgagacacctgtacggcatcaccgtgttcgaggactacctgtacgccaccaacagcgacaactacaacatcgtgagaatcaacagattcaacggcaccgacatccacagcctgatcaagatcgagaacgcctggggcatcagaatctaccagaagagaacccagcccaccgtgagaagccacgcctgcgaggtggacccctacggcatgcccggcggctgcagccacatctgcctgctgagcagcagctacaagaccagaacctgcagatgcagaaccggcttcaacctgggcagcgacggcagaagctgcaagagacccaagaacgagctgttcctgttctacggcaagggcagacccggcatcgtgagaggcatggacctgaacaccaagatcgccgacgagtacatgatccccatcgagaacctggtgaaccccagagccctggacttccacgccgagaccaactacatctacttcgccgacaccaccagcttcctgatcggcagacagaagatcgacggcaccgagagagagaccatcctgaaggacgacctggacaacgtggagggcatcgccgtggactggatcggcaacaacctgtactggaccaacgacggccacagaaagaccatcaacgtggccagactggagaaggccagccagagcagaaagaccctgctggagggcgagatgagccaccccagaggcatcgtggtggaccccgtgaacggctggatgtactggaccgactgggaggaggacgagatcgacgacagcgtgggcagaatcgagaaggcctggatggacggcttcaacagacagatcttcgtgaccagcaagatgctgtggcccaacggcctgaccctggacttccacaccaacaccctgtactggtgcgacgcctactacgaccacatcgagaaggtgttcctgaacggcacccacagaaagatcgtgtacagcggcagagagctgaaccaccccttcggcctgagccaccacggcaactacgtgttctggaccgactacatgaacggcagcatcttccagctggacctgatcaccagcgaggtgaccctgctgagacacgagagaccccccctgttcggcctgcagatctacgaccccagaaagcagcagggcgacaacatgtgcagagtgaacaacggcggctgcagcaccctgtgcctggccatccccggcggcagagtgtgcgcctgcgccgacaaccagctgctggacgagaacggcaccacctgcaccttcaaccccggcgaggccctgccccacatctgcaaggccggcgagttcagatgcaagaacagacactgcatccaggccagatggaagtgcgacggcgacgacgactgcctggacggcagcgacgaggacagcgtgaactgcttcaaccacagctgccccgacgaccagttcaagtgccagaacaacagatgcatccccaagagatggctgtgcgacggcgccaacgactgcggcagcaacgaggacgagagcaaccagacctgcaccgccagaacctgccaggtggaccagttcagctgcggcaacggcagatgcatccccagagcctggctgtgcgacagagaggacgactgcggcgaccagaccgacgagatggccagctgcgagttccccacctgcgagcccctgacccagttcgtgtgcaagagcggcagatgcatcagcagcaagtggcactgcgacagcgacgacgactgcggcgacggcagcgacgaggtgggctgcgtgcacagctgcttcgacaaccagttcagatgcagcagcggcagatgcatccccggccactgggcctgcgacggcgacaacgactgcggcgacttcagcgacgaggcccagatcaactgcaccaaggaggagatccacagccccgccggctgcaacggcaacgagttccagtgccaccccgacggcaactgcgtgcccgacctgtggagatgcgacggcgagaaggactgcgaggacggcagcgacgagaagggctgcaacggcaccatcagactgtgcgaccacaagaccaagttcagctgctggagcaccggcagatgcatcaacaaggcctgggtgtgcgacggcgacatcgactgcgaggaccagagcgacgaggacgactgcgacagcttcctgtgcggcccccccaagcacccctgcgccaacgacaccagcgtgtgcctgcagcccgagaagctgtgcaacggcaagaaggactgccccgacggcagcgacgagggctacctgtgcgacgagtgcagcctgaacaacggcggctgcagcaaccactgcagcgtggtgcccggcagaggcatcgtgtgcagctgccccgagggcctgcagctgaacaaggacaacaagacctgcgagatcgtggactactgcagcaaccacctgaagtgcagccaggtgtgcgagcagcacaagcacaccgtgaagtgcagctgctacgagggctggaagctggacgtggacggcgagagctgcaccagcgtggaccccttcgaggccttcatcatcttcagcatcagacacgagatcagaagaatcgacctgcacaagagagactacagcctgctggtgcccggcctgagaaacaccatcgccctggacttccacttcaaccagagcctgctgtactggaccgacgtggtggaggacagaatctacagaggcaagctgagcgagagcggcggcgtgagcgccatcgaggtggtggtggagcacggcctggccacccccgagggcctgaccgtggactggatcgccggcaacatctactggatcgacagcaacctggaccagatcgaggtggccaagctggacggcagcctgagaaccaccctgatcgccggcgccatggagcaccccagagccatcgccctggaccccagatacggcatcctgttctggaccgactgggacgccaacttccccagaatcgagagcgccagcatgagcggcgccggcagaaagaccatctacaaggacatgaagaccggcgcctggcccaacggcctgaccgtggaccacttcgagaagagaatcgtgtggaccgacgccagaagcgacgccatctacagcgccctgtacgacggcaccaacatgatcgagatcatcagaggccacgagtacctgagccaccccttcgccgtgagcctgtacggcagcgaggtgtactggaccgactggagaaccaacaccctgagcaaggccaacaagtggaccggccagaacgtgagcgtgatccagaagaccagcgcccagcccttcgacctgcagatctaccaccccagcagacagccccaggcccccaacccctgcgccgccaacgacggcaagggcccctgcagccacatgtgcctgatcaaccacaacagaagcgccgcctgcgcctgcccccacctgatgaagctgagcagcgacaagaagacctgctacgagatgaagaagttcctgctgtacgccagaagaagcgagatcagaggcgtggacatcgacaacccctacttcaacttcatcaccgccttcaccgtgcccgacatcgacgacgtgaccgtgatcgacttcgacgccagcgaggagagactgtactggaccgacatcaagacccagaccatcaagagagccttcatcaacggcaccggcctggagaccgtgatcagcagagacatccagagcatcagaggcctggccgtggactgggtgagcagaaacctgtactggatcagcagcgagttcgacgagacccagatcaacgtggccagactggacggcagcctgaagaccagcatcatccacggcatcgacaagccccagtgcctggccgcccaccccgtgagaggcaagctgtactggaccgacggcaacaccatcaacatggccaacatggacggcagcaacagcaagatcctgttccagaaccagaaggagcccgtgggcctgagcatcgactacgtggagaacaagctgtactggatcagcagcggcaacggcaccatcaacagatgcaacctggacggcggcaacctggaggtgatcgagagcatgaaggaggagctgaccaaggccaccgccctgaccatcatggacaagaagctgtggtgggccgaccagaacctggcccagctgggcacctgcagcaagagagacggcagaaaccccaccatcctgagaaacaagaccagcggcgtggtgcacatgaaggtgtacgacaaggaggcccagcagggcagcaacagctgccagctgaacaacggcggctgcagccagctgtgcctgcccaccagcgagaccaccagaacctgcatgtgcaccgtgggctactacctgcagaagaacagaatgagctgccagggcatcgagagcttcctgatgtacagcgtgcacgagggcatcagaggcatccccctggagcccagcgacaagatggacgccctgatgcccatcagcggcaccagcttcgccgtgggcatcgacttccacgccgagaacgacaccatctactggaccgacatgggcttcaacaagatcagcagagccaagagagaccagacctggaaggaggacatcatcaccaacggcctgggcagagtggagggcatcgccgtggactggatcgccggcaacatctactggaccgaccacggcttcaacctgatcgaggtggccagactgaacggcagcttcagatacgtgatcatcagccagggcctggaccagcccagaagcatcgccgtgcaccccgagaagggcctgctgttctggaccgagtggggccagatgccctgcatcggcaaggccagactggacggcagcgagaaggtggtgctggtgagcatgggcatcgcctggcccaacggcatcagcatcgactacgaggagaacaagctgtactggtgcgacgccagaaccgacaagatcgagagaatcgacctggagaccggcggcaacagagagatggtgctgagcggcagcaacgtggacatgttcagcgtggccgtgttcggcgcctacatctactggagcgacagagcccacgccaacggcagcgtgagaagaggccacaagaacgacgccaccgagaccatcaccatgagaaccggcctgggcgtgaacctgaaggaggtgaagatcttcaacagagtgagagagaagggcaccaacgtgtgcgccagagacaacggcggctgcaagcagctgtgcctgtacagaggcaacagcagaagaacctgcgcctgcgcccacggctacctggccgaggacggcgtgacctgcctgagacacgagggctacctgctgtacagcggcagaaccatcctgaagagcatccacctgagcgacgagaccaacctgaacagccccatcagaccctacgagaaccccagatacttcaagaacgtgatcgccctggccttcgactacaaccagagaagaaagggcaccaacagaatcttctacagcgacgcccacttcggcaacatccagctgatcaaggacaactgggaggacagacaggtgatcgtggagaacgtgggcagcgtggagggcctggcctaccacagagcctgggacaccctgtactggaccagcagcaccaccagcagcatcaccagacacaccgtggaccagaccagacccggcgccttcgacagagaggccgtgatcaccatgagcgaggacgaccacccccacgtgctggccctggacgagtgccagaacctgatgttctggaccaactggaacgagcagcaccccagcatcatgagaagcaccctgaccggcaagaacgcccaggtggtggtgagcaccgacatcctgacccccaacggcctgaccatcgactacagagccgagaagctgtacttcagcgacggcagcctgggcaagatcgagagatgcgagtacgacggcagccagagacacgtgatcgtgaagagcggccccggcaccttcctgagcctggccgtgtacgacaactacatcttctggagcgactggggcagaagagccatcctgagaagcaacaagtacaccggcggcgacaccaagatcctgagaagcgacatcccccaccagcccatgggcatcatcgccgtggccaacgacaccaacagctgcgagctgagcccctgcgccctgctgaacggcggctgccacgacctgtgcctgctgacccccaacggcagagtgaactgcagctgcagaggcgacagaatcctgctggaggacaacagatgcgtgaccaagaacagcagctgcaacgcctacagcgagttcgagtgcggcaacggcgagtgcatcgactaccagctgacctgcgacggcatcccccactgcaaggacaagagcgacgagaagctgctgtactgcgagaacagaagctgcagaagaggcttcaagccctgctacaacagaagatgcatcccccacggcaagctgtgcgacggcgagaacgactgcggcgacaacagcgacgagctggactgcaaggtgagcacctgcgccaccgtggagttcagatgcgccgacggcacctgcatccccagaagcgccagatgcaaccagaacatcgactgcgccgacgccagcgacgagaagaactgcaacaacaccgactgcacccacttctacaagctgggcgtgaagaccaccggcttcatcagatgcaacagcaccagcctgtgcgtgctgcccacctggatctgcgacggcagcaacgactgcggcgactacagcgacgagctgaagtgccccgtgcagaacaagcacaagtgcgaggagaactacttcagctgccccagcggcagatgcatcctgaacacctggatctgcgacggccagaaggactgcgaggacggcagagacgagttccactgcgacagcagctgcagctggaaccagttcgcctgcagcgcccagaagtgcatcagcaagcactggatctgcgacggcgaggacgactgcggcgacggcctggacgagagcgacagcatctgcggcgccatcacctgcgccgccgacatgttcagctgccagggcagcagagcctgcgtgcccagacactggctgtgcgacggcgagagagactgccccgacggcagcgacgagctgagcaccgccggctgcgcccccaacaacacctgcgacgagaacgccttcatgtgccacaacaaggtgtgcatccccaagcagttcgtgtgcgaccacgacgacgactgcggcgacggcagcgacgagagcccccagtgcggctacagacagtgcggcaccgaggagttcagctgcgccgacggcagatgcctgctgaacacccagtggcagtgcgacggcgacttcgactgccccgaccacagcgacgaggcccccctgaaccccaagtgcaagagcgccgagcagagctgcaacagcagcttcttcatgtgcaagaacggcagatgcatccccagcggcggcctgtgcgacaacaaggacgactgcggcgacggcagcgacgagagaaactgccacatcaacgagtgcctgagcaagaaggtgagcggctgcagccaggactgccaggacctgcccgtgagctacaagtgcaagtgctggcccggcttccagctgaaggacgacggcaagacctgcgtggacatcgacgagtgcagcagcggcttcccctgcagccagcagtgcatcaacacctacggcacctacaagtgcctgtgcaccgacggctacgagatccagcccgacaaccccaacggctgcaagagcctgagcgacgaggagcccttcctgatcctggccgaccaccacgagatcagaaagatcagcaccgacggcagcaactacaccctgctgaagcagggcctgaacaacgtgatcgccatcgacttcgactacagagaggagttcatctactggatcgacagcagcagacccaacggcagcagaatcaacagaatgtgcctgaacggcagcgacatcaaggtggtgcacaacaccgccgtgcccaacgccctggccgtggactggatcggcaagaacctgtactggagcgacaccgagaagagaatcatcgaggtgagcaagctgaacggcctgtaccccaccatcctggtgagcaagagactgaagttccccagagacctgagcctggacccccaggccggctacctgtactggatcgactgctgcgagtacccccacatcggcagagtgggcatggacggcaccaaccagagcgtggtgatcgagaccaagatcagcagacccatggccctgaccatcgactacgtgaacagaagactgtactgggccgacgagaaccacatcgagttcagcaacatggacggcagccacagacacaaggtgcccaaccaggacatccccggcgtgatcgccctgaccctgttcgaggactacatctactggaccgacggcaagaccaagagcctgagcagagcccacaagaccagcggcgccgacagactgagcctgatctacagctggcacgccatcaccgacatccaggtgtaccacagctacagacagcccgacgtgagcaagcacctgtgcatgatcaacaacggcggctgcagccacctgtgcctgctggcccccggcaagacccacacctgcgcctgccccaccaacttctacctggccgccgacaacagaacctgcctgagcaactgcaccgccagccagttcagatgcaagaccgacaagtgcatccccttctggtggaagtgcgacaccgtggacgactgcggcgacggcagcgacgagcccgacgactgccccgagttcagatgccagcccggcagattccagtgcggcaccggcctgtgcgccctgcccgccttcatctgcgacggcgagaacgactgcggcgacaacagcgacgagctgaactgcgacacccacgtgtgcctgagcggccagttcaagtgcaccaagaaccagaagtgcatccccgtgaacctgagatgcaacggccaggacgactgcggcgacgaggaggacgagagagactgccccgagaacagctgcagccccgactacttccagtgcaagaccaccaagcactgcatcagcaagctgtgggtgtgcgacgaggaccccgactgcgccgacgccagcgacgaggccaactgcgacaagaagacctgcggcccccacgagttccagtgcaagaacaacaactgcatccccgaccactggagatgcgacagccagaacgactgcagcgacaacagcgacgaggagaactgcaagccccagacctgcaccctgaaggacttcctgtgcgccaacggcgactgcgtgagcagcagattctggtgcgacggcgacttcgactgcgccgacggcagcgacgagagaaactgcgagaccagctgcagcaaggaccagttcagatgcagcaacggccagtgcatccccgccaagtggaagtgcgacggccacgaggactgcaagtacggcgaggacgagaagagctgcgagcccgccagccccacctgcagcagcagagagtacatctgcgccagcgacggctgcatcagcgccagcctgaagtgcaacggcgagtacgactgcgccgacggcagcgacgagatggactgcgtgaccgagtgcaaggaggaccagttcagatgcaagaacaaggcccactgcatccccatcagatggctgtgcgacggcatccacgactgcgtggacggcagcgacgaggagaactgcgagagaggcggcaacatctgcagagccgacgagttcctgtgcaacaacagcctgtgcaagctgcacttctgggtgtgcgacggcgaggacgactgcggcgacaacagcgacgaggcccccgacatgtgcgtgaagttcctgtgccccagcaccagaccccacagatgcagaaacaacagaatctgcctgcagagcgagcagatgtgcaacggcatcgacgagtgcggcgacaacagcgacgaggaccactgcggcggcaagctgacctacaaggccagaccctgcaagaaggacgagttcgcctgcagcaacaagaagtgcatccccatggacctgcagtgcgacagactggacgactgcggcgacggcagcgacgagcagggctgcagaatcgcccccaccgagtacacctgcgaggacaacgtgaacccctgcggcgacgacgcctactgcaaccagatcaagaccagcgtgttctgcagatgcaagcccggcttccagagaaacatgaagaacagacagtgcgaggacctgaacgagtgcctggtgttcggcacctgcagccaccagtgcatcaacgtggagggcagctacaagtgcgtgtgcgaccagaacttccaggagagaaacaacacctgcatcgccgagggcagcgaggaccaggtgctgtacatcgccaacgacaccgacatcctgggcttcatctaccccttcaactacagcggcgaccaccagcagatcagccacatcgagcacaacagcagaatcaccggcatggacgtgtactaccagagagacatgatcatctggagcacccagttcaaccccggcggcatcttctacaagagaatccacggcagagagaagagacaggccaacagcggcctgatctgccccgagttcaagagacccagagacatcgccgtggactgggtggccggcaacatctactggaccgaccacagcagaatgcactggttcagctactacaccacccactggaccagcctgagatacagcatcaacgtgggccagctgaacggccccaactgcaccagactgctgaccaacatggccggcgagccctacgccatcgccgtgaaccccaagagaggcatgatgtactggaccgtggtgggcgaccacagccacatcgaggaggccgccatggacggcaccctgagaagaatcctggtgcagaagaacctgcagagacccaccggcctggccgtggactacttcagcgagagaatctactgggccgacttcgagctgagcatcatcggcagcgtgctgtacgacggcagcaacagcgtggtgagcgtgagcagcaagcagggcctgctgcacccccacagaatcgacatcttcgaggactacatctacggcgccggccccaagaacggcgtgttcagagtgcagaagttcggccacggcagcgtggagtacctggccctgaacatcgacaagaccaagggcgtgctgatcagccacagatacaagcagctggacctgcccaacccctgcctggacctggcctgcgagttcctgtgcctgctgaaccccagcggcgccacctgcgtgtgccccgagggcaagtacctgatcaacggcacctgcaacgacgacagcctgctggacgacagctgcaagctgacctgcgagaacggcggcagatgcatcctgaacgagaagggcgacctgagatgccactgctggcccagctacagcggcgagagatgcgaggtgaaccactgcagcaactactgccagaacggcggcacctgcgtgcccagcgtgctgggcagacccacctgcagctgcgccctgggcttcaccggccccaactgcggcaagaccgtgtgcgaggacttctgccagaacggcggcacctgcatcgtgaccgccggcaaccagccctactgccactgccagcccgagtacaccggcgacagatgccagtactacgtgtgccaccactactgcgtgaacagcgagagctgcaccatcggcgacgacggcagcgtggagtgcgtgtgccccaccagatacgagggccccaagtgcgaggtggacaagtgcgtgagatgccacggcggccactgcatcatcaacaaggacagcgaggacatcttctgcaactgcaccaacggcaagatcgccagcagctgccagctgtgcgacggctactgctacaacggcggcacctgccagctggaccccgagaccaacgtgcccgtgtgcctgtgcagcaccaactggagcggcacccagtgcgagagacccgcccccaagagcagcaagagcgaccacatcagcaccagaagcatcgccatcatcgtgcccctggtgctgctggtgaccctgatcaccaccctggtgatcggcctggtgctgtgcaagagaaagagaagaaccaagaccatcagaagacagcccatcatcaacggcggcatcaacgtggagatcggcaaccccagctacaacatgtacgaggtggaccacgaccacaacgacggcggcctgctggaccccggcttcatgatcgaccccaccaaggccagatacatcggcggcggccccagcgccttcaagctgccccacaccgccccccccatctacctgaacagcgacctgaagggccccctgaccgccggccccaccaactacagcaaccccgtgtacgccaagctgtacatggacggccagaactgcagaaacagcctgggcagcgtggacgagagaaaggagctgctgcccaagaagatcgagatcggcatcagagagaccgtggcctag

SEQ ID NO: 199046 - DNA, 2349 bp, Artificial Sequence
  derived and/or modified sequence
atgagcgagttcctgctggccctgctgaccctgagcggcctgctgcccatcgccagagtgctgaccgtgggcgccgacagagaccagcagctgtgcgaccccggcgagttcctgtgccacgaccacgtgacctgcgtgagccagagctggctgtgcgacggcgaccccgactgccccgacgacagcgacgagagcctggacaccagcagaacctgccaggtggaccagttcagctgcggcaacggcagatgcatccccagagcctggctgtgcgacagagaggacgactgcggcgaccagaccgacgagatggccagctgcgagttccccacctgcgagcccctgacccagttcgtgtgcaagagcggcagatgcatcagcagcaagtggcactgcgacagcgacgacgactgcggcgacggcagcgacgaggtgggctgcgtgcacagctgcttcgacaaccagttcagatgcagcagcggcagatgcatccccggccactgggcctgcgacggcgacaacgactgcggcgacttcagcgacgaggcccagatcaactgcaccaaggaggagatccacagccccgccggctgcaacggcaacgagttccagtgccaccccgacggcaactgcgtgcccgacctgtggagatgcgacggcgagaaggactgcgaggacggcagcgacgagaagggctgcaacggcaccatcagactgtgcgaccacaagaccaagttcagctgctggagcaccggcagatgcatcaacaaggcctgggtgtgcgacggcgacatcgactgcgaggaccagagcgacgaggacgactgcgacagcttcctgtgcggcccccccaagcacccctgcgccaacgacaccagcgtgtgcctgcagcccgagaagctgtgcaacggcaagaaggactgccccgacggcagcgacgagggctacctgtgcgacgagtgcagcctgaacaacggcggctgcagcaaccactgcagcgtggtgcccggcagaggcatcgtgtgcagctgccccgagggcctgcagctgaacaaggacaacaagacctgcgagatcgtggactactgcagcaaccacctgaagtgcagccaggtgtgcgagcagcacaagcacaccgtgaagtgcagctgctacgagggctggaagctggacgtggacggcgagagctgcaccagcgtggaccccttcgaggccttcatcatcttcagcatcagacacgagatcagaagaatcgacctgcacaagagagactacagcctgctggtgcccggcctgagaaacaccatcgccctggacttccacttcaaccagagcctgctgtactggaccgacgtggtggaggacagaatctacagaggcaagctgagcgagagcggcggcgtgagcgccatcgaggtggtggtggagcacggcctggccacccccgagggcctgaccgtggactggatcgccggcaacatctactggatcgacagcaacctggaccagatcgaggtggccaagctggacggcagcctgagaaccaccctgatcgccggcgccatggagcaccccagagccatcgccctggaccccagatacggcatcctgttctggaccgactgggacgccaacttccccagaatcgagagcgccagcatgagcggcgccggcagaaagaccatctacaaggacatgaagaccggcgcctggcccaacggcctgaccgtggaccacttcgagaagagaatcgtgtggaccgacgccagaagcgacgccatctacagcgccctgtacgacggcaccaacatgatcgagatcatcagaggccacgagtacctgagccaccccttcgccgtgagcctgtacggcagcgaggtgtactggaccgactggagaaccaacaccctgagcaaggccaacaagtggaccggccagaacgtgagcgtgatccagaagaccagcgcccagcccttcgacctgcagatctaccaccccagcagacagccccaggcccccaacccctgcgccgccaacgacggcaagggcccctgcagccacatgtgcctgatcaaccacaacagaagcgccgcctgcgcctgcccccacctgatgaagctgagcagcgacaagaagacctgctacgagatgaagaagttcctgctgtacgccagaagaagcgagatcagaggcgtggacatcgacaacccctacttcaacttcatcaccgccttcaccgtgcccgacatcgacgacgtgaccgtgatcgacttcgacgccagcgaggagagactgtactggaccgacatcaagacccagaccatcaagagagccttcatcaacggctag

SEQ ID NO: 199047 - DNA, 13614 bp, Artificial Sequence
  derived and/or modified sequence
ttcctgcacagcggccccgaggaggtggagatcaagtgccccctgaaccacatcgcctgcctgggcaccaacaagtgcgtgcacctgagccagctgtgcaacggcgtgctggactgccccgacggctacgacgagggcgtgcactgccagggcgagagcatctgccagcagctgaactgcaccatgtacaagtacaagtgcaccatggtgagaaacagcaccagatgctactgcgaggacggcttcgagatcaccgaggacggcagaagctgcaaggaccaggacgagtgcgccgtgtacggcacctgcagccagacctgcagaaacacccacggcagctacacctgcagctgcgtggagggctacctgatgcagcccgacaacagaagctgcaaggccaagatcgagcccaccgacagaccccccatcctgctgatcgccaacttcgagaccatcgaggtgttctacctgaacggcagcaagatggccaccctgagcagcgtgaacggcaacgagatccacaccctggacttcatctacaacgaggacatgatctgctggatcgagagcagagagagcagcaaccagctgaagtgcatccagatcaccaaggccggcggcctgaccgacgagtggaccatcaacatcctgcagagcttccacaacgtgcagcagatggccatcgactggctgaccagaaacctgtacttcgtggaccacgtgggcgacagaatcttcgtgtgcaacagcaacggcagcgtgtgcgtgaccctgatcgacctggagctgcacaaccccaaggccatcgccgtggaccccatcgccggcaagctgttcttcaccgactacggcaacgtggccaaggtggagagatgcgacatggacggcatgaacagaaccagaatcatcgacagcaagaccgagcagcccgccgccctggccctggacctggtgaacaagctggtgtactgggtggacctgtacctggactacgtgggcgtggtggactaccagggcaagaacagacacaccgtgatccagggcagacaggtgagacacctgtacggcatcaccgtgttcgaggactacctgtacgccaccaacagcgacaactacaacatcgtgagaatcaacagattcaacggcaccgacatccacagcctgatcaagatcgagaacgcctggggcatcagaatctaccagaagagaacccagcccaccgtgagaagccacgcctgcgaggtggacccctacggcatgcccggcggctgcagccacatctgcctgctgagcagcagctacaagaccagaacctgcagatgcagaaccggcttcaacctgggcagcgacggcagaagctgcaagagacccaagaacgagctgttcctgttctacggcaagggcagacccggcatcgtgagaggcatggacctgaacaccaagatcgccgacgagtacatgatccccatcgagaacctggtgaaccccagagccctggacttccacgccgagaccaactacatctacttcgccgacaccaccagcttcctgatcggcagacagaagatcgacggcaccgagagagagaccatcctgaaggacgacctggacaacgtggagggcatcgccgtggactggatcggcaacaacctgtactggaccaacgacggccacagaaagaccatcaacgtggccagactggagaaggccagccagagcagaaagaccctgctggagggcgagatgagccaccccagaggcatcgtggtggaccccgtgaacggctggatgtactggaccgactgggaggaggacgagatcgacgacagcgtgggcagaatcgagaaggcctggatggacggcttcaacagacagatcttcgtgaccagcaagatgctgtggcccaacggcctgaccctggacttccacaccaacaccctgtactggtgcgacgcctactacgaccacatcgagaaggtgttcctgaacggcacccacagaaagatcgtgtacagcggcagagagctgaaccaccccttcggcctgagccaccacggcaactacgtgttctggaccgactacatgaacggcagcatcttccagctggacctgatcaccagcgaggtgaccctgctgagacacgagagaccccccctgttcggcctgcagatctacgaccccagaaagcagcagggcgacaacatgtgcagagtgaacaacggcggctgcagcaccctgtgcctggccatccccggcggcagagtgtgcgcctgcgccgacaaccagctgctggacgagaacggcaccacctgcaccttcaaccccggcgaggccctgccccacatctgcaaggccggcgagttcagatgcaagaacagacactgcatccaggccagatggaagtgcgacggcgacgacgactgcctggacggcagcgacgaggacagcgtgaactgcttcaaccacagctgccccgacgaccagttcaagtgccagaacaacagatgcatccccaagagatggctgtgcgacggcgccaacgactgcggcagcaacgaggacgagagcaaccagacctgcaccgccagaacctgccaggtggaccagttcagctgcggcaacggcagatgcatccccagagcctggctgtgcgacagagaggacgactgcggcgaccagaccgacgagatggccagctgcgagttccccacctgcgagcccctgacccagttcgtgtgcaagagcggcagatgcatcagcagcaagtggcactgcgacagcgacgacgactgcggcgacggcagcgacgaggtgggctgcgtgcacagctgcttcgacaaccagttcagatgcagcagcggcagatgcatccccggccactgggcctgcgacggcgacaacgactgcggcgacttcagcgacgaggcccagatcaactgcaccaaggaggagatccacagccccgccggctgcaacggcaacgagttccagtgccaccccgacggcaactgcgtgcccgacctgtggagatgcgacggcgagaaggactgcgaggacggcagcgacgagaagggctgcaacggcaccatcagactgtgcgaccacaagaccaagttcagctgctggagcaccggcagatgcatcaacaaggcctgggtgtgcgacggcgacatcgactgcgaggaccagagcgacgaggacgactgcgacagcttcctgtgcggcccccccaagcacccctgcgccaacgacaccagcgtgtgcctgcagcccgagaagctgtgcaacggcaagaaggactgccccgacggcagcgacgagggctacctgtgcgacgagtgcagcctgaacaacggcggctgcagcaaccactgcagcgtggtgcccggcagaggcatcgtgtgcagctgccccgagggcctgcagctgaacaaggacaacaagacctgcgagatcgtggactactgcagcaaccacctgaagtgcagccaggtgtgcgagcagcacaagcacaccgtgaagtgcagctgctacgagggctggaagctggacgtggacggcgagagctgcaccagcgtggaccccttcgaggccttcatcatcttcagcatcagacacgagatcagaagaatcgacctgcacaagagagactacagcctgctggtgcccggcctgagaaacaccatcgccctggacttccacttcaaccagagcctgctgtactggaccgacgtggtggaggacagaatctacagaggcaagctgagcgagagcggcggcgtgagcgccatcgaggtggtggtggagcacggcctggccacccccgagggcctgaccgtggactggatcgccggcaacatctactggatcgacagcaacctggaccagatcgaggtggccaagctggacggcagcctgagaaccaccctgatcgccggcgccatggagcaccccagagccatcgccctggaccccagatacggcatcctgttctggaccgactgggacgccaacttccccagaatcgagagcgccagcatgagcggcgccggcagaaagaccatctacaaggacatgaagaccggcgcctggcccaacggcctgaccgtggaccacttcgagaagagaatcgtgtggaccgacgccagaagcgacgccatctacagcgccctgtacgacggcaccaacatgatcgagatcatcagaggccacgagtacctgagccaccccttcgccgtgagcctgtacggcagcgaggtgtactggaccgactggagaaccaacaccctgagcaaggccaacaagtggaccggccagaacgtgagcgtgatccagaagaccagcgcccagcccttcgacctgcagatctaccaccccagcagacagccccaggcccccaacccctgcgccgccaacgacggcaagggcccctgcagccacatgtgcctgatcaaccacaacagaagcgccgcctgcgcctgcccccacctgatgaagctgagcagcgacaagaagacctgctacgagatgaagaagttcctgctgtacgccagaagaagcgagatcagaggcgtggacatcgacaacccctacttcaacttcatcaccgccttcaccgtgcccgacatcgacgacgtgaccgtgatcgacttcgacgccagcgaggagagactgtactggaccgacatcaagacccagaccatcaagagagccttcatcaacggcaccggcctggagaccgtgatcagcagagacatccagagcatcagaggcctggccgtggactgggtgagcagaaacctgtactggatcagcagcgagttcgacgagacccagatcaacgtggccagactggacggcagcctgaagaccagcatcatccacggcatcgacaagccccagtgcctggccgcccaccccgtgagaggcaagctgtactggaccgacggcaacaccatcaacatggccaacatggacggcagcaacagcaagatcctgttccagaaccagaaggagcccgtgggcctgagcatcgactacgtggagaacaagctgtactggatcagcagcggcaacggcaccatcaacagatgcaacctggacggcggcaacctggaggtgatcgagagcatgaaggaggagctgaccaaggccaccgccctgaccatcatggacaagaagctgtggtgggccgaccagaacctggcccagctgggcacctgcagcaagagagacggcagaaaccccaccatcctgagaaacaagaccagcggcgtggtgcacatgaaggtgtacgacaaggaggcccagcagggcagcaacagctgccagctgaacaacggcggctgcagccagctgtgcctgcccaccagcgagaccaccagaacctgcatgtgcaccgtgggctactacctgcagaagaacagaatgagctgccagggcatcgagagcttcctgatgtacagcgtgcacgagggcatcagaggcatccccctggagcccagcgacaagatggacgccctgatgcccatcagcggcaccagcttcgccgtgggcatcgacttccacgccgagaacgacaccatctactggaccgacatgggcttcaacaagatcagcagagccaagagagaccagacctggaaggaggacatcatcaccaacggcctgggcagagtggagggcatcgccgtggactggatcgccggcaacatctactggaccgaccacggcttcaacctgatcgaggtggccagactgaacggcagcttcagatacgtgatcatcagccagggcctggaccagcccagaagcatcgccgtgcaccccgagaagggcctgctgttctggaccgagtggggccagatgccctgcatcggcaaggccagactggacggcagcgagaaggtggtgctggtgagcatgggcatcgcctggcccaacggcatcagcatcgactacgaggagaacaagctgtactggtgcgacgccagaaccgacaagatcgagagaatcgacctggagaccggcggcaacagagagatggtgctgagcggcagcaacgtggacatgttcagcgtggccgtgttcggcgcctacatctactggagcgacagagcccacgccaacggcagcgtgagaagaggccacaagaacgacgccaccgagaccatcaccatgagaaccggcctgggcgtgaacctgaaggaggtgaagatcttcaacagagtgagagagaagggcaccaacgtgtgcgccagagacaacggcggctgcaagcagctgtgcctgtacagaggcaacagcagaagaacctgcgcctgcgcccacggctacctggccgaggacggcgtgacctgcctgagacacgagggctacctgctgtacagcggcagaaccatcctgaagagcatccacctgagcgacgagaccaacctgaacagccccatcagaccctacgagaaccccagatacttcaagaacgtgatcgccctggccttcgactacaaccagagaagaaagggcaccaacagaatcttctacagcgacgcccacttcggcaacatccagctgatcaaggacaactgggaggacagacaggtgatcgtggagaacgtgggcagcgtggagggcctggcctaccacagagcctgggacaccctgtactggaccagcagcaccaccagcagcatcaccagacacaccgtggaccagaccagacccggcgccttcgacagagaggccgtgatcaccatgagcgaggacgaccacccccacgtgctggccctggacgagtgccagaacctgatgttctggaccaactggaacgagcagcaccccagcatcatgagaagcaccctgaccggcaagaacgcccaggtggtggtgagcaccgacatcctgacccccaacggcctgaccatcgactacagagccgagaagctgtacttcagcgacggcagcctgggcaagatcgagagatgcgagtacgacggcagccagagacacgtgatcgtgaagagcggccccggcaccttcctgagcctggccgtgtacgacaactacatcttctggagcgactggggcagaagagccatcctgagaagcaacaagtacaccggcggcgacaccaagatcctgagaagcgacatcccccaccagcccatgggcatcatcgccgtggccaacgacaccaacagctgcgagctgagcccctgcgccctgctgaacggcggctgccacgacctgtgcctgctgacccccaacggcagagtgaactgcagctgcagaggcgacagaatcctgctggaggacaacagatgcgtgaccaagaacagcagctgcaacgcctacagcgagttcgagtgcggcaacggcgagtgcatcgactaccagctgacctgcgacggcatcccccactgcaaggacaagagcgacgagaagctgctgtactgcgagaacagaagctgcagaagaggcttcaagccctgctacaacagaagatgcatcccccacggcaagctgtgcgacggcgagaacgactgcggcgacaacagcgacgagctggactgcaaggtgagcacctgcgccaccgtggagttcagatgcgccgacggcacctgcatccccagaagcgccagatgcaaccagaacatcgactgcgccgacgccagcgacgagaagaactgcaacaacaccgactgcacccacttctacaagctgggcgtgaagaccaccggcttcatcagatgcaacagcaccagcctgtgcgtgctgcccacctggatctgcgacggcagcaacgactgcggcgactacagcgacgagctgaagtgccccgtgcagaacaagcacaagtgcgaggagaactacttcagctgccccagcggcagatgcatcctgaacacctggatctgcgacggccagaaggactgcgaggacggcagagacgagttccactgcgacagcagctgcagctggaaccagttcgcctgcagcgcccagaagtgcatcagcaagcactggatctgcgacggcgaggacgactgcggcgacggcctggacgagagcgacagcatctgcggcgccatcacctgcgccgccgacatgttcagctgccagggcagcagagcctgcgtgcccagacactggctgtgcgacggcgagagagactgccccgacggcagcgacgagctgagcaccgccggctgcgcccccaacaacacctgcgacgagaacgccttcatgtgccacaacaaggtgtgcatccccaagcagttcgtgtgcgaccacgacgacgactgcggcgacggcagcgacgagagcccccagtgcggctacagacagtgcggcaccgaggagttcagctgcgccgacggcagatgcctgctgaacacccagtggcagtgcgacggcgacttcgactgccccgaccacagcgacgaggcccccctgaaccccaagtgcaagagcgccgagcagagctgcaacagcagcttcttcatgtgcaagaacggcagatgcatccccagcggcggcctgtgcgacaacaaggacgactgcggcgacggcagcgacgagagaaactgccacatcaacgagtgcctgagcaagaaggtgagcggctgcagccaggactgccaggacctgcccgtgagctacaagtgcaagtgctggcccggcttccagctgaaggacgacggcaagacctgcgtggacatcgacgagtgcagcagcggcttcccctgcagccagcagtgcatcaacacctacggcacctacaagtgcctgtgcaccgacggctacgagatccagcccgacaaccccaacggctgcaagagcctgagcgacgaggagcccttcctgatcctggccgaccaccacgagatcagaaagatcagcaccgacggcagcaactacaccctgctgaagcagggcctgaacaacgtgatcgccatcgacttcgactacagagaggagttcatctactggatcgacagcagcagacccaacggcagcagaatcaacagaatgtgcctgaacggcagcgacatcaaggtggtgcacaacaccgccgtgcccaacgccctggccgtggactggatcggcaagaacctgtactggagcgacaccgagaagagaatcatcgaggtgagcaagctgaacggcctgtaccccaccatcctggtgagcaagagactgaagttccccagagacctgagcctggacccccaggccggctacctgtactggatcgactgctgcgagtacccccacatcggcagagtgggcatggacggcaccaaccagagcgtggtgatcgagaccaagatcagcagacccatggccctgaccatcgactacgtgaacagaagactgtactgggccgacgagaaccacatcgagttcagcaacatggacggcagccacagacacaaggtgcccaaccaggacatccccggcgtgatcgccctgaccctgttcgaggactacatctactggaccgacggcaagaccaagagcctgagcagagcccacaagaccagcggcgccgacagactgagcctgatctacagctggcacgccatcaccgacatccaggtgtaccacagctacagacagcccgacgtgagcaagcacctgtgcatgatcaacaacggcggctgcagccacctgtgcctgctggcccccggcaagacccacacctgcgcctgccccaccaacttctacctggccgccgacaacagaacctgcctgagcaactgcaccgccagccagttcagatgcaagaccgacaagtgcatccccttctggtggaagtgcgacaccgtggacgactgcggcgacggcagcgacgagcccgacgactgccccgagttcagatgccagcccggcagattccagtgcggcaccggcctgtgcgccctgcccgccttcatctgcgacggcgagaacgactgcggcgacaacagcgacgagctgaactgcgacacccacgtgtgcctgagcggccagttcaagtgcaccaagaaccagaagtgcatccccgtgaacctgagatgcaacggccaggacgactgcggcgacgaggaggacgagagagactgccccgagaacagctgcagccccgactacttccagtgcaagaccaccaagcactgcatcagcaagctgtgggtgtgcgacgaggaccccgactgcgccgacgccagcgacgaggccaactgcgacaagaagacctgcggcccccacgagttccagtgcaagaacaacaactgcatccccgaccactggagatgcgacagccagaacgactgcagcgacaacagcgacgaggagaactgcaagccccagacctgcaccctgaaggacttcctgtgcgccaacggcgactgcgtgagcagcagattctggtgcgacggcgacttcgactgcgccgacggcagcgacgagagaaactgcgagaccagctgcagcaaggaccagttcagatgcagcaacggccagtgcatccccgccaagtggaagtgcgacggccacgaggactgcaagtacggcgaggacgagaagagctgcgagcccgccagccccacctgcagcagcagagagtacatctgcgccagcgacggctgcatcagcgccagcctgaagtgcaacggcgagtacgactgcgccgacggcagcgacgagatggactgcgtgaccgagtgcaaggaggaccagttcagatgcaagaacaaggcccactgcatccccatcagatggctgtgcgacggcatccacgactgcgtggacggcagcgacgaggagaactgcgagagaggcggcaacatctgcagagccgacgagttcctgtgcaacaacagcctgtgcaagctgcacttctgggtgtgcgacggcgaggacgactgcggcgacaacagcgacgaggcccccgacatgtgcgtgaagttcctgtgccccagcaccagaccccacagatgcagaaacaacagaatctgcctgcagagcgagcagatgtgcaacggcatcgacgagtgcggcgacaacagcgacgaggaccactgcggcggcaagctgacctacaaggccagaccctgcaagaaggacgagttcgcctgcagcaacaagaagtgcatccccatggacctgcagtgcgacagactggacgactgcggcgacggcagcgacgagcagggctgcagaatcgcccccaccgagtacacctgcgaggacaacgtgaacccctgcggcgacgacgcctactgcaaccagatcaagaccagcgtgttctgcagatgcaagcccggcttccagagaaacatgaagaacagacagtgcgaggacctgaacgagtgcctggtgttcggcacctgcagccaccagtgcatcaacgtggagggcagctacaagtgcgtgtgcgaccagaacttccaggagagaaacaacacctgcatcgccgagggcagcgaggaccaggtgctgtacatcgccaacgacaccgacatcctgggcttcatctaccccttcaactacagcggcgaccaccagcagatcagccacatcgagcacaacagcagaatcaccggcatggacgtgtactaccagagagacatgatcatctggagcacccagttcaaccccggcggcatcttctacaagagaatccacggcagagagaagagacaggccaacagcggcctgatctgccccgagttcaagagacccagagacatcgccgtggactgggtggccggcaacatctactggaccgaccacagcagaatgcactggttcagctactacaccacccactggaccagcctgagatacagcatcaacgtgggccagctgaacggccccaactgcaccagactgctgaccaacatggccggcgagccctacgccatcgccgtgaaccccaagagaggcatgatgtactggaccgtggtgggcgaccacagccacatcgaggaggccgccatggacggcaccctgagaagaatcctggtgcagaagaacctgcagagacccaccggcctggccgtggactacttcagcgagagaatctactgggccgacttcgagctgagcatcatcggcagcgtgctgtacgacggcagcaacagcgtggtgagcgtgagcagcaagcagggcctgctgcacccccacagaatcgacatcttcgaggactacatctacggcgccggccccaagaacggcgtgttcagagtgcagaagttcggccacggcagcgtggagtacctggccctgaacatcgacaagaccaagggcgtgctgatcagccacagatacaagcagctggacctgcccaacccctgcctggacctggcctgcgagttcctgtgcctgctgaaccccagcggcgccacctgcgtgtgccccgagggcaagtacctgatcaacggcacctgcaacgacgacagcctgctggacgacagctgcaagctgacctgcgagaacggcggcagatgcatcctgaacgagaagggcgacctgagatgccactgctggcccagctacagcggcgagagatgcgaggtgaaccactgcagcaactactgccagaacggcggcacctgcgtgcccagcgtgctgggcagacccacctgcagctgcgccctgggcttcaccggccccaactgcggcaagaccgtgtgcgaggacttctgccagaacggcggcacctgcatcgtgaccgccggcaaccagccctactgccactgccagcccgagtacaccggcgacagatgccagtactacgtgtgccaccactactgcgtgaacagcgagagctgcaccatcggcgacgacggcagcgtggagtgcgtgtgccccaccagatacgagggccccaagtgcgaggtggacaagtgcgtgagatgccacggcggccactgcatcatcaacaaggacagcgaggacatcttctgcaactgcaccaacggcaagatcgccagcagctgccagctgtgcgacggctactgctacaacggcggcacctgccagctggaccccgagaccaacgtgcccgtgtgcctgtgcagcaccaactggagcggcacccagtgcgagagacccgcccccaagagcagcaagagcgaccacatcagcaccagaagcatcgccatcatcgtgcccctggtgctgctggtgaccctgatcaccaccctggtgatcggcctggtgctgtgcaagagaaagagaagaaccaagaccatcagaagacagcccatcatcaacggcggcatcaacgtggagatcggcaaccccagctacaacatgtacgaggtggaccacgaccacaacgacggcggcctgctggaccccggcttcatgatcgaccccaccaaggccagatacatcggcggcggccccagcgccttcaagctgccccacaccgccccccccatctacctgaacagcgacctgaagggccccctgaccgccggccccaccaactacagcaaccccgtgtacgccaagctgtacatggacggccagaactgcagaaacagcctgggcagcgtggacgagagaaaggagctgctgcccaagaagatcgagatcggcatcagagagaccgtggcctag

SEQ ID NO: 199048 - DNA, 13800 bp, Artificial Sequence
  derived and/or modified sequence
atgtctgagttcttgctcgcacttctcaccctgtctggtttgctgccaatagccagggtgttgactgtcggcgccgatcgtgatcagcagctttgtgaccccggggagtttctgtgccatgatcatgtcacttgtgttagccaaagctggctgtgcgacggggatcctgactgtcccgacgatagtgacgaatctttagatacatgcccagaggaagtcgaaattaagtgtcctttgaatcacattgcctgcctgggcactaacaaatgtgtgcatctttcccagctttgcaatggcgtgctggactgtcccgacggctatgatgagggcgtgcactgccaggaactgctctccaactgtcagcagctgaattgtcaatacaaatgcactatggtgcgcaactccacccggtgctactgcgaggacggcttcgagatcactgaggatggccggtcctgtaaggatcaggacgagtgtgccgtgtatggcacgtgttctcaaacttgtcggaacacccacgggtcatacacatgttcatgtgtggaggggtacctcatgcagcccgataaccggtcctgcaaggccaagattgagcccaccgaccgaccgcctatcttactgatcgctaactttgagaccattgaagtgttctatctcaatggatcgaagatggctacgctaagctctgttaatgggaacgaaatccatacactagatttcatctacaacgaggatatgatctgctggatagaatcacgggaatcctcaaatcagctgaagtgcattcagatcacaaaagccggtgggttgacggacgaatggaccataaacatattgcagagtttccacaatgtgcagcagatggctatcgattggttaacacgcaatctgtactttgtggaccacgtgggcgatcgtatatttgtgtgtaattcaaacggtagcgtgtgcgtcaccttaattgacctggagctgcacaacccaaaagcaattgctgtggatccaattgctggaaagctgttctttacagattatggtaatgtggcaaaagtcgagagatgtgatatggacgggatgaacaggacaaggataatcgactctaaaacggagcaacctgcagcattggctttggatctcgtgaacaaactagtgtactgggtcgatctctatctggactacgtcggtgtggtggattaccagggtaagaatcggcatacagttattcagggaaggcaggtgaggcacttgtacgggattactgtgtttgaggactatctgtatgctactaacagcgataactataacattgtcaggatcaaccggtttaatggaacagatatacactctctgataaaaattgaaaatgcttggggtataagaatttatcagaaacgcactcagcctaccgtccggagccacgcctgtgaagtagacccatatggcatgccaggtggctgttctcacatatgcctcctatcctcctcgtacaaaacacgcacttgtcggtgccgcaccggattcaatctgggcagcgacggaaggagctgcaagaggcccaaaaatgaactcttcctcttttatgggaaaggtcgccctgggatcgtgcgagggatggacctgaacacaaagattgccgacgaatatatgattcctatcgagaatctggtgaaccccagagctttagatttccacgccgaaacgaactatatttactttgccgatactacctcttttttaattgggagacagaaaattgatggcaccgaaagggaaaccattctcaaagacgacctcgacaatgtagaaggtatcgcagtcgattggatcggaaacaacctgtactggaccaacgacggccaccgcaagacaattaatgttgccaggcttgaaaaagcatcccagtctcgcaagactctgctggaaggcgaaatgagccatcctcggggcatcgtggtcgaccccgtaaatggctggatgtactggacagactgggaagaggatgagatcgatgattctgtgggcaggattgaaaaagcctggatggatgggttcaataggcagatttttgtcacttctaagatgttgtggcctaacggcctgaccctggattttcataccaatacactgtactggtgtgatgcttactacgaccatatcgagaaggtgttcctcaacgggactcataggaagatcgtgtatagcggtcgggagctgaatcacccattcggtttaagccaccacgggaactatgtcttttggaccgattatatgaatggaagtattttccagctcgacctgatcacatctgaggtgactttgctccgccacgaacggcctccattgttcgggctgcagatttacgatcccagaaagcaacaaggggacaatatgtgccgcgtgaataacggaggatgctcaacattgtgcctggcaatccctggaggccgggtttgcgcgtgtgctgataaccagctccttgacgagaacggcaccacgtgtacctttaaccccggggaggctctgccacacatatgtaaggccggggagttcagatgtaagaaccgtcactgtattcaggcacgttggaagtgcgacggagatgacgattgtctcgatggcagcgacgaggattccgtcaattgcttcaatcattcatgtcccgacgaccagtttaagtgtcagaataatagatgcatcccaaagaggtggctgtgcgatggagcaaatgactgtggcagcaacgaggacgagagtaaccagacctgcacagcaaggacctgtcaggtcgatcagttcagctgtggcaacggcagatgtatcccccgtgcctggttgtgcgatcgtgaagacgattgtggcgatcagacagacgagatggccagctgcgagtttccaacttgcgaacccctgactcaattcgtctgcaagtcagggcggtgtattagctctaagtggcattgtgactccgacgatgactgcggagacgggtcagacgaagtaggctgtgtacatagctgttttgataaccagttccggtgttcatcaggccggtgtatcccaggacattgggcctgcgacggggacaatgactgtggcgacttctcagatgaggctcagattaattgtacaaaggaagaaattcattctcccgctggttgtaacggaaacgaattccagtgccaccctgatggcaactgtgtacctgatctttggaggtgtgacggcgagaaggattgtgaggacggctctgatgagaaggggtgtaatggcacaatacgcttatgcgatcataaaaccaagttctcctgttggtcaaccgggcgctgcatcaacaaagcttgggtgtgtgacggggacattgactgcgaagaccagagcgatgaagacgattgtgatagttttctgtgtggaccccccaagcacccctgcgctaacgacaccagtgtatgcttacagcctgagaaactatgtaatggtaaaaaggactgcccggacgggtcggatgagggatatctttgtgatgaatgctccttgaacaacggcgggtgtagtaaccactgctctgttgtgcccggacgcggcattgtctgctcctgtcccgagggactccagcttaataaagataacaagacttgtgagatcgtagactactgctctaaccatttaaaatgtagccaggtgtgcgagcaacacaagcacactgtgaaatgctcctgttacgaaggatggaagctcgacgtagacggagaaagctgcacctctgtcgatccttttgaagcgttcataatctttagcatccgccatgagatcagacgaattgatctgcacaagcgtgactacagcttgcttgtcccgggactacggaacacaattgcactcgactttcatttcaaccagtctctgctttactggacagatgtggtagaagacaggatttacaggggtaagctcagtgaatctgggggagtctccgcaatcgaagttgtcgtggagcacggactcgctacccccgaggggctcactgtggattggatcgcgggcaacatctattggatagacagtaacctcgaccaaatcgaagttgccaaactcgatgggagcctccgcacaacactcattgccggagcaatggaacacccaagagccattgccctagaccctcggtatgggatcctgttctggacagattgggacgccaactttccaagaatagaaagcgcctcgatgtctggggctggtagaaaaaccatctataaagacatgaagaccggcgcctggccaaacggcctaaccgtggaccattttgagaaacgcattgtgtggactgatgccagatcggacgctatttacagcgcactgtacgacggcacgaatatgatcgagattatccgggggcacgagtacctgagccacccattcgcagtgtctctgtacgggtccgaggtatactggaccgactggaggaccaatacattatccaaggccaataaatggactggccaaaatgtgagcgtgatccagaaaacatctgctcaaccgttcgacctccaaatctaccaccccagccgacaacctcaggctcccaatccctgcgccgcaaatgatggcaagggcccgtgctcccatatgtgcctgatcaaccataatcggagcgctgcttgcgcctgtccgcacctaatgaaactctcttctgataaaaagacctgctatgaaatgaagaagttcctgctgtatgccaggcgcagtgagatccgaggtgtggacatagataacccatacttcaacttcattaccgcgttcactgtgcccgatatcgacgacgtcaccgtcatcgattttgatgcttcagaagagcgtctgtattggactgacatcaagactcaaacaattaagagagctttcattaacgggacgggcctggagacagtcatctcacgcgatattcagagcatccggggcctagctgtcgattgggtgtcacgcaacctgtattggatttcttccgagttcgacgagacccagatcaacgttgctagactcgatggcagcttgaaaacttcaattatacacggcatcgacaaaccacaatgcctggctgcacaccccgtgcggggcaagctgtactggacggatggaaatacgatcaatatggctaacatggatggaagcaatagcaagatactgtttcagaatcagaaggagcctgtgggcctgtctattgactacgtggaaaataagttatactggattagttccggcaacggaacaataaatcggtgtaacctcgatggcggaaatttggaggtcattgagtctatgaaggaggagctgaccaaggcaaccgccttgactatcatggacaagaagctgtggtgggcagatcagaacctcgcacagcttggcacatgcagcaagcgggatggaagaaacccgactatcctgcggaacaagactagcggcgttgttcatatgaaagtgtacgacaaggaagcacaacagggctccaacagttgccagcttaacaatggcggttgctcacaactgtgtttgccaacaagtgaaaccacgcggacatgtatgtgcacggtgggctactacttgcagaaaaaccggatgtcttgccaggggatcgaatcttttctgatgtattctgttcatgagggcatccggggaatacccctggagccctctgataaaatggatgccctcatgcccattagtgggacctccttcgcggttggaattgatttccacgccgaaaacgatactatatattggactgatatggggtttaacaaaatctcccgcgccaaacgagaccagacatggaaggaggatatcatcactaatgggcttggaagggtggaaggcattgctgttgactggatagcaggaaatatttattggacagatcacggttttaatctgatagaagtcgcccgccttaacgggtccttccgctatgttataatctcacagggcctggaccagcccaggtcaattgctgtgcatcctgagaaggggctactgttttggaccgagtgggggcagatgccctgtatcggtaaggctagactcgatggcagtgaaaaagtagtgctcgtctctatgggtatagcatggcctaatggaatcagcatcgactatgaggaaaacaagctgtactggtgcgatgctaggacagataaaatagaaagaatcgatctggagaccggggggaatagagagatggtgcttagtggctccaacgtagacatgttttccgtcgctgtcttcggcgcatacatctattggagtgacagagctcacgccaatgggagcgtcaggagaggtcacaaaaacgatgcaaccgaaactatcactatgaggaccggactgggcgtcaacctgaaggaggttaagatcttcaatcgcgtccgagagaaaggcactaatgtatgtgccagggacaacggcggttgtaagcagctgtgtctctatcgtgggaactcacggcgcacctgcgcatgcgctcatggctaccttgctgaggatggcgtcacatgtctcaggcacgagggctacctcctgtatagtggtagaaccatcctgaagagcattcacctatccgacgagaccaatttgaacagtcccattcggccctatgagaacccccgttactttaaaaatgtgatcgccttggccttcgactataatcaacgacgcaaggggaccaatcgaatcttttacagcgacgcccattttggcaacatacagctgataaaggataactgggaggaccgccaagtcatcgttgagaatgtcggatccgtcgagggactcgcttaccaccgagcctgggacaccctgtattggacaagtagtacaacttcaagcatcactagacatactgttgatcagacacgtcctggcgcatttgacagggaagccgtgattaccatgtccgaggacgaccatccacacgtcttggcattggatgaatgtcaaaacctgatgttctggaccaactggaatgagcagcatcctagtattatgaggagcactcttacaggcaagaatgcccaggtggtagtaagcacagatattcttacacctaacggcttgactattgattacagggccgaaaaattatacttttccgatgggagtttaggaaagatcgagcgctgcgagtatgacggctcacagcgacacgtgatcgtcaagagcgggccagggacgttccttagcctggcagtgtatgataattatatcttttggagtgactggggacgaagagccattttgcggtcaaacaaatacaccggaggggatacaaagatcttgcggagcgacataccacatcagcccatgggtatcattgccgtggccaacgacacaaattcttgtgagctgagtccatgcgcattgctgaatggaggctgccatgacctctgcctcctaaccccgaacggtcgagttaattgctcttgtcgcggggaccggattttgctcgaggataaccgttgcgtgaccaaaaactctagctgtaatgcctattcagagtttgaatgcggcaacggtgagtgcattgattaccaattaacatgtgatggcattccacactgcaaagataagtccgatgaaaagttgctgtactgtgagaaccggagctgcaggaggggcttcaagccttgctacaatagaaggtgtatcccgcacggaaaattatgcgatggtgaaaacgactgcggtgacaactcagatgagctggactgcaaggtaagcacatgtgctaccgtagagttcagatgtgcagacggtacatgcataccccggagcgcacgctgcaatcagaatattgattgtgccgatgccagcgacgagaagaactgtaataataccgattgtacacacttctacaaactcggggttaagacaacaggatttatccgatgcaattctacttctctgtgtgtgctgcctacatggatttgtgatgggtccaacgactgcggcgattatagcgatgaactgaagtgccctgtgcagaacaaacacaagtgtgaagagaattacttcagctgtccctcagggaggtgtatcttaaacacctggatatgcgatggtcaaaaagactgcgaggatggtcgcgatgaatttcactgtgacagcagttgtagctggaaccagtttgcatgctccgcccagaagtgcattagtaagcattggatctgcgacggcgaagacgattgcggggatggcctggatgagagcgacagcatctgtggcgcgattacctgcgccgccgacatgtttagctgccagggatccagggcctgcgtaccgcggcattggttgtgtgatggggaacgggactgccctgacgggagcgatgaactctctaccgcgggctgcgctccaaacaacacatgcgacgagaatgcgttcatgtgtcacaacaaggtttgtatccccaagcaatttgtttgcgatcatgacgacgattgtggcgatggcagtgatgaatcgccccagtgcgggtataggcagtgtggaactgaggaattttcctgtgcagatgggcgttgtcttctcaacacccagtggcagtgcgatggggattttgactgtccagatcatagtgacgaagctcctctgaaccccaaatgtaagagcgccgagcagagctgtaactcatcttttttcatgtgtaagaatggtagatgcattccatctggaggtctgtgcgataacaaggacgactgcggtgacgggagtgacgaaaggaactgccatatcaacgaatgcctcagcaagaaggtgagcggatgcagccaggactgtcaagatttgccagtctcctacaagtgcaagtgttggcccgggtttcagctcaaggacgacggaaaaacatgcgtcgacatcgacgagtgtagtagtggtttcccctgttcccagcagtgcatcaacacctatggaacatataaatgcctgtgcactgacggttacgagatacagcccgacaatcccaatggttgcaaatctttatctgacgaggagccatttctgattctggccgaccaccacgaaatacgtaagatctctacagacggtagtaattacactttactgaagcagggcttgaacaacgtgatcgccatcgactttgactacagagaggaattcatctactggattgactcatctagaccaaacggttctaggattaaccggatgtgcctgaacgggtccgatatcaaagtggtccataatacggcagtgcccaacgctctggcggtcgattggattggaaaaaacctttactggagtgacaccgagaaacgcattatcgaagtctcgaagcttaacggcctatatcccacaatcctggtgtcaaagcgcctgaaatttccgagggatctcagcctggaccctcaagctggatacctttattggatagattgctgcgaatacccccacatcggccgagtggggatggacggcacaaatcagtcagttgtcatcgaaacaaaaatctctcggcctatggcacttacaattgactacgtgaaccgtaggctgtactgggcagacgagaatcacatagagttctcaaatatggatggctcacacagacataaagtgcctaaccaggacattcccggtgtcatagctttaaccctgttcgaagactatatctactggactgatggaaaaactaaatcactgtcccgagcacacaagacttccggagctgacagattatctctaatctactcttggcatgctataacagacatacaggtgtatcatagttatcggcagccggacgtgtccaagcacttgtgcatgattaacaacggtggttgcagtcatctgtgcctactagcgcccggaaaaacacatacctgtgcctgtcccactaacttttatttagctgccgataatcgcacatgtctcagcaattgcacagcttcacagttccgatgtaagacagacaaatgcatccccttttggtggaagtgcgataccgttgacgattgtggcgatggttcagacgagccggacgattgcccagagtttcgatgtcaaccagggaggtttcaatgtggaacaggactctgtgctttgccggcatttatctgtgatggggagaatgattgcggagacaacagcgatgaacttaactgtgatacccatgtctgcctctcagggcaatttaagtgcactaagaatcagaagtgtatacctgtgaacctccgctgcaatggccaggatgactgtggcgacgaagaagacgagagggactgcccagaaaatagttgctcccccgattatttccagtgcaaaaccaccaagcattgcatcagtaaactatgggtgtgcgatgaggatccggactgcgccgatgccagcgacgaggcgaattgcgataagaagacatgcggccctcacgagtttcagtgcaagaacaataattgcatcccagaccactggagatgtgactcccagaatgactgcagcgataatagcgatgaagaaaattgcaaacctcaaacttgcactctgaaggattttctgtgcgccaatggggattgtgtttcctctcgcttctggtgcgatggagattttgattgtgccgacggctcagacgagaggaactgtgagacttcttgcagcaaggatcagttcagatgtagtaatggtcagtgtataccagcaaagtggaagtgcgacgggcacgaggattgcaagtacggagaggacgagaagtcttgcgagcccgcatcgcccacctgctcgtcacgcgaatatatatgtgctagcgatggctgcatcagtgcttcactcaaatgtaacggtgagtatgattgtgccgatggctcggatgagatggattgcgttacagaatgtaaagaggatcagttcaggtgcaaaaacaaggcgcattgcataccaatcagatggttgtgcgacggtatccacgattgtgtggatggctccgacgaggaaaattgcgaaagaggtggtaacatatgtcgagctgacgagttcctttgtaacaactcattgtgtaaactgcacttttgggtctgtgacggtgaagatgactgcggagataacagtgacgaggcacccgacatgtgtgtgaagttcctttgcccttccacacggccacatcggtgtcgaaacaatcggatctgcctccaatccgagcagatgtgcaatggcattgatgagtgtggagacaatagcgacgaagaccactgtggcggcaaactgacctataaggcaagaccctgtaagaaggacgagttcgcttgctcaaacaaaaaatgcatccctatggatctacagtgtgacaggctcgacgactgcggagatgggagtgacgagcaagggtgccgcatcgcccccactgagtatacttgtgaggacaatgtaaatccatgtggggatgacgcatattgcaaccagataaagacttctgtgttctgcaggtgcaagcccggttttcaacgaaacatgaagaacagacagtgtgaagatttgaacgaatgtctggtgtttggaacttgcagtcaccagtgcatcaacgtggaaggctcttataagtgtgtgtgtgaccagaactttcaggagcgcaataacacctgtatcgctgagggatccgaggaccaggtgctttatatcgcaaatgacaccgatatattaggcttcatatatcctttcaattattctggcgaccaccaacagattagtcatatcgagcacaacagcagaatcacaggcatggatgtgtactaccagagagacatgattatatggtccacacaatttaatcccggcgggatcttctacaagcggatccacggtcgtgagaagcgacaggccaactccggactgatctgtcccgagttcaagcgccctcgggatatcgctgtggattgggtcgccgggaacatatattggacggatcactctcggatgcactggttctcatattatactacacactggacctctctgcggtacagcattaatgtaggacaactcaacggaccgaattgtacgcggttactcactaatatggccggcgaaccttacgccatcgccgttaatcccaaaaggggaatgatgtactggaccgtggtgggtgaccacagtcatatcgaagaagctgccatggacggtacacttcggcgcatcctggtccagaagaatctccaacgacctactggattggctgttgattacttttctgagaggatctattgggctgattttgaactttcaatcattggaagtgtactgtacgacgggtcaaatagcgtcgtctccgtcagcagcaaacagggactacttcacccccaccggattgatatttttgaagactatatctacggcgctgggcctaaaaatggggtttttcgcgtgcagaaatttggacacggctccgtcgagtatttggccctgaatatagataagacaaagggagtcctgatctctcatcgctacaagcaactggacttgcccaatccttgcttagatctagcctgcgagtttctgtgtctcttgaaccccagtggcgcaacctgcgtgtgccccgaaggaaagtacctgatcaacggcacttgtaatgacgactcattactcgatgacagttgcaagcttacctgtgaaaacggggggaggtgcatcctcaacgaaaagggagacctgaggtgtcattgttggcctagttactcgggagaacgctgtgaggtgaaccactgctccaattactgccagaacggcggcacctgtgtaccatctgtgctgggtcggccaacatgtagctgtgcccttggctttacgggtccaaattgcggtaagaccgtgtgcgaagatttctgtcaaaatggcggtacgtgcatagtgactgctggcaaccagccatactgccactgccagcccgaatacacaggcgatcgatgtcagtactacgtgtgccatcactattgcgttaactcagaatcgtgcacaatcggagacgatggctccgtcgagtgtgtgtgtcccacaaggtatgaaggcccgaaatgtgaagtcgataagtgcgtgcggtgccacggcggtcattgtataattaacaaggacagcgaagatatattctgtaattgtaccaatggtaaaattgccagttcctgccagttgtgcgacgggtactgttacaatgggggaacatgtcagctggaccccgaaacgaacgtacccgtatgtctatgttctactaactggagcgggacgcagtgtgaacgccccgcccctaaatccagtaaaagcgaccacatcagcacacgctcgattgctattattgtgcctctagtgctcctcgtgactctgatcaccacactggttattggactcgtcttatgtaagcggaaacgccgaaccaagacaatcaggaggcagccaatcattaacggtggcataaacgtagagattggtaatcctagctacaacatgtatgaggtcgatcatgaccacaacgatggcggcctgttggacccagggtttatgatcgatcctaccaaagctcgatacatcggtggggggcccagcgcattcaagctgcctcatacggccccaccgatttacttgaactccgacctgaagggtcctttaacagctggccccactaactattcgaaccctgtatacgccaaactttatatggatgggcagaattgtcgcaattcattaggttccgtggatgagagaaaggaactcctgcccaaaaaaatagaaattggcatccgagagaccgtagcctag

SEQ ID NO: 199049 - DNA, 2349 bp, Artificial Sequence
  derived and/or modified sequence
atgagcgaattcctgctggcattactaacgctgtcagggttgctacccatcgccagggtcttgactgtaggagcagatagagaccaacagctatgcgaccctggagaattcctctgtcatgaccatgtgacctgtgtgagccaatcgtggctctgcgacggagacccagattgccctgatgattcagatgagagtctggatacatctaggacctgccaggtcgatcagttctcctgcggcaatggaagatgtatcccgagagcatggctgtgcgaccgggaagatgactgtggagaccagactgatgaaatggccagttgtgaatttcccacctgcgagccactgacgcaattcgtgtgcaaaagcggtcgctgtattagctcgaaatggcattgcgattcggatgacgattgtggcgacgggtcggacgaggtgggatgcgtgcattcttgcttcgacaaccagtttcgatgcagcagtggaagatgcatccccggccactgggcttgtgacggagacaacgactgcggagactttagcgacgaggctcagattaactgtacaaaggaagagatccatagccctgccggctgcaacgggaacgagtttcagtgccaccctgatggaaactgtgtgccagatctgtggagatgtgacggcgaaaaagactgcgaggacggatccgacgaaaagggctgtaacggtactattagactgtgcgaccacaagacgaagttctcatgttggagcactgggcgctgcatcaacaaggcctgggtgtgtgatggggatattgattgcgaggaccagagtgatgaagacgattgtgatagcttcctctgtggcccccccaagcatccctgtgccaacgacacaagcgtgtgtctgcaaccggaaaaactctgcaatggaaagaaggactgccctgacggtagcgacgaaggttacctttgcgatgagtgctcgctgaacaacggagggtgttctaatcactgctcagtcgtccctgggcgaggaatagtgtgtagctgccctgagggactgcagctcaacaaggacaacaaaacctgtgaaatagtagactattgcagcaaccatcttaagtgtagccaagtgtgcgaacagcacaagcatactgtcaaatgtagctgctatgagggctggaaactggatgtagatggagaatcctgcacatccgtggacccattcgaggccttcattatcttttccataagacacgaaatcagacgaatcgacctgcacaaacgggactactctcttctggtgcccggactgaggaacactatcgcattggatttccattttaaccagagcttgctgtattggaccgacgtggtggaggatagaatctacagagggaagctgtcagaatccggcggagtgtctgcaatcgaagtcgtggtggaacatggtctggctactcccgaggggcttacagtcgactggatagctggaaacatttactggattgattctaatctggatcagattgaagttgctaagctggacgggtcacttaggacaacattgatcgcgggcgcaatggaacatcctagagcaattgcccttgaccccaggtatggtatattgttttggactgattgggacgctaacttccccagaatcgaatctgcatctatgagcggtgctggtagaaagaccatttacaaggatatgaagacaggggcctggcctaatggcctgactgtagaccattttgagaaacgaatcgtgtggacagacgctcgcagcgatgctatttatagcgccctctacgatgggacaaacatgattgaaatcattcgcggccatgagtaccttagccacccatttgcagtgagcttgtacggatcagaagtgtactggactgactggaggacaaacacactgtcgaaagccaataagtggactggccagaatgtctccgtaatccaaaaaacctctgcacagccgttcgacctgcagatctaccacccttctcgccagccgcaggccccaaatccgtgcgccgccaatgacgggaaggggccctgcagtcacatgtgcctgattaatcataatcggagcgccgcatgcgcatgccctcacctgatgaagctgagctccgataaaaagacctgttacgaaatgaaaaaattcttgctgtatgctcggcggagtgagatccgtggggttgatattgacaatccttactttaatttcatcactgcctttactgttccagacatcgacgacgttacagtcatcgacttcgacgcctccgaagaacgtctttattggactgacataaaaacccaaaccattaagcgagccttcattaatgggtag

SEQ ID NO: 199050 - DNA, 13614 bp, Artificial Sequence
  derived and/or modified sequence
ttccttcattccggtcctgaagaggttgagatcaagtgtcccttaaatcacatcgcatgtctcgggacgaataaatgcgttcatctgtcccagctttgcaacggagtcctcgattgtcctgatggttatgacgaaggtgtacattgtcagggagagagcatttgccagcagctgaactgtactatgtacaaatataagtgtaccatggtgcggaactcaacaagatgctactgtgaagacggctttgaaatcacagaggacggccggagctgcaaggaccaagatgagtgcgctgtctacggcacttgttcacagacttgtcgcaacacgcacggttcatatacatgcagctgcgtggagggctatctaatgcagcctgacaacaggtcttgcaaggcaaaaattgagcccaccgaccggcccccgatcctccttatcgccaatttcgagacaatcgaagtcttttatttaaatggatccaagatggccactttgagttctgtgaatggaaacgagatacacaccttagatttcatatataatgaggacatgatctgctggattgagagcagggagtcatcgaaccagttgaaatgcatccagatcacaaaagctggagggctcacagacgagtggacgatcaacattttacaatcttttcacaacgtgcagcagatggccatagattggttgaccaggaacctgtacttcgttgaccacgtgggagatcggattttcgtgtgcaatagcaatggcagcgtgtgcgtaacccttatagatctggaattgcacaacccaaaagctattgccgttgatcctattgccggcaaactttttttcactgactatgggaatgttgcaaaggtcgaaaggtgcgatatggatggaatgaatcgtacaagaatcatcgactctaaaacagaacagcctgctgcccttgccctggatcttgtgaataaactcgtatactgggtggatctgtacctggactacgtcggggtagtcgattatcagggaaagaaccgacataccgtgatccaagggcggcaggtgaggcatctgtatggaattactgtgttcgaggactacctctatgccactaattcagacaattacaacattgttaggattaatcgctttaatggtaccgacatccacagcctcattaagattgagaacgcttggggcattaggatttaccagaaaaggactcagcctacagtacgcagccacgcttgtgaagttgacccgtacggtatgccaggaggttgttcgcacatatgcctcctgtcctcttcatacaagacccgaacatgtaggtgccgtacaggtttcaacctcggatcagacggacgatcttgcaagcgccctaagaacgagttgttcttattctatggcaagggccgccccggaatagtcagaggtatggacctgaatacaaagattgccgatgagtacatgattccaattgagaatcttgttaatcctcgcgccctagatttccacgccgagaccaactatatctatttcgctgacactaccagcttcttgatagggaggcaaaagattgatggcacagaacgggagaccattcttaaagatgacttggacaacgttgaaggcattgcagtggattggattgggaacaacttatactggacaaacgacggccataggaaaacaattaatgttgcgagactggaaaaggcaagccagagtcgcaagaccctcctggagggcgaaatgtcccacccccggggaatcgtcgtggatcccgtgaatggatggatgtattggacggattgggaggaagatgaaattgacgactctgtgggaagaattgagaaggcgtggatggacggatttaaccgtcagattttcgtcacttctaaaatgctgtggccgaacgggttaaccctagactttcatacaaatactctgtactggtgtgatgcctattatgatcacatagagaaggtcttcttgaatggcactcaccggaaaatcgtttatagtggccgcgagctaaatcatccttttggcctgagccatcatggcaattatgtattctggacagactacatgaacggcagtatttttcagctggatctgataactagtgaggtcacgctactgaggcacgaaagacctcccttgtttggcctccaaatttatgacccccgtaaacagcagggtgacaatatgtgcagggtgaacaacgggggttgtagcacgctgtgtctggcaatcccaggaggaagggtctgcgcatgtgcggataaccagctcctggatgaaaacgggaccacatgtacttttaaccccggggaggcactacctcacatatgcaaggctggcgagttcaggtgcaaaaatcggcactgcattcaagctcgatggaagtgcgatggcgacgacgattgtctggacggctccgatgaagacagcgttaactgcttcaaccattcctgcccagacgaccaattcaaatgccagaataatcgctgcattccaaagaggtggctgtgtgatggcgccaatgattgtgggtccaacgaagatgagagtaaccaaacatgcacggcacgaacttgtcaagtggaccagttcagctgcggcaatggaagatgcataccacgggcatggctttgtgacagggaggacgactgcggcgaccaaaccgacgaaatggcttcttgcgaattcccaacatgcgagcctctgacgcagtttgtgtgtaagagtgggagatgcatcagttcaaagtggcactgcgactcggacgatgactgcggggacggctctgatgaggtgggctgcgtgcattcttgcttcgataaccagtttcgctgtagctctggacgttgcatccccgggcactgggcgtgcgacggcgataatgactgtggcgatttttcggacgaagctcagatcaattgtaccaaggaagaaattcacagcccagctggctgtaacgggaacgaattccagtgtcacccggacggaaactgtgtccctgacctttggaggtgtgacggtgagaaagactgcgaagatggctctgatgaaaagggatgcaacggcacgattcggctgtgcgaccacaagacaaaattttcatgttggtccaccggaaggtgcatcaataaggcttgggtgtgcgacggcgatattgattgtgaagaccaaagcgatgaggacgattgcgatagcttcttgtgtggaccgcctaagcatccgtgcgcgaacgacacttccgtgtgcctgcagcctgagaagttatgcaatggaaagaaggactgccccgatggctctgacgaggggtacttgtgtgatgaatgctcactaaataacggcggctgcagcaatcactgtagtgtcgtccctggcagagggatcgtatgctcttgccctgaggggttgcagctgaacaaggataacaaaacttgtgagatagtggattattgctcaaaccatcttaaatgttcacaggtgtgtgaacaacacaagcataccgttaaatgtagctgctacgagggatggaagctggacgttgacggagagtcctgcacttccgttgacccttttgaagcgttcataatcttctcaatccggcatgagatccgacgcatcgacctgcacaaaagggactactccctcctggtccctgggctgagaaataccatagcgctcgacttccatttcaatcagtcgctgctgtactggacagacgtggtagaggaccgtatttatcgggggaagttgtccgagagtggcggcgtcagcgcaatagaggttgttgtggagcatgggctggcaactcccgaaggccttacagtagactggatcgccggcaatatatattggattgattccaatctcgatcagatcgaagtagcaaaattagatggatccctgcgcaccactctgattgcaggcgccatggaacatcccagggccattgctctcgatcccagatatggtattttattttggaccgattgggacgccaactttccacgcattgagtcagcctcaatgtccggcgcaggcaggaaaactatttataaagacatgaagacaggcgcatggccaaacgggctcacggttgaccattttgaaaaacggatagtgtggaccgacgctaggagcgatgccatctattcggccctgtatgacggtacaaacatgatcgagattattaggggccatgaatatttgtcccacccctttgcagtatctctgtacggcagcgaagtgtactggacggattggcggaccaacactctatccaaagctaacaaatggacaggtcagaacgtgtcggtgatccaaaagactagtgcccaaccgttcgaccttcagatatatcatccaagcagacaacctcaggcacccaacccctgtgcggctaatgatggtaaaggtccatgttctcacatgtgcctgatcaaccacaatagatctgctgcctgtgcctgcccccacctcatgaagctgagcagtgataagaagacttgctatgaaatgaagaaattcctgctgtacgctcgccggagtgagatccggggggtcgacattgacaacccctatttcaatttcatcacagcattcactgtacccgacatcgacgacgtgaccgttattgattttgacgcttcagaggagcgcctttattggacagatatcaaaactcagactatcaaaagggcgtttatcaatggcacaggactggaaaccgtgatcagcagagatatccagagcataagaggattagccgtggattgggtttccaggaatctttactggatttcatccgagttcgacgagacccagatcaacgtagctaggctggacggcagcctcaaaacctccatcatacacggaatcgataaacctcagtgtctggcagcacacccggtaagaggcaaactgtattggaccgatggaaacaccattaacatggccaatatggatggctctaactcaaagattctctttcagaaccagaaggagcccgtggggctgtccattgactatgtcgagaataagctgtactggattagctcaggcaatggcacgattaaccgctgtaatctcgatggtggtaacttggaagtgattgaatcaatgaaggaagagctgacaaaagctacagcgttgacaatcatggacaagaagctctggtgggcggaccagaacttggcacaattgggaacctgtagtaaacgagacgggagaaatccaaccatcctgcgcaataaaacttcgggggtcgtgcatatgaaggtctacgacaaagaggcgcagcagggctccaattcctgtcagctcaacaacggaggttgtagtcagctatgcttgccaacttcagaaacaacccgcacctgtatgtgcactgtgggctactacttgcagaagaatcggatgagctgccaaggcatcgagtcattccttatgtatagcgtgcacgaaggtataagaggcatacctctagaaccttctgacaagatggatgcactgatgcctataagcgggacctcgtttgccgtcggcattgattttcatgccgagaacgatacaatctactggacagatatggggttcaacaaaatcagcagggccaaaagagaccagacatggaaagaggacattatcactaacggactgggccgggttgagggaatagcagtggattggatcgccgggaatatttactggacagatcatggatttaatctcattgaagtcgccaggttgaacgggtcattcaggtacgtcatcatctcccagggcctcgatcagcctagaagcattgcagtacacccggaaaagggcttgttgttctggactgaatggggccaaatgccatgcataggaaaggccagattagacgggtcagagaaggtcgtgttggtttccatgggaatcgcatggccaaatggaatctcaattgactacgaggagaacaagctgtactggtgcgatgcccgaacagacaaaatcgagcgcattgatcttgagaccggtggcaaccgagagatggtcctaagtggatctaacgtcgatatgttttcagtggctgtgttcggggcctacatttattggtcggatcgcgctcatgccaacggctctgttcggaggggacacaagaacgatgctacagagactatcacgatgaggactggactcggagtgaacctgaaagaggtaaagatctttaacagggtacgcgaaaaaggcacaaacgtttgcgctcgcgataacggaggatgtaaacagctctgtttgtatcgaggaaactctcgccgtacatgtgcttgtgcccacggatatctggccgaagacggcgtcacttgtctgaggcacgaagggtatctcctgtacagcggtagaactattctaaagtctatacatttgtcagacgagaccaatcttaacagtcctatacggccatatgagaatcccaggtacttcaagaacgtcattgcgctggcatttgattacaaccaacgacggaaagggaccaacaggattttttattcagatgcacactttgggaacattcagctgattaaagacaactgggaagaccgtcaggtgatagtcgaaaacgtgggatccgtggagggtctggcttatcacagagcttgggacactctgtactggaccagctccacaactagttctattacacggcataccgtggatcagactcgccccggggcattcgaccgcgaagccgtcataacaatgtccgaagacgatcatccccacgtgctagccttggacgagtgccagaacctaatgttctggaccaattggaatgagcagcacccttcaatcatgcgctctacccttaccggaaagaacgcacaggtggtcgtctctactgacatcctaactcctaacgggctcacaatagactacagggcagagaagctgtacttctcggacgggtctctcgggaagattgaacgctgtgaatatgacggctcccagcgccacgtgattgtgaaaagcggtccgggaacatttttgtccctggccgtgtacgataactacattttttggagcgattgggggcggcgtgctatacttaggagtaacaagtacaccgggggagacactaagatcctgaggagcgatatccctcatcagccaatgggcattattgctgtggctaatgatactaattcctgcgaactttccccttgcgctctcctaaacggtggatgtcatgacctgtgcctactcacccctaacggcagggtcaattgctcttgccgcggggatcgtatcctcctggaagataatagatgcgtaacgaagaactcctcttgtaacgcgtactctgaatttgagtgcggaaacggcgaatgcatagactatcaactcacctgcgatggaatccctcactgtaaggataagtcggatgagaagttgctatactgcgagaatcggagctgtaggagaggattcaagccgtgctataatcgacgatgcattcctcacgggaagctttgcgatggggaaaacgactgtggagataattcggacgagcttgactgcaaagtgtccacctgtgcaacggtcgaatttcgctgcgctgatgggacctgtataccgcgatcagcacgatgcaaccagaatattgactgcgccgacgcctctgacgaaaagaactgtaacaacactgattgcactcatttctacaagttaggggtcaagaccacgggtttcattcggtgcaactctacgagcttatgcgtactcccaacatggatctgtgacggctctaacgactgcggagactattcagatgagctgaagtgtcccgtacagaataaacacaaatgtgaggaaaactatttttcctgccccagcggccggtgtattcttaacacttggatatgtgatggtcagaaagattgtgaagatggtagagacgaattccattgcgattcgagctgcagctggaatcaattcgcgtgttctgcccagaaatgtataagcaaacattggatttgcgatggcgaggacgattgtggcgacggcttagatgagagtgatagcatttgcggcgccatcacttgcgccgccgacatgtttagctgccaaggatcacgagcatgcgtgccccggcattggctttgtgacggggaaagggattgtccggacggcagcgacgaattgtcgacagccggctgtgcaccaaacaacacgtgcgacgagaacgcctttatgtgccacaacaaggtctgtatccccaagcagttcgtgtgcgaccatgacgacgattgcggagatggcagcgacgaatctcctcagtgcggctacaggcagtgcggaaccgaggagttttcatgtgccgatggcagatgtctgctaaacacccagtggcaatgcgacggggacttcgattgcccagatcattccgatgaggccccccttaacccgaagtgtaagtcagccgagcagtcctgcaattcatcatttttcatgtgtaagaatgggcgatgcatcccgtctggcggtctgtgcgacaataaggatgactgcggagacggatcagatgagaggaattgccatattaatgagtgtctttcaaaaaaagtctccggttgctcccaggactgccaggacctgcctgtctcttataaatgcaaatgttggcccgggttccaactcaaagatgacggtaagacatgcgtcgatatcgatgagtgtagtagcggttttccgtgtagccagcaatgtatcaacacctatgggacttataagtgtctttgtaccgacggctatgagattcagcctgacaatccaaatggatgtaaatctctgagcgatgaagagcccttccttattctcgctgatcatcacgagattcggaagatttcaacggacggcagtaactacacgctactgaagcaggggctgaacaacgtaatagcaattgatttcgactaccgtgaggagttcatatactggatcgatagctctcgtcccaatgggagcagaattaaccgtatgtgccttaacggttcagacataaaggtggtgcataatacggctgtgccaaatgcgctcgcagttgattggatcggtaagaacctatactggagcgatacagagaagcgaattattgaagtttccaagctcaatgggctctatccgacaatactggtctccaagaggttaaagttccctagagacttgagcctggacccacaggccggctacctgtattggatcgactgttgtgaatatccccacatcggcagagtcggaatggatggcacaaaccagtccgtggtgattgaaacaaagatctcgcggcccatggctcttacaatcgattatgtgaatcggagactctactgggccgacgagaatcacattgagtttagtaatatggacggatctcaccgccataaggttcctaaccaggacatcccaggggtcattgctctcaccctctttgaggactatatttattggacagatggtaagaccaagagcctgtcacgggcacacaagacctctggcgcagatcgcttgtcactgatctatagttggcacgccatcactgacatccaagtatatcacagctaccgtcagcctgatgtgtccaagcacctgtgcatgattaacaacggagggtgtagccatctctgtttgctggccccgggaaagactcacacgtgtgcctgtccaacaaatttctacctggcagcagacaaccggacttgcctgagcaactgcaccgcttctcagtttaggtgcaaaactgataaatgcatcccattctggtggaagtgcgatacagtcgatgattgtggcgacggaagcgacgaacctgacgattgtcccgagttcaggtgtcaacctgggcggtttcagtgtgggactggtttgtgcgctttgcccgccttcatctgtgacggagagaacgattgtggagataactctgacgaactgaattgtgacacacatgtttgcctcagcggacagtttaaatgtactaagaaccagaagtgtatccctgtcaaccttcggtgcaatggccaggatgattgcggcgatgaggaggatgagagagattgccccgagaattcctgttcccctgattattttcagtgtaagacaaccaagcactgcatctcaaagttgtgggtgtgcgacgaagaccctgattgtgcagatgccagcgatgaggccaattgcgacaaaaaaacctgcggcccccacgagttccagtgtaagaataataactgcataccagaccactggcgttgtgatagccagaacgattgctccgacaattccgatgaggagaattgcaagccacagacctgtactctaaaggatttcctgtgcgccaatggcgactgtgtctcttcacgcttctggtgcgatggcgatttcgactgtgcagatggttccgacgaacgaaattgtgagacctcgtgctcaaaagatcaattccgctgcagcaacggtcagtgcattcctgccaagtggaagtgtgatgggcacgaagactgcaaatatggggaggacgaaaaatcctgtgaacctgccagcccaacatgttccagccgagagtatatctgcgccagtgatgggtgtattagcgcttctttgaagtgtaacggggaatatgattgcgctgacgggagtgacgagatggactgcgtgaccgaatgtaaggaagatcagtttagatgtaaaaacaaggcccactgtattcctatccgttggttgtgtgacggaatacatgattgcgttgatggctcagacgaagagaactgtgaacgtggcggcaacatttgtagagccgatgagttcctttgtaacaattctctctgtaagttgcacttctgggtctgtgatggcgaggacgattgcggggataattcagacgaagcgcccgatatgtgtgttaaattcttatgtcccagtaccaggccacaccgatgtcgtaacaaccggatctgtctccagagtgagcaaatgtgcaatgggatcgatgagtgtggcgataattcagacgaagatcactgcggagggaaactcacctacaaggcacgaccctgtaagaaggacgagttcgcttgctctaacaagaaatgcatcccgatggacctgcagtgtgatagactggacgactgtggggatggttccgacgaacaaggctgtcgtattgcccctactgagtatacttgtgaagataatgtgaatccttgtggagacgatgcgtactgtaaccagataaagactagcgtcttctgcagatgcaaacctggcttccagcgaaacatgaaaaaccggcaatgtgaggaccttaacgagtgcctggtgttcggcacatgctcccaccagtgcatcaatgtcgagggttcttacaagtgtgtgtgcgatcagaacttccaggagaggaataacacctgcatcgcagagggctccgaagatcaagtgctgtacatcgctaacgatacagacatcctgggattcatctatcccttcaattatagcggcgaccaccagcagatcagccacatcgagcacaattctcgaataaccggaatggacgtctactatcagagagacatgattatttggtcaacgcagttcaaccctggcggcattttttacaagagaatccatggccgggaaaaaagacaggctaattctggattgatctgccctgagtttaagcggccgcgggatatcgcagttgattgggttgccggcaatatctactggacggatcactcacgcatgcactggttttcatactatacaacccactggacctccctcagatattccatcaacgtgggccaactgaacggaccgaattgtacccgcctgctgacgaatatggctggcgaaccatacgctatagccgtgaaccccaagagaggaatgatgtattggaccgtggtgggagatcacagccatattgaggaagccgctatggatggaacccttaggcgcattctagtccagaaaaatctccagagacccaccgggctggccgtggactacttctccgagagaatctactgggcggatttcgagctatcaataatcggatctgtgctgtatgatggatccaacagcgtggtttccgtgtcatccaagcaggggctgcttcatcctcacagaatcgatatcttcgaggattacatctatggggccggccccaaaaacggagtctttcgcgtacaaaaattcggtcacgggagtgtggagtatctggccctgaatatagataagacaaagggagtactgatcagccacaggtataaacagctcgacctgccaaatccttgccttgatctcgcgtgcgaatttttgtgcctacttaatcctagcggggccacgtgcgtctgcccagagggcaaatatctgatcaacggcacctgtaatgatgactccctactggacgactcttgcaagcttacatgcgagaatggcggaagatgcatcctcaacgagaaaggcgatctccgatgccattgctggcccagctactctggggaaaggtgtgaagtcaaccattgcagcaattattgccagaacggcggcacttgcgtgcctagcgtgctggggcgtcctacgtgtagctgtgccctaggttttaccggacctaattgcggaaagacagtgtgcgaggatttctgtcaaaatggaggtacctgcatcgtgacggccggcaaccagccctactgtcattgtcagcccgagtacactggagatcgttgccagtattacgtgtgccaccactactgcgtgaattctgagtcttgcacaataggtgatgacggatccgtcgaatgcgtctgccccacccggtacgaaggccctaagtgtgaggttgataagtgcgtcagatgccacggcggtcactgcataattaacaaggactctgaagatatattttgcaattgtaccaatggtaagatcgcgtctagttgccagctgtgcgacggctactgttataacggaggcacgtgccaacttgaccccgagaccaacgtgcctgtgtgcctgtgttccaccaattggtcgggtacacagtgtgagcgccctgcgccaaaatctagcaaatctgatcatattagcacacgaagcatcgcaattatcgtgcccctggtgctgctggtcaccttgattaccacactggtcattggtctcgtgctttgcaagcgcaaacgcaggacaaagaccatcaggcggcagccaattatcaacgggggcattaacgtcgaaattggtaatccttcctacaatatgtatgaggtcgaccacgatcataacgacggtggactcctggacccagggtttatgattgatcctactaaagccaggtacattggcggtgggccctccgcattcaaactgccacatactgctcctcccatctaccttaatagtgacctcaaagggccactgaccgcagggccaacgaattacagcaacccagtgtatgcgaaactgtatatggacgggcagaactgtagaaactcactgggtagcgtcgacgaaaggaaagagcttctccccaagaaaatagaaatcggtatccgtgagacagtggcatag

SEQ ID NO: 199051 - DNA, 13800 bp, Artificial Sequence
  derived and/or modified sequence
atgtctgagttcctgctggccctgctgaccctgagcggcctgctgcccatcgcccgggtgctgactgtgggcgctgaccgggaccagcagctgtgtgaccccggggagttcctgtgccacgaccacgtgacctgtgtgtcccagagctggctgtgtgatggagaccctgactgcccagatgacagtgatgagagcctggacacctgcccagaggaggtggagatcaagtgccccctgaaccacatcgcctgcctgggcaccaacaagtgtgtgcacctgagccagctgtgcaatggagtgctggactgcccagatggctatgatgagggcgtgcactgccaggagctgctgagcaactgccagcagctgaactgccagtacaagtgcaccatggtgaggaacagcacccgctgctactgtgaagatggctttgagatcacagaagatggccgcagctgcaaggaccaggatgaatgtgctgtgtatggcacctgcagccagacctgcaggaacacccacggcagctacacctgcagctgtgtggagggctacctgatgcagcctgacaacagaagctgcaaggccaagattgagcccacagacaggcctcccatcctgctgattgccaactttgagaccatcgaggtgttctacctgaatggcagcaagatggccaccctgagctctgtgaatggaaatgagatccacaccctggacttcatctacaatgaagacatgatctgctggattgagagccgggagagcagcaaccagctgaagtgcatccagatcaccaaggccggcggcctgacagatgagtggaccatcaacatcctgcagagcttccacaacgtgcagcagatggccatcgactggctgaccaggaacctgtactttgtggaccacgtgggggaccgcatctttgtgtgcaacagcaatggatctgtgtgtgtgaccctgattgacctggagctgcacaaccccaaggccatcgctgtggaccccatcgccggcaagctgttcttcacagattatggaaatgtggccaaggtggagcgctgtgacatggatggcatgaacagaacccgcatcatcgacagcaagacagagcagcctgctgccctggccctggacctggtgaacaagctggtgtactgggtggacctgtacctggactatgtgggcgtggtggactaccagggcaagaacagacacacagtcatccagggccggcaggtgcgccacctgtatggcatcaccgtgtttgaggactacctgtatgccaccaacagcgacaactacaacatcgtgcgcatcaaccgcttcaatggaacagacatccacagcctcatcaagattgaaaatgcctggggcatccgcatctaccagaagaggacccagcccaccgtgcgcagccacgcctgtgaggtggacccctacggcatgcctgggggctgcagccacatctgcctgctgagcagcagctacaagaccaggacctgccgctgcaggacaggcttcaacctgggcagtgatggccgcagctgcaagaggcccaagaatgaactcttcctgttctacggcaagggccggcccggcatcgtgcggggcatggacctgaacaccaagattgctgatgagtacatgatccccatcgagaacctggtgaacccccgggccctggacttccacgccgagaccaactacatctactttgctgacaccaccagcttcctgattggccggcagaagattgatggaacagagcgggagaccatcctgaaggatgacctggacaacgtggagggcattgctgtggactggattggcaacaacctgtactggaccaatgatggccacaggaagaccatcaacgtggcccggctggagaaggccagccagagcaggaagaccctgctggagggggagatgagccacccccggggcatcgtggtggaccctgtgaatggctggatgtactggacagactgggaggaggatgaaattgatgacagcgtgggccgcatcgagaaggcctggatggatggcttcaaccggcagatctttgtgaccagcaagatgctgtggcccaacggcctgaccctggacttccacaccaacaccctgtactggtgtgatgcctactatgaccacatcgagaaggtgttcctgaatggcacccacaggaagatcgtgtacagcggccgggagctgaaccaccccttcggcctgagccaccacggcaactacgtgttctggacagactacatgaatggcagcatcttccagctggacctgatcaccagcgaggtgaccctgctgcggcatgagaggcctcccctgtttggcctgcagatctatgaccccaggaagcagcagggcgacaacatgtgccgggtgaacaacggcggctgcagcaccctgtgcctggccatccctgggggccgggtgtgtgcctgtgccgacaaccagctgctggatgaaaatggcaccacctgcaccttcaaccctggagaggccctgccccacatctgcaaggccggggagttccgctgcaagaacagacactgcatccaggcccgctggaagtgtgatggagatgatgactgcctggatggcagtgatgaggacagcgtgaactgcttcaaccacagctgcccagatgaccagttcaagtgccagaacaaccgctgcatccccaagcgctggctgtgtgatggagccaatgactgtggcagcaatgaagatgagagcaaccagacctgcacagcccggacctgccaggtggaccagttcagctgtggaaatggccgctgcatcccccgggcctggctgtgtgacagagaagatgactgtggggaccagacagatgagatggccagctgtgagttccccacctgtgagcccctgacccagtttgtgtgcaagagcggccgctgcatcagcagcaagtggcactgtgacagtgatgatgactgtggagatggcagtgatgaggtgggctgtgtgcacagctgctttgacaaccagttccgctgcagcagcggccgctgcatccctggccactgggcctgtgatggagacaatgactgtggggacttcagtgatgaggcccagatcaactgcaccaaggaggagatccacagccctgctggctgcaatggaaatgagttccagtgccacccagatggcaactgtgtgcctgacctgtggaggtgtgatggagagaaggactgtgaagatggcagtgatgagaagggctgcaatggcaccatccggctgtgtgaccacaagaccaagttcagctgctggagcacaggccgctgcatcaacaaggcctgggtgtgtgatggagacatcgactgtgaggaccagagtgatgaagatgactgtgacagcttcctgtgtggcccccccaagcacccctgtgccaatgacacctctgtgtgcctgcagcctgagaagctgtgcaatggcaagaaggactgcccagatggcagtgatgagggctacctgtgtgatgaatgttccctgaacaacggcggctgcagcaaccactgcagcgtggtgcccggccggggcatcgtgtgcagctgcccagagggcctgcagctgaacaaggacaacaagacctgtgagatcgtggactactgcagcaaccacctgaagtgcagccaggtgtgtgagcagcacaagcacacagtgaagtgcagctgctatgagggctggaagctggatgtggatggagagagctgcacctctgtggacccctttgaggccttcatcatcttcagcatcagacatgagatcagaagaattgacctgcacaagagggactacagcctgctggtgcccggcctgaggaacaccatcgccctggacttccacttcaaccagagcctgctgtactggacagatgtggtggaggaccgcatctaccggggcaagctgtctgagagcggcggcgtgtctgccatcgaggtggtggtggagcacggcctggccaccccagagggcctgactgtggactggattgctggcaacatctactggattgacagcaacctggaccagatcgaggtggccaagctggatggcagcctgcggaccaccctgattgctggggccatggagcacccccgggccatcgccctggaccccaggtatggcatcctcttctggacagactgggatgccaacttcccccgcatcgagagcgcctccatgtctggggccggcaggaagaccatctacaaggacatgaagacaggagcctggcccaacggcctgactgtggaccactttgagaagagaattgtgtggacagatgcccggagtgatgccatctacagcgccctgtatgatggcaccaacatgattgagatcatccggggccacgagtacctgagccacccctttgctgtgtccctgtatggcagcgaggtgtactggacagactggaggaccaacaccctgagcaaggccaacaagtggacaggccagaatgtgtctgtcatccagaagaccagcgcccagccctttgacctgcagatctaccaccccagccggcagccccaggcccccaacccctgtgccgccaatgatggcaagggcccctgcagccacatgtgcctgatcaaccacaacagatctgctgcctgtgcctgcccccacctgatgaagctgagcagtgacaagaagacctgctatgagatgaagaagttcctgctgtatgcccggcgctctgagatccggggcgtggacatcgacaacccctacttcaacttcatcacagccttcaccgtgcctgacattgatgatgtgacagtgattgactttgatgccagcgaggagcggctgtactggacagacatcaagacccagaccatcaagagggccttcatcaatggcaccggcctggagaccgtcatcagccgggacatccagagcatccggggcctggccgtggactgggtgtccaggaacctgtactggatcagcagcgagtttgatgagacccagatcaacgtggcccggctggatggcagcctgaagaccagcatcatccacggcatcgacaagccccagtgcctggccgcccaccctgtgcggggcaagctgtactggacagatggcaacaccatcaacatggccaacatggatggcagcaacagcaagatcctcttccagaaccagaaggagcctgtgggcctgagcattgattatgtggagaacaagctgtactggatcagcagtggaaatggcaccatcaaccgctgcaacctggatggcggcaacctggaggtgattgagagcatgaaggaggagctgaccaaggccacagccctgaccatcatggacaagaagctgtggtgggccgaccagaacctggcccagctgggcacctgcagcaagagagatggaagaaaccccaccatcctgaggaacaagaccagcggcgtggtgcacatgaaggtgtatgacaaggaggcccagcagggcagcaacagctgccagctgaacaacggcggctgcagccagctgtgcctgcccaccagcgagaccaccaggacctgcatgtgcaccgtgggctactacctgcagaagaacaggatgagctgccagggcatcgagagcttcctgatgtacagcgtgcatgagggcatccggggcatccccctggagcccagcgacaagatggatgccctgatgcccatcagcggcaccagctttgctgtgggcatcgacttccacgccgagaatgacaccatctactggacagacatgggcttcaacaagatcagccgggccaagagggaccagacctggaaggaggacatcatcaccaacggcctgggccgggtggagggcattgctgtggactggattgctggcaacatctactggacagaccacggcttcaacctgattgaggtggcccggctgaatggcagcttccgctacgtgatcatcagccagggcctggaccagcccaggagcattgctgtgcaccctgagaagggcctgctcttctggacagagtggggccagatgccctgcatcggcaaggcccggctggatggcagcgagaaggtggtgctggtgtccatgggcatcgcctggcccaacggcatcagcattgattatgaggagaacaagctgtactggtgtgatgccaggacagacaagattgaaagaattgacctggagactggaggcaaccgggagatggtgctgagcggcagcaatgtggacatgttttctgtggccgtgtttggagcctacatctactggagcgaccgggcccacgccaatggatctgtgagaagaggccacaagaatgatgccacagagaccatcaccatgaggacaggcctgggcgtgaacctgaaggaggtgaagatcttcaacagagtgcgggagaagggcaccaacgtgtgtgcccgggacaatggaggctgcaagcagctgtgcctgtaccggggcaacagcaggaggacctgtgcctgtgcccacggctacctggctgaagatggagtgacctgcctgcggcatgagggctacctgctgtacagcggccgcaccatcctgaagagcatccacctgagtgatgagaccaacctgaacagccccatccggccctatgagaacccccgctacttcaagaatgtgattgccctggcctttgactacaaccagaggaggaagggcaccaaccgcatcttctacagtgatgcccacttcggcaacatccagctgatcaaggacaactgggaggaccggcaggtgattgtggagaatgtgggctctgtggagggcctggcctaccaccgggcctgggacaccctgtactggaccagcagcaccaccagcagcatcaccaggcacacagtggaccagaccaggcctggggcctttgaccgggaggccgtcatcaccatgtctgaagatgaccacccccacgtgctggccctggatgagtgccagaacctgatgttctggaccaactggaatgagcagcaccccagcatcatgaggagcaccctgaccgggaagaatgcccaggtggtggtgtccacagacatcctgacccccaacggcctgaccatcgactacagagctgagaagctgtacttcagtgatggcagcctgggcaagattgagcgctgtgaatatgatggcagccagagacatgtgattgtgaagagcggccctggcaccttcctgagcctggccgtgtatgacaactacatcttctggagcgactggggcagaagagccatcctgcggagcaacaagtacacaggaggagacaccaagatcctgcggagtgacatcccccaccagcccatgggcatcatcgctgtggccaatgacaccaacagctgtgagctgagcccctgtgccctgctgaatggaggctgccacgacctgtgcctgctgacccccaacggccgggtgaactgcagctgccgcggggaccgcatcctgctggaggacaacagatgtgtgaccaagaacagcagctgcaatgcctacagcgagtttgaatgtggaaatggagagtgcatcgactaccagctgacctgtgatggcatcccccactgcaaggacaagagtgatgagaagctgctgtactgtgagaacagaagctgcagaagaggcttcaagccctgctacaacagacgctgcatcccccacggcaagctgtgtgatggagaaaatgactgtggggacaacagtgatgagctggactgcaaggtgtccacctgtgccaccgtggagttccgctgtgctgatggcacctgcatccccaggtctgcccgctgcaaccagaacatcgactgtgctgatgccagtgatgagaagaactgcaacaacacagactgcacccacttctacaagctgggcgtgaagaccaccggcttcatccgctgcaacagcaccagcctgtgtgtgctgcccacctggatctgtgatggcagcaatgactgtggggactacagtgatgagctgaagtgccctgtgcagaacaagcacaagtgtgaggagaactacttcagctgccccagcggccgctgcatcctgaacacctggatctgtgatggccagaaggactgtgaagatggaagagatgagttccactgtgacagcagctgctcctggaaccagtttgcctgcagcgcccagaagtgcatcagcaagcactggatctgtgatggagaagatgactgtggagatggcctggatgaaagtgacagcatctgtggggccatcacctgtgccgctgacatgttcagctgccagggcagccgggcctgtgtgcccaggcactggctgtgtgatggagagcgggactgcccagatggcagtgatgagctgagcacagctggctgtgcccccaacaacacctgtgatgaaaatgccttcatgtgccacaacaaggtgtgcatccccaagcagtttgtgtgtgaccatgatgatgactgtggagatggcagtgatgagagcccccagtgtggctaccggcagtgtggcacagaggagttcagctgtgctgatggccgctgcctgctgaacacccagtggcagtgtgatggagactttgactgcccagaccacagtgatgaggcccccctgaaccccaagtgcaagtctgctgagcagagctgcaacagcagcttcttcatgtgcaagaatggccgctgcatccccagcggcggcctgtgtgacaacaaggatgactgtggagatggcagtgatgaaagaaactgccacatcaatgaatgtctgagcaagaaggtgtctggctgcagccaggactgccaggacctgcctgtgtcctacaagtgcaagtgctggccaggcttccagctgaaggatgatggcaagacctgtgtggacattgatgaatgtagcagcggcttcccctgcagccagcagtgcatcaacacctacggcacctacaagtgcctgtgcacagatggctatgagatccagcctgacaaccccaacggctgcaagagcctgagtgatgaggagcccttcctgatcctggccgaccaccacgagatcaggaagatcagcacagatggcagcaactacaccctgctgaagcagggcctgaacaacgtcatcgccatcgactttgactaccgggaggagttcatctactggattgacagcagccggcccaacggcagccgcatcaacaggatgtgcctgaatggaagtgacatcaaggtggtgcacaacacagctgtgcccaatgccctggccgtggactggattggcaagaacctgtactggagcgacacagagaagaggatcatcgaggtgtccaagctgaatggcctgtaccccaccatcctggtgtccaagaggctgaagttcccccgggacctgagcctggacccccaggccggctacctgtactggattgactgctgtgagtacccccacatcggccgggtgggcatggatggcaccaaccagagcgtggtgattgagaccaagatcagccggcccatggccctgaccattgattatgtgaacagaaggctgtactgggcagatgagaaccacatcgagttcagcaacatggatggcagccaccgccacaaggtgcccaaccaggacatccctggggtcatcgccctgaccctgtttgaggactacatctactggacagatggcaagaccaagagcctgagccgggcccacaagaccagcggggctgaccggctgagcctcatctacagctggcacgccatcacagacatccaggtgtaccacagctaccggcagccagatgtgtccaagcacctgtgcatgatcaacaatggaggctgcagccacctgtgcctgctggcccctgggaagacccacacctgtgcctgccccaccaacttctacctggccgctgacaacagaacctgcctgagcaactgcacagccagccagttccgctgcaagacagacaagtgcatccccttctggtggaagtgtgacacagtggatgactgtggagatggcagtgatgagccagatgactgcccagagttccgctgccagcccggccgcttccagtgtggcaccggcctgtgtgccctgcctgccttcatctgtgatggagaaaatgactgtggggacaacagtgatgagctgaactgtgacacccacgtgtgcctgagcggccagttcaagtgcaccaagaaccagaagtgcatccctgtgaacctgcgctgcaatggccaggatgactgtggagatgaggaggatgagcgggactgcccagagaacagctgcagcccagactacttccagtgcaagaccaccaagcactgcatcagcaagctgtgggtgtgtgatgaggaccctgactgtgctgatgccagtgatgaggccaactgtgacaagaagacctgtggcccccatgagttccagtgcaagaacaacaactgcatcccagaccactggaggtgtgacagccagaatgactgcagcgacaacagtgatgaggagaactgcaagccccagacctgcaccctgaaggacttcctgtgtgccaacggggactgtgtgagcagccgcttctggtgtgatggagactttgactgtgctgatggcagtgatgaaagaaactgtgagaccagctgcagcaaggaccagttccgctgcagcaatggccagtgcatcccagccaagtggaagtgtgatggccacgaggactgcaagtacggggaggatgagaagagctgtgagcccgccagccccacctgcagcagccgggagtacatctgtgccagtgatggctgcatcagcgccagcctgaagtgcaatggagaatatgactgtgctgatggcagtgatgagatggactgtgtgacagagtgcaaggaggaccagttccgctgcaagaacaaggcccactgcatccccatccgctggctgtgtgatggcatccatgactgtgtggatggcagtgatgaggagaactgtgagcggggcggcaacatctgcagagcagatgagttcctgtgcaacaacagcctgtgcaagctgcacttctgggtgtgtgatggagaagatgactgtggggacaacagtgatgaggccccagacatgtgtgtgaagttcctgtgccccagcacccggccccaccgctgcaggaacaaccgcatctgcctgcagagcgagcagatgtgcaatggaattgatgaatgtggggacaacagtgatgaggaccactgcggcggcaagctgacctacaaggcccggccctgcaagaaggatgaatttgcctgcagcaacaagaagtgcatccccatggacctgcagtgtgaccggctggatgactgtggagatggcagtgatgagcagggctgccgcatcgcccccacagagtacacctgtgaggacaacgtgaacccctgtggagatgatgcctactgcaaccagatcaagaccagcgtcttctgccgctgcaagccaggcttccagaggaacatgaagaaccggcagtgtgaggacctgaatgaatgtctggtgtttggcacctgcagccaccagtgcatcaacgtggagggcagctacaagtgtgtgtgtgaccagaacttccaggagaggaacaacacctgcatcgccgagggcagcgaggaccaggtgctgtacatcgccaatgacacagacatcctgggcttcatctaccccttcaactacagcggggaccaccagcagatcagccacatcgagcacaacagccgcatcaccggcatggatgtgtactaccagagggacatgatcatctggagcacccagttcaaccctgggggcatcttctacaagaggatccacggccgggagaagaggcaggccaacagcggcctcatctgcccagagttcaagaggccccgggacattgctgtggactgggtggccggcaacatctactggacagaccacagcaggatgcactggttctcctactacaccacccactggaccagcctgcgctacagcatcaacgtgggccagctgaatggccccaactgcacccggctgctgaccaacatggccggggagccctatgccatcgctgtgaaccccaagaggggcatgatgtactggacagtggtgggggaccacagccacatcgaggaggccgccatggatggcaccctgcggcgcatcctggtgcagaagaacctgcagaggcccaccggcctggccgtggactacttcagcgagcgcatctactgggccgactttgagctgagcatcatcggctctgtgctgtatgatggcagcaacagcgtggtgtctgtgagcagcaagcagggcctgctgcacccccacagaattgacatctttgaggactacatctatggagctggccccaagaatggagtcttccgggtgcagaagtttggacatggctctgtggagtacctggccctgaacatcgacaagaccaagggcgtgctgatcagccaccgctacaagcagctggacctgcccaacccctgcctggacctggcctgtgagttcctgtgcctgctgaaccccagcggggccacctgtgtgtgcccagagggcaagtacctgatcaatggcacctgcaatgatgacagcctgctggatgacagctgcaagctgacctgtgaaaatggaggccgctgcatcctgaatgagaagggggacctgcgctgccactgctggcccagctacagcggggagcgctgtgaggtgaaccactgcagcaactactgccagaatggaggcacctgtgtgcccagcgtgctgggccggcccacctgcagctgtgccctgggcttcaccggccccaactgtgggaagacagtgtgtgaggacttctgccagaatggaggcacctgcatcgtgacagctggcaaccagccctactgccactgccagcctgagtacaccggggaccgctgccagtactacgtgtgccaccactactgtgtgaacagcgagagctgcaccatcggagatgatggctctgtggagtgtgtgtgccccaccaggtatgagggccccaagtgtgaggtggacaagtgtgtgcgctgccacggcggccactgcatcatcaacaaggacagcgaggacatcttctgcaactgcaccaacgggaagatcgccagcagctgccagctgtgtgatggctactgctacaacggcggcacctgccagctggaccctgagaccaacgtgcctgtgtgcctgtgcagcaccaactggagcggcacccagtgtgagaggcctgcccccaagagcagcaagagtgaccacatcagcaccaggagcatcgccatcatcgtgcccctggtgctgctggtgaccctcatcaccaccctggtgattggcctggtgctgtgcaagaggaagaggaggaccaagaccatccggcggcagcccatcatcaatggaggcatcaacgtggagatcggcaaccccagctacaacatgtatgaggtggaccatgaccacaatgatggcggcctgctggaccccggcttcatgattgaccccaccaaggcccgctacatcggcggcggccccagcgccttcaagctgccccacacagccccacccatctacctgaacagcgacctgaagggccccctgacagctggccccaccaactacagcaaccctgtgtatgccaagctgtacatggatggccagaactgcaggaacagcctgggctctgtggatgagaggaaggagctgctgcccaagaagattgagatcggcatccgggagaccgtggcctag

SEQ ID NO: 199052 - DNA, 2349 bp, Artificial Sequence
  derived and/or modified sequence
atgtctgagttcctgctggccctgctgaccctgagcggcctgctgcccatcgcccgggtgctgactgtgggcgctgaccgggaccagcagctgtgtgaccccggggagttcctgtgccacgaccacgtgacctgtgtgtcccagagctggctgtgtgatggagaccctgactgcccagatgacagtgatgagagcctggacaccagcaggacctgccaggtggaccagttcagctgtggaaatggccgctgcatcccccgggcctggctgtgtgaccgggaggatgactgtggggaccagacagatgagatggccagctgtgagttccccacctgtgagcccctgacccagtttgtgtgcaagagcggccgctgcatcagcagcaagtggcactgtgacagtgatgatgactgtggagatggcagtgatgaggtgggctgtgtgcacagctgctttgacaaccagttccgctgcagcagcggccgctgcatccctggccactgggcctgtgatggagacaatgactgtggggacttcagtgatgaggcccagatcaactgcaccaaggaggagatccacagccctgctggctgcaatggaaatgagttccagtgccacccagatggcaactgtgtgcctgacctgtggaggtgtgatggagagaaggactgtgaagatggcagtgatgagaagggctgcaatggcaccatccggctgtgtgaccacaagaccaagttcagctgctggagcacaggccgctgcatcaacaaggcctgggtgtgtgatggagacatcgactgtgaggaccagagtgatgaagatgactgtgacagcttcctgtgtggcccccccaagcacccctgtgccaatgacacctctgtgtgcctgcagcctgagaagctgtgcaatggcaagaaggactgcccagatggcagtgatgagggctacctgtgtgatgagtgcagcctgaacaatggaggctgcagcaaccactgcagcgtggtgcccggccggggcatcgtgtgcagctgcccagagggcctgcagctgaacaaggacaacaagacctgtgaaattgtggactactgcagcaaccacctgaagtgcagccaggtgtgtgagcagcacaagcacacagtgaagtgcagctgctatgagggctggaagctggatgtggatggagagagctgcacctctgtggacccctttgaggccttcatcatcttcagcatcagacatgagatcagaagaattgacctgcacaagagggactacagcctgctggtgcccggcctgaggaacaccatcgccctggacttccacttcaaccagagcctgctgtactggacagatgtggtggaggaccgcatctaccggggcaagctgtctgagagcggaggagtgtctgccatcgaggtggtggtggagcacggcctggccaccccagagggcctgactgtggactggattgctggcaacatctactggattgacagcaacctggaccagatcgaggtggccaagctggatggcagcctgcggaccaccctgattgctggggccatggagcacccccgggccatcgccctggaccccaggtatggcatcctcttctggacagactgggatgccaacttccccagaattgaaagtgcctccatgtctggagctggcaggaagaccatctacaaggacatgaagacaggagcctggcccaacggcctgactgtggaccactttgagaagagaattgtgtggacagatgcccggagtgatgccatctacagcgccctgtatgatggcaccaacatgattgagatcatccggggccacgagtacctgagccacccctttgctgtgtccctgtatggcagcgaggtgtactggacagactggaggaccaacaccctgagcaaggccaacaagtggacaggccagaatgtgtctgtcatccagaagaccagcgcccagccctttgacctgcagatctaccaccccagccggcagccccaggcccccaacccctgtgccgccaatgatggcaagggcccctgcagccacatgtgcctgatcaaccacaacagatctgctgcctgtgcctgcccccacctgatgaagctgagcagtgacaagaagacctgctatgagatgaagaagttcctgctgtatgccaggagaagtgagatccggggcgtggacatcgacaacccctacttcaacttcatcacagccttcaccgtgcctgacattgatgatgtgaccgtcatcgactttgatgccagcgaggagcggctgtactggacagacatcaagacccagaccatcaagagggccttcatcaatggatag

SEQ ID NO: 199053 - DNA, 13614 bp, Artificial Sequence
  derived and/or modified sequence
ttcctgcacagcggccctgaggaggtggagatcaagtgccccctgaaccacatcgcctgcctgggcaccaacaagtgtgtgcacctgagccagctgtgcaatggagtgctggactgcccagatggctatgatgagggcgtgcactgccagggcgagagcatctgccagcagctgaactgcaccatgtacaagtacaagtgcaccatggtgaggaacagcacccgctgctactgtgaagatggctttgagatcacagaagatggccgcagctgcaaggaccaggatgaatgtgctgtgtatggcacctgcagccagacctgcaggaacacccacggcagctacacctgcagctgtgtggagggctacctgatgcagcctgacaacagaagctgcaaggccaagattgagcccacagacaggcctcccatcctgctgattgccaactttgagaccatcgaggtgttctacctgaatggcagcaagatggccaccctgagctctgtgaatggaaatgagatccacaccctggacttcatctacaatgaagacatgatctgctggattgagagccgggagagcagcaaccagctgaagtgcatccagatcaccaaggccggcggcctgacagatgagtggaccatcaacatcctgcagagcttccacaacgtgcagcagatggccatcgactggctgaccaggaacctgtactttgtggaccacgtgggggaccgcatctttgtgtgcaacagcaatggatctgtgtgtgtgaccctgattgacctggagctgcacaaccccaaggccatcgctgtggaccccatcgccggcaagctgttcttcacagattatggaaatgtggccaaggtggagcgctgtgacatggatggcatgaacagaacccgcatcatcgacagcaagacagagcagcctgctgccctggccctggacctggtgaacaagctggtgtactgggtggacctgtacctggactatgtgggcgtggtggactaccagggcaagaacagacacacagtcatccagggccggcaggtgcgccacctgtatggcatcaccgtgtttgaggactacctgtatgccaccaacagcgacaactacaacatcgtgcgcatcaaccgcttcaatggaacagacatccacagcctcatcaagattgaaaatgcctggggcatccgcatctaccagaagaggacccagcccaccgtgcgcagccacgcctgtgaggtggacccctacggcatgcctgggggctgcagccacatctgcctgctgagcagcagctacaagaccaggacctgccgctgcaggacaggcttcaacctgggcagtgatggccgcagctgcaagaggcccaagaatgaactcttcctgttctacggcaagggccggcccggcatcgtgcggggcatggacctgaacaccaagattgctgatgagtacatgatccccatcgagaacctggtgaacccccgggccctggacttccacgccgagaccaactacatctactttgctgacaccaccagcttcctgattggccggcagaagattgatggaacagagcgggagaccatcctgaaggatgacctggacaacgtggagggcattgctgtggactggattggcaacaacctgtactggaccaatgatggccacaggaagaccatcaacgtggcccggctggagaaggccagccagagcaggaagaccctgctggagggggagatgagccacccccggggcatcgtggtggaccctgtgaatggctggatgtactggacagactgggaggaggatgaaattgatgacagcgtgggccgcatcgagaaggcctggatggatggcttcaaccggcagatctttgtgaccagcaagatgctgtggcccaacggcctgaccctggacttccacaccaacaccctgtactggtgtgatgcctactatgaccacatcgagaaggtgttcctgaatggcacccacaggaagatcgtgtacagcggccgggagctgaaccaccccttcggcctgagccaccacggcaactacgtgttctggacagactacatgaatggcagcatcttccagctggacctgatcaccagcgaggtgaccctgctgcggcatgagaggcctcccctgtttggcctgcagatctatgaccccaggaagcagcagggcgacaacatgtgccgggtgaacaacggcggctgcagcaccctgtgcctggccatccctgggggccgggtgtgtgcctgtgccgacaaccagctgctggatgaaaatggcaccacctgcaccttcaaccctggagaggccctgccccacatctgcaaggccggggagttccgctgcaagaacagacactgcatccaggcccgctggaagtgtgatggagatgatgactgcctggatggcagtgatgaggacagcgtgaactgcttcaaccacagctgcccagatgaccagttcaagtgccagaacaaccgctgcatccccaagcgctggctgtgtgatggagccaatgactgtggcagcaatgaagatgagagcaaccagacctgcacagcccggacctgccaggtggaccagttcagctgtggaaatggccgctgcatcccccgggcctggctgtgtgacagagaagatgactgtggggaccagacagatgagatggccagctgtgagttccccacctgtgagcccctgacccagtttgtgtgcaagagcggccgctgcatcagcagcaagtggcactgtgacagtgatgatgactgtggagatggcagtgatgaggtgggctgtgtgcacagctgctttgacaaccagttccgctgcagcagcggccgctgcatccctggccactgggcctgtgatggagacaatgactgtggggacttcagtgatgaggcccagatcaactgcaccaaggaggagatccacagccctgctggctgcaatggaaatgagttccagtgccacccagatggcaactgtgtgcctgacctgtggaggtgtgatggagagaaggactgtgaagatggcagtgatgagaagggctgcaatggcaccatccggctgtgtgaccacaagaccaagttcagctgctggagcacaggccgctgcatcaacaaggcctgggtgtgtgatggagacatcgactgtgaggaccagagtgatgaagatgactgtgacagcttcctgtgtggcccccccaagcacccctgtgccaatgacacctctgtgtgcctgcagcctgagaagctgtgcaatggcaagaaggactgcccagatggcagtgatgagggctacctgtgtgatgaatgttccctgaacaacggcggctgcagcaaccactgcagcgtggtgcccggccggggcatcgtgtgcagctgcccagagggcctgcagctgaacaaggacaacaagacctgtgagatcgtggactactgcagcaaccacctgaagtgcagccaggtgtgtgagcagcacaagcacacagtgaagtgcagctgctatgagggctggaagctggatgtggatggagagagctgcacctctgtggacccctttgaggccttcatcatcttcagcatcagacatgagatcagaagaattgacctgcacaagagggactacagcctgctggtgcccggcctgaggaacaccatcgccctggacttccacttcaaccagagcctgctgtactggacagatgtggtggaggaccgcatctaccggggcaagctgtctgagagcggcggcgtgtctgccatcgaggtggtggtggagcacggcctggccaccccagagggcctgactgtggactggattgctggcaacatctactggattgacagcaacctggaccagatcgaggtggccaagctggatggcagcctgcggaccaccctgattgctggggccatggagcacccccgggccatcgccctggaccccaggtatggcatcctcttctggacagactgggatgccaacttcccccgcatcgagagcgcctccatgtctggggccggcaggaagaccatctacaaggacatgaagacaggagcctggcccaacggcctgactgtggaccactttgagaagagaattgtgtggacagatgcccggagtgatgccatctacagcgccctgtatgatggcaccaacatgattgagatcatccggggccacgagtacctgagccacccctttgctgtgtccctgtatggcagcgaggtgtactggacagactggaggaccaacaccctgagcaaggccaacaagtggacaggccagaatgtgtctgtcatccagaagaccagcgcccagccctttgacctgcagatctaccaccccagccggcagccccaggcccccaacccctgtgccgccaatgatggcaagggcccctgcagccacatgtgcctgatcaaccacaacagatctgctgcctgtgcctgcccccacctgatgaagctgagcagtgacaagaagacctgctatgagatgaagaagttcctgctgtatgcccggcgctctgagatccggggcgtggacatcgacaacccctacttcaacttcatcacagccttcaccgtgcctgacattgatgatgtgacagtgattgactttgatgccagcgaggagcggctgtactggacagacatcaagacccagaccatcaagagggccttcatcaatggcaccggcctggagaccgtcatcagccgggacatccagagcatccggggcctggccgtggactgggtgtccaggaacctgtactggatcagcagcgagtttgatgagacccagatcaacgtggcccggctggatggcagcctgaagaccagcatcatccacggcatcgacaagccccagtgcctggccgcccaccctgtgcggggcaagctgtactggacagatggcaacaccatcaacatggccaacatggatggcagcaacagcaagatcctcttccagaaccagaaggagcctgtgggcctgagcattgattatgtggagaacaagctgtactggatcagcagtggaaatggcaccatcaaccgctgcaacctggatggcggcaacctggaggtgattgagagcatgaaggaggagctgaccaaggccacagccctgaccatcatggacaagaagctgtggtgggccgaccagaacctggcccagctgggcacctgcagcaagagagatggaagaaaccccaccatcctgaggaacaagaccagcggcgtggtgcacatgaaggtgtatgacaaggaggcccagcagggcagcaacagctgccagctgaacaacggcggctgcagccagctgtgcctgcccaccagcgagaccaccaggacctgcatgtgcaccgtgggctactacctgcagaagaacaggatgagctgccagggcatcgagagcttcctgatgtacagcgtgcatgagggcatccggggcatccccctggagcccagcgacaagatggatgccctgatgcccatcagcggcaccagctttgctgtgggcatcgacttccacgccgagaatgacaccatctactggacagacatgggcttcaacaagatcagccgggccaagagggaccagacctggaaggaggacatcatcaccaacggcctgggccgggtggagggcattgctgtggactggattgctggcaacatctactggacagaccacggcttcaacctgattgaggtggcccggctgaatggcagcttccgctacgtgatcatcagccagggcctggaccagcccaggagcattgctgtgcaccctgagaagggcctgctcttctggacagagtggggccagatgccctgcatcggcaaggcccggctggatggcagcgagaaggtggtgctggtgtccatgggcatcgcctggcccaacggcatcagcattgattatgaggagaacaagctgtactggtgtgatgccaggacagacaagattgaaagaattgacctggagactggaggcaaccgggagatggtgctgagcggcagcaatgtggacatgttttctgtggccgtgtttggagcctacatctactggagcgaccgggcccacgccaatggatctgtgagaagaggccacaagaatgatgccacagagaccatcaccatgaggacaggcctgggcgtgaacctgaaggaggtgaagatcttcaacagagtgcgggagaagggcaccaacgtgtgtgcccgggacaatggaggctgcaagcagctgtgcctgtaccggggcaacagcaggaggacctgtgcctgtgcccacggctacctggctgaagatggagtgacctgcctgcggcatgagggctacctgctgtacagcggccgcaccatcctgaagagcatccacctgagtgatgagaccaacctgaacagccccatccggccctatgagaacccccgctacttcaagaatgtgattgccctggcctttgactacaaccagaggaggaagggcaccaaccgcatcttctacagtgatgcccacttcggcaacatccagctgatcaaggacaactgggaggaccggcaggtgattgtggagaatgtgggctctgtggagggcctggcctaccaccgggcctgggacaccctgtactggaccagcagcaccaccagcagcatcaccaggcacacagtggaccagaccaggcctggggcctttgaccgggaggccgtcatcaccatgtctgaagatgaccacccccacgtgctggccctggatgagtgccagaacctgatgttctggaccaactggaatgagcagcaccccagcatcatgaggagcaccctgaccgggaagaatgcccaggtggtggtgtccacagacatcctgacccccaacggcctgaccatcgactacagagctgagaagctgtacttcagtgatggcagcctgggcaagattgagcgctgtgaatatgatggcagccagagacatgtgattgtgaagagcggccctggcaccttcctgagcctggccgtgtatgacaactacatcttctggagcgactggggcagaagagccatcctgcggagcaacaagtacacaggaggagacaccaagatcctgcggagtgacatcccccaccagcccatgggcatcatcgctgtggccaatgacaccaacagctgtgagctgagcccctgtgccctgctgaatggaggctgccacgacctgtgcctgctgacccccaacggccgggtgaactgcagctgccgcggggaccgcatcctgctggaggacaacagatgtgtgaccaagaacagcagctgcaatgcctacagcgagtttgaatgtggaaatggagagtgcatcgactaccagctgacctgtgatggcatcccccactgcaaggacaagagtgatgagaagctgctgtactgtgagaacagaagctgcagaagaggcttcaagccctgctacaacagacgctgcatcccccacggcaagctgtgtgatggagaaaatgactgtggggacaacagtgatgagctggactgcaaggtgtccacctgtgccaccgtggagttccgctgtgctgatggcacctgcatccccaggtctgcccgctgcaaccagaacatcgactgtgctgatgccagtgatgagaagaactgcaacaacacagactgcacccacttctacaagctgggcgtgaagaccaccggcttcatccgctgcaacagcaccagcctgtgtgtgctgcccacctggatctgtgatggcagcaatgactgtggggactacagtgatgagctgaagtgccctgtgcagaacaagcacaagtgtgaggagaactacttcagctgccccagcggccgctgcatcctgaacacctggatctgtgatggccagaaggactgtgaagatggaagagatgagttccactgtgacagcagctgctcctggaaccagtttgcctgcagcgcccagaagtgcatcagcaagcactggatctgtgatggagaagatgactgtggagatggcctggatgaaagtgacagcatctgtggggccatcacctgtgccgctgacatgttcagctgccagggcagccgggcctgtgtgcccaggcactggctgtgtgatggagagcgggactgcccagatggcagtgatgagctgagcacagctggctgtgcccccaacaacacctgtgatgaaaatgccttcatgtgccacaacaaggtgtgcatccccaagcagtttgtgtgtgaccatgatgatgactgtggagatggcagtgatgagagcccccagtgtggctaccggcagtgtggcacagaggagttcagctgtgctgatggccgctgcctgctgaacacccagtggcagtgtgatggagactttgactgcccagaccacagtgatgaggcccccctgaaccccaagtgcaagtctgctgagcagagctgcaacagcagcttcttcatgtgcaagaatggccgctgcatccccagcggcggcctgtgtgacaacaaggatgactgtggagatggcagtgatgaaagaaactgccacatcaatgaatgtctgagcaagaaggtgtctggctgcagccaggactgccaggacctgcctgtgtcctacaagtgcaagtgctggccaggcttccagctgaaggatgatggcaagacctgtgtggacattgatgaatgtagcagcggcttcccctgcagccagcagtgcatcaacacctacggcacctacaagtgcctgtgcacagatggctatgagatccagcctgacaaccccaacggctgcaagagcctgagtgatgaggagcccttcctgatcctggccgaccaccacgagatcaggaagatcagcacagatggcagcaactacaccctgctgaagcagggcctgaacaacgtcatcgccatcgactttgactaccgggaggagttcatctactggattgacagcagccggcccaacggcagccgcatcaacaggatgtgcctgaatggaagtgacatcaaggtggtgcacaacacagctgtgcccaatgccctggccgtggactggattggcaagaacctgtactggagcgacacagagaagaggatcatcgaggtgtccaagctgaatggcctgtaccccaccatcctggtgtccaagaggctgaagttcccccgggacctgagcctggacccccaggccggctacctgtactggattgactgctgtgagtacccccacatcggccgggtgggcatggatggcaccaaccagagcgtggtgattgagaccaagatcagccggcccatggccctgaccattgattatgtgaacagaaggctgtactgggcagatgagaaccacatcgagttcagcaacatggatggcagccaccgccacaaggtgcccaaccaggacatccctggggtcatcgccctgaccctgtttgaggactacatctactggacagatggcaagaccaagagcctgagccgggcccacaagaccagcggggctgaccggctgagcctcatctacagctggcacgccatcacagacatccaggtgtaccacagctaccggcagccagatgtgtccaagcacctgtgcatgatcaacaatggaggctgcagccacctgtgcctgctggcccctgggaagacccacacctgtgcctgccccaccaacttctacctggccgctgacaacagaacctgcctgagcaactgcacagccagccagttccgctgcaagacagacaagtgcatccccttctggtggaagtgtgacacagtggatgactgtggagatggcagtgatgagccagatgactgcccagagttccgctgccagcccggccgcttccagtgtggcaccggcctgtgtgccctgcctgccttcatctgtgatggagaaaatgactgtggggacaacagtgatgagctgaactgtgacacccacgtgtgcctgagcggccagttcaagtgcaccaagaaccagaagtgcatccctgtgaacctgcgctgcaatggccaggatgactgtggagatgaggaggatgagcgggactgcccagagaacagctgcagcccagactacttccagtgcaagaccaccaagcactgcatcagcaagctgtgggtgtgtgatgaggaccctgactgtgctgatgccagtgatgaggccaactgtgacaagaagacctgtggcccccatgagttccagtgcaagaacaacaactgcatcccagaccactggaggtgtgacagccagaatgactgcagcgacaacagtgatgaggagaactgcaagccccagacctgcaccctgaaggacttcctgtgtgccaacggggactgtgtgagcagccgcttctggtgtgatggagactttgactgtgctgatggcagtgatgaaagaaactgtgagaccagctgcagcaaggaccagttccgctgcagcaatggccagtgcatcccagccaagtggaagtgtgatggccacgaggactgcaagtacggggaggatgagaagagctgtgagcccgccagccccacctgcagcagccgggagtacatctgtgccagtgatggctgcatcagcgccagcctgaagtgcaatggagaatatgactgtgctgatggcagtgatgagatggactgtgtgacagagtgcaaggaggaccagttccgctgcaagaacaaggcccactgcatccccatccgctggctgtgtgatggcatccatgactgtgtggatggcagtgatgaggagaactgtgagcggggcggcaacatctgcagagcagatgagttcctgtgcaacaacagcctgtgcaagctgcacttctgggtgtgtgatggagaagatgactgtggggacaacagtgatgaggccccagacatgtgtgtgaagttcctgtgccccagcacccggccccaccgctgcaggaacaaccgcatctgcctgcagagcgagcagatgtgcaatggaattgatgaatgtggggacaacagtgatgaggaccactgcggcggcaagctgacctacaaggcccggccctgcaagaaggatgaatttgcctgcagcaacaagaagtgcatccccatggacctgcagtgtgaccggctggatgactgtggagatggcagtgatgagcagggctgccgcatcgcccccacagagtacacctgtgaggacaacgtgaacccctgtggagatgatgcctactgcaaccagatcaagaccagcgtcttctgccgctgcaagccaggcttccagaggaacatgaagaaccggcagtgtgaggacctgaatgaatgtctggtgtttggcacctgcagccaccagtgcatcaacgtggagggcagctacaagtgtgtgtgtgaccagaacttccaggagaggaacaacacctgcatcgccgagggcagcgaggaccaggtgctgtacatcgccaatgacacagacatcctgggcttcatctaccccttcaactacagcggggaccaccagcagatcagccacatcgagcacaacagccgcatcaccggcatggatgtgtactaccagagggacatgatcatctggagcacccagttcaaccctgggggcatcttctacaagaggatccacggccgggagaagaggcaggccaacagcggcctcatctgcccagagttcaagaggccccgggacattgctgtggactgggtggccggcaacatctactggacagaccacagcaggatgcactggttctcctactacaccacccactggaccagcctgcgctacagcatcaacgtgggccagctgaatggccccaactgcacccggctgctgaccaacatggccggggagccctatgccatcgctgtgaaccccaagaggggcatgatgtactggacagtggtgggggaccacagccacatcgaggaggccgccatggatggcaccctgcggcgcatcctggtgcagaagaacctgcagaggcccaccggcctggccgtggactacttcagcgagcgcatctactgggccgactttgagctgagcatcatcggctctgtgctgtatgatggcagcaacagcgtggtgtctgtgagcagcaagcagggcctgctgcacccccacagaattgacatctttgaggactacatctatggagctggccccaagaatggagtcttccgggtgcagaagtttggacatggctctgtggagtacctggccctgaacatcgacaagaccaagggcgtgctgatcagccaccgctacaagcagctggacctgcccaacccctgcctggacctggcctgtgagttcctgtgcctgctgaaccccagcggggccacctgtgtgtgcccagagggcaagtacctgatcaatggcacctgcaatgatgacagcctgctggatgacagctgcaagctgacctgtgaaaatggaggccgctgcatcctgaatgagaagggggacctgcgctgccactgctggcccagctacagcggggagcgctgtgaggtgaaccactgcagcaactactgccagaatggaggcacctgtgtgcccagcgtgctgggccggcccacctgcagctgtgccctgggcttcaccggccccaactgtgggaagacagtgtgtgaggacttctgccagaatggaggcacctgcatcgtgacagctggcaaccagccctactgccactgccagcctgagtacaccggggaccgctgccagtactacgtgtgccaccactactgtgtgaacagcgagagctgcaccatcggagatgatggctctgtggagtgtgtgtgccccaccaggtatgagggccccaagtgtgaggtggacaagtgtgtgcgctgccacggcggccactgcatcatcaacaaggacagcgaggacatcttctgcaactgcaccaacgggaagatcgccagcagctgccagctgtgtgatggctactgctacaacggcggcacctgccagctggaccctgagaccaacgtgcctgtgtgcctgtgcagcaccaactggagcggcacccagtgtgagaggcctgcccccaagagcagcaagagtgaccacatcagcaccaggagcatcgccatcatcgtgcccctggtgctgctggtgaccctcatcaccaccctggtgattggcctggtgctgtgcaagaggaagaggaggaccaagaccatccggcggcagcccatcatcaatggaggcatcaacgtggagatcggcaaccccagctacaacatgtatgaggtggaccatgaccacaatgatggcggcctgctggaccccggcttcatgattgaccccaccaaggcccgctacatcggcggcggccccagcgccttcaagctgccccacacagccccacccatctacctgaacagcgacctgaagggccccctgacagctggccccaccaactacagcaaccctgtgtatgccaagctgtacatggatggccagaactgcaggaacagcctgggctctgtggatgagaggaaggagctgctgcccaagaagattgagatcggcatccgggagaccgtggcctag

SEQ ID NO: 199054 - DNA, 16535 bp, Artificial Sequence
  derived and/or modified sequence
aaagacagaaccccagagaaaaacgctgccaattcgttgctttattgttccctgcctggggacctcaatagccttttccattaaccttcccttcttacgcaacggttaatgactttgggggttgttttgctttctgtttctgctgagtcactaaattttgcctctttgtccccaggtgctgctcagcataaaagttaaaagtgcaattcaggaagtactgggattctgtgtagagccgaggaaaccatttccctaagagaagctctgttccttggcttgtccttccttcccgggaaggaagcttccgaggaacgaagggagaagctttgttttgcctgcagaagcagccctgtgctcggctgagggttctcagctggctgtgaactgcggagcattgtaggcgcctggctggctcaggccaatgcagaagtctctcccttctccaaagacccaaatccccacagaaccagcttcgagttactttcccttcaaggggattaaaataattgtgatttgtggcgctctccgttcgcggtggtattttcctgttgtgttaaatgcctcttattaagtaatagatgtgatttatgtgaacgacgaaggggtgtgtggtggattcggtgattaatcagtgaattcccatccgctggcatctctcactgcccctcttgcgtgatgtaagatcagacgtaccctgcattgaaaagtcaagacacacgggcgtctcgctcgcgctcacacacgctctgcctcctctctcccgcacgcgcgcatccctccaccttccacatcctgctccaggcaggagaaggctgactggctggactcattgagctgaagaatttccagtgacatttgtaaatgacgccgctcgattccaggctccaagcggcccctgccgccgccgccgccgccgggccgaaggtgccgccgagcagtctccagcgcaggcttccttaccgggcgaccacaatgtccgagtttctcctcgccttactcactctctcgggattattgccgattgccagggtgctgaccgtgggagccgaccgagatcagcagttgtgtgatcctggtgaatttctttgccacgatcacgtgacttgtgtctcccagagctggctgtgtgatggggaccctgactgccctgatgattcagacgagtctttagatacctgtcccgaggaggtagaaatcaagtgccccttgaatcacattgcttgccttggtaccaacaaatgtgttcatttatcccagctgtgcaatggtgtcttggactgcccagatgggtatgacgaaggagtacattgtcaggaactgttatccaattgccaacagctgaattgtcagtataaatgtacaatggtcagaaatagtacaagatgttactgtgaggatggattcgaaataacagaagatgggagaagctgtaaagatcaagatgaatgtgctgtttatggtacatgcagccagacctgcagaaacacacatggatcctacacttgcagttgtgtggaaggctacctaatgcagccagacaacagatcttgcaaggctaaaattgaacctacagatagaccacctatactattaattgcaaattttgaaacaattgaggttttctatcttaatggaagtaaaatggcaactctaagctcagtcaatggaaatgaaattcatactctggattttatttataatgaagatatgatttgttggattgaatcaagagaatcttcaaatcaactcaaatgtatccagataacaaaagcaggaggattaacagatgaatggacaatcaatattcttcaatccttccacaatgtgcaacaaatggcgattgactggctcactcgaaatctctattttgtggaccatgtcggtgaccggatctttgtttgtaattccaacggttctgtatgtgtcaccctgattgatctggagcttcacaatcctaaagcaatagcagtagatccaatagcaggaaaacttttctttactgactacgggaatgtcgccaaagtggagagatgtgacatggatgggatgaaccgaacaaggataattgattcaaagacagagcagccagctgcactggcactagacctagtcaacaaattggtttactgggtagatctttacttggactatgtgggagtagtggactatcaaggaaaaaatagacacactgtcattcaaggcagacaagttagacatctttatggtataactgtgtttgaagattatttgtatgcaaccaattctgataactacaatatcgtaaggataaaccgatttaatgggactgatattcactcattaattaaaattgagaatgcttggggaatccgaatttatcaaaaaagaactcaaccaacagtcagaagccatgcatgtgaagtcgatccatatggaatgccagggggctgttcacacatctgtctactcagcagcagttacaaaactcggacttgtcgctgcaggactggcttcaacttgggaagtgatggcaggtcatgcaaaagaccaaagaatgagttgttcctcttttatgggaaaggacgcccaggaattgttagaggaatggacttgaataccaagatagctgatgaatacatgatccccatagaaaatctggtaaaccctcgtgctttagactttcacgcagaaaccaattacatctactttgctgacaccaccagtttcctaattggccggcagaagatagatggcacagagagagaaaccatcctgaaagatgatctggataatgtagagggcattgctgtggactggattggaaataatctttactggaccaatgatggccataggaaaaccattaatgtggccaggctggaaaaagcttctcagagtcggaagactcttttagagggtgaaatgtctcatcccagaggaattgtggtggatccagttaatggttggatgtattggacagactgggaggaagatgaaatagatgacagcgtgggaaggattgagaaggcctggatggatggattcaatcggcagatttttgtgacttcaaagatgctgtggccaaacggtttaactctggactttcacaccaacacattatactggtgtgatgcctattacgatcatattgaaaaagtatttttgaatgggactcacaggaagattgtttacagtgggagagagttgaaccaccctttcggactgtcgcatcatggaaattatgtgttctggactgattatatgaatggttccatttttcaactagatttgataacaagtgaggtgacattgctgaggcatgaaagaccacccctatttgggcttcagatttatgatccacgaaagcaacaaggtgacaatatgtgccgagtaaataatgggggctgtagtacactttgcttggctatcccaggaggccgggtgtgtgcttgtgccgataatcaacttttggatgaaaatgggacaacttgcacatttaatcctggagaagcactacctcacatatgtaaagctggagagtttcgctgcaaaaacagacactgtatccaagctcggtggaaatgtgatggcgacgatgactgcctagacggaagcgatgaggattcagtaaactgcttcaatcatagctgtcctgatgatcagtttaaatgccagaataatcgctgcatccccaagagatggctttgtgatggagctaatgactgtgggagcaatgaagatgaatccaatcaaacttgcacagccagaacatgccaggtagaccagttttcttgcggaaatgggcgttgcattcccagagcatggctgtgtgacagggaagacgactgtggtgaccagacagatgaaatggcatcttgtgaattcccaacttgtgagccactaacccaattcgtatgcaaaagtggaagatgcattagcagcaaatggcactgcgactctgatgacgactgtggggacgggagtgatgaggtgggctgtgttcactcttgctttgataatcagttcagatgttccagtggcagatgcatcccaggccactgggcctgtgatggtgacaatgactgtggggacttcagtgatgaagcccagatcaattgtactaaagaagagattcattctcctgctggttgtaacggaaatgaatttcagtgccaccctgatggtaattgcgttcctgatttgtggcgctgtgatggagaaaaagactgtgaagatggtagtgatgaaaaaggttgcaatggtaccatacgattgtgtgaccacaaaaccaagttttcctgttggagtacagggagatgcatcaacaaagcatgggtgtgtgatggagatattgattgcgaagatcagtcagatgaagatgactgtgacagtttcttgtgtggaccacccaagcatccttgtgctaatgacacctcagtctgcctgcagccagagaaactctgcaatgggaaaaaggattgtcctgatggctctgatgaaggctatctctgtgatgagtgttcgctgaacaatggaggctgtagcaaccactgttctgttgttcctggaagaggaattgtctgttcctgccctgaaggacttcaactcaacaaagacaataaaacatgtgaaattgtggattattgtagcaatcatctaaagtgcagccaagtatgtgagcagcacaagcacacagtcaagtgctcatgttatgaaggttggaagctggatgtagacggtgaaagttgtacaagtgttgatccttttgaagcattcatcatcttttctattcgtcatgagatcagaaggattgatcttcacaaaagagactatagtctacttgttcctggattgagaaacacaatagcacttgattttcacttcaatcaaagtttactttattggacagatgttgtagaagacagaatataccggggaaagctttctgaaagtggaggtgtcagtgccattgaagtggttgtggagcatggcctggctactccagaaggcctgacagtcgactggatagcaggaaacatatactggatagacagcaatctggaccaaatcgaagtggccaaactagatggctccctaagaactacactaatagcaggagccatggaacaccccagggccattgctttggacccaagatatggaattcttttctggacagactgggatgcaaattttcctcgcattgaatctgcctctatgagtggtgctgggagaaaaaccatctataaagacatgaaaactggggcttggcctaatggactaactgtggaccactttgagaaaaggatagtgtggacagacgccaggtcagatgctatttattcagccctctatgatggaacaaacatgatagaaatcatccgaggtcatgaatacctttcccatccctttgctgtgtctctatatgggagtgaagtctactggacagactggaggaccaacacattgtccaaagccaataagtggacagggcagaatgtcagtgtgattcagaaaaccagtgcacagccatttgaccttcagatataccatcccagtcgccagccacaggctcccaatccttgtgcagctaatgatggcaaaggcccctgctctcacatgtgtctaatcaatcacaataggagtgctgcctgtgcgtgcccccacttgatgaagctttcttcagacaagaagacctgctatgaaatgaaaaaatttcttctttatgcaagacgttctgaaatcagaggagtggatattgacaatccatactttaacttcatcacggcatttacagtccctgatattgatgacgttactgtgatagacttcgatgcatctgaggaacgtttatactggacagatattaaaacacaaaccattaaacgagcttttattaacggaactgggttagaaactgttatttcaagagatattcagagtatcagagggctagcagtggattgggtgtcacgtaatttatactggattagctcagaatttgatgaaacgcaaattaatgtggcaaggctagatggctctttgaaaacctcaattatccatggaatcgataagccacagtgtcttgcagctcacccagtcaggggaaaactctactggaccgatggaaacacaattaacatggcaaatatggatggcagtaatagcaagattctgtttcagaatcagaaggagccagttggtctatcgatagactatgtggaaaacaagctttattggatcagttcagggaatggaaccataaatagatgcaacctggatggtggtaatttagaagtaatcgagtcaatgaaagaagaattaacaaaagctacagccctaaccatcatggataagaaactgtggtgggcagaccaaaacttagcccagctaggaacctgcagcaaaagagacggaagaaaccccaccatcctacggaataagacttctggggtagttcatatgaaagtctatgataaagaagcacagcaaggcagcaattcctgccaactaaacaatggtggatgctctcaactttgtttaccaacatctgaaactacaaggacttgtatgtgtacagtgggatattatctccaaaagaaccgtatgtcatgtcaaggtatagaatcatttcttatgtactctgttcatgaaggaatcaggggaatacctcttgaaccaagtgacaaaatggatgctttgatgcctatatcaggaacttcatttgccgtgggaatagatttccatgcagaaaatgataccatctactggacagacatgggcttcaataaaattagcagagctaaaagagatcagacttggaaagaagatatcattaccaatggcttgggaagagtggaagggatagctgttgactggattgctggtaacatatattggacagatcatggtttcaacttaattgaagttgcaagactcaatggttctttccgttatgtaattatttcccaaggcctggatcaaccaagatctatagctgtgcacccagagaaaggcctcttgttctggactgaatggggacaaatgccctgtattggaaaggctcgcttggatggctcagagaaggttgtccttgtaagcatgggaatagcatggccgaatggcatctccatcgactatgaggaaaataaattgtactggtgtgatgctcgcacagacaagatagagagaatcgaccttgagactggagggaatcgcgagatggtgctgtcaggaagcaatgtggatatgttttcagttgcagtctttggggcttacatctactggtctgacagagcacatgcaaacgggtctgtcagaaggggccacaagaatgatgccacagaaacgataaccatgagaaccggccttggagtcaacctgaaggaggttaaaatatttaaccgagtaagagagaaagggaccaatgtttgtgccagggacaatggtggctgtaagcaactctgtctttatcgaggaaattcccggagaacttgtgcttgtgcccatggatatttggcagaagatggagttacttgcctgaggcatgaaggctatttactgtattcaggaagaacaatattaaaaagtatacatctttctgatgaaaccaatttaaattccccaataaggccatatgagaatccacgttatttcaagaatgtcatagccttggcttttgactataatcaaagaagaaaaggtaccaaccgaatcttttacagtgatgcacactttggaaatatacagcttattaaagacaactgggaagacagacaagtaattgttgaaaatgtgggttctgtggaaggacttgcctatcacagagcctgggatacactgtactggacaagctctaccacctcatccatcaccagacacactgtggaccagactcggcctggagcatttgacagggaagctgtcatcaccatgtcagaagatgaccatccacatgtgctagccttggatgaatgtcaaaatttaatgttttggaccaactggaatgaacaacatccaagtatcatgagatctactctgactgggaaaaatgctcaagtggtggtcagtacagacatactcactccaaatggacttactatcgactaccgtgcagagaagctgtatttctcagatggcagtctaggaaaaattgaaaggtgtgaatacgatggatcccagagacatgtgatagttaaatctgggccagggactttcctcagtttggctgtttatgacaattatatattctggtcggactggggaagaagagctatactgcggtccaacaagtacacaggaggagatacaaaaattcttcgttccgatattccacatcagccaatgggaatcatagctgttgccaatgacaccaatagctgtgaactttctccatgtgcattattgaatggaggctgccatgacttgtgccttttaactcccaatgggagagtgaattgttcctgcagaggggaccgaatattgctagaggacaacagatgtgtgactaaaaattcctcctgcaacgcttattcggagtttgaatgtggaaatggtgagtgcattgactaccagctcacctgtgatggcattcctcactgtaaagataaatcagatgaaaaactgctctactgtgaaaacagaagctgtcgaagaggcttcaagccatgctataatcgccgctgcattcctcatggcaagttatgtgatggagaaaatgactgcggagacaactctgatgaattagattgtaaagtttcaacctgtgccacggttgagttccgctgtgcagatgggacttgtattccaagatcagcacgatgcaaccagaacatagattgtgcagatgcttcagatgaaaagaactgcaataacacagactgcacacatttctataagcttggagtgaaaaccacagggttcataagatgtaattctacctcactgtgtgttctgccaacctggatatgcgacgggtctaatgactgtggagactattcagatgaattaaagtgcccagttcaaaacaaacacaaatgtgaagaaaattattttagttgtcctagtggaagatgcattttgaatacctggatatgcgatggtcagaaagattgtgaggatggacgtgatgaattccactgtgattcttcttgctcttggaaccaatttgcttgttccgcacaaaaatgtatttctaagcattggatttgtgatggagaagatgactgtggggatgggttagatgaaagtgacagcatttgtggtgccataacctgtgctgctgacatgttcagctgccagggctctcgtgcctgcgtgccccgacattggctttgtgatggtgaaagggactgtccagatggaagcgatgagctttccacagcaggctgcgctcccaataatacatgtgatgaaaatgctttcatgtgccataataaagtatgcattcccaagcaatttgtttgtgaccatgatgacgactgtggagatggctctgatgagtcaccgcagtgtggatatcgacagtgtggtacagaagaatttagttgtgctgatgggcggtgtcttctaaatactcaatggcagtgtgatggagactttgactgtcctgaccattctgatgaagcacctttaaacccaaagtgtaaaagtgcagaacagtcatgcaacagttcattttttatgtgcaaaaatggcaggtgcattcccagtggaggtctttgcgacaataaggatgactgtggcgatggttcagatgagagaaactgccatataaatgaatgtttgagtaagaaagtcagtggatgttctcaagactgtcaagaccttccggtcagttataagtgcaaatgctggcctggattccaactgaaggatgacggcaaaacatgtgtagacattgatgaatgctcttcaggctttccctgtagccagcaatgcatcaatacatacgggacttacaagtgcctctgtacagatgggtatgaaatacaacctgataacccaaatggctgcaaatcgctctcagatgaagaaccttttttaattcttgctgatcatcatgagataaggaaaattagcactgatggctccaactacacacttttaaaacagggattaaacaatgttattgctatagactttgattacagagaagaattcatctattggatcgattctagccgacccaatggcagtcgcataaatagaatgtgtttaaatggaagtgacattaaggtagttcataacacagcggtccccaatgcacttgctgtcgattggattggaaaaaacctctattggtctgacacagaaaaaagaatcattgaagtatccaaactcaatggcttgtaccctactatactcgttagcaaaaggctgaagtttcccagagacttgtctttagatcctcaagctggatatttgtattggattgactgctgcgagtatcctcatattggccgtgttggaatggatggaaccaatcagagtgttgtcatagaaaccaagatttctagacctatggcactaacaatagattatgttaatcgtagactctactgggccgatgaaaatcacattgaatttagcaacatggatggatctcatagacacaaagtccctaatcaagatattccaggggtgattgcactaacattgtttgaagactacatctactggactgatgggaaaaccaagtcactcagccgtgcccataaaacatcgggagcagacagactctcactgatttactcatggcatgccatcacagatatccaggtgtatcattcttatagacaacctgatgtctccaaacatctctgcatgataaataatggtggttgcagtcatttgtgccttttagcccctggaaaaacccacacttgtgcatgtcccactaacttctatctggcagctgataataggacttgcttatccaactgcacagccagccagtttcgttgcaaaactgacaaatgtattccattctggtggaaatgtgacaccgtggatgactgtggtgatggatctgatgaacctgatgactgtcctgaatttagatgtcagccaggccgatttcagtgtgggactggactctgtgctctaccagctttcatctgtgatggagagaatgattgtggagacaattctgatgaactcaactgtgacacacatgtctgcctgtcaggtcaattcaaatgtaccaagaaccagaaatgtatcccagtaaacttaagatgtaatgggcaagatgactgtggtgatgaggaagatgaaagagactgtcctgaaaacagctgttctccagactatttccagtgtaagactacgaagcattgcatttccaagctgtgggtttgtgacgaggatccagactgtgcagatgcatcagacgaggccaactgcgataaaaagacttgtggacctcatgaattccagtgtaaaaacaacaactgtattcccgatcactggcggtgtgatagccaaaatgactgcagtgataattcagatgaagaaaactgtaagccacagacatgtacattgaaagatttcctctgtgccaatggggactgtgtttcttcaaggttttggtgtgatggagattttgactgtgcagatggctctgatgagagaaattgtgagacaagttgttccaaagatcagttccggtgttccaatggtcagtgtataccagcaaaatggaaatgtgatggccatgaagactgcaaatatggggaagatgagaaaagctgtgagccagcttctcctacttgctcatcacgtgaatatatatgtgccagtgatggatgtatttcagcatctttgaaatgtaatggagaatatgattgtgctgatggttcagatgagatggactgtgtgactgaatgtaaggaagatcagtttcggtgcaaaaataaagcccactgtattccaattagatggctgtgtgatggaattcatgactgtgtggatggcagtgatgaagagaactgtgaaagaggaggaaatatatgtagagctgatgagttcctttgcaataattctctctgcaaactacatttctgggtgtgtgatggagaggacgactgtggagacaactctgatgaagcccctgatatgtgtgtcaaatttctttgtccatccacgagacctcacagatgcagaaataacagaatatgcctacagtcggagcaaatgtgcaatgggattgatgaatgcggtgacaattcagatgaagatcactgtggtggtaagctgacatataaagcaaggccttgtaaaaaggatgagtttgcttgtagtaataaaaaatgcatccctatggatctccagtgtgatcgacttgatgactgcggagatggttcagatgagcaaggatgcagaatagctcctactgaatatacctgtgaagataatgtgaatccatgtggagatgatgcatattgtaatcaaataaaaacatctgttttctgtcgctgtaagcctggatttcagagaaacatgaaaaacagacaatgtgaagaccttaatgaatgtttggtgtttggcacatgttcccatcaatgtataaatgtggaaggatcatataaatgtgtgtgtgaccagaattttcaagaaagaaataacacctgcatagcagaaggctctgaagatcaagttctctacattgctaatgacactgatatcctgggttttatatatccattcaactacagtggcgatcatcaacaaatttctcatattgaacataattcaagaataacagggatggatgtatattatcaaagagatatgattatttggagtactcagtttaatccaggcggaattttctacaaaaggatccatggcagagaaaaaaggcaagcaaacagtggcttgatttgtcctgaatttaaaaggcccagggacattgcagttgactgggtggctggaaacatttactggactgatcattctagaatgcattggttcagttactacactactcactggaccagtctgaggtactctatcaacgtagggcagctgaatggccccaactgcaccagactcttaacaaatatggctggagaaccctatgctattgcagtaaatcctaaaagagggatgatgtactggactgttgttggggatcattcccatatagaagaagcagccatggatggtacactgagaaggattttagtacaaaagaacttacagagacccacaggtttggctgtggattattttagtgaacgcatatattgggctgactttgagctctccatcattggcagtgttctgtatgatggctctaattcagtagtctctgtcagcagcaaacaaggtttattacatccacataggatcgatatctttgaagattatatatatggagcaggacctaaaaatggtgtatttcgagttcaaaaatttggccatggttcagtagagtacttagctttaaatattgataaaacaaaaggtgttttgatatctcatcgttataaacaactagatttacccaatccatgcttggatttagcatgcgaatttctttgcttgctaaatccttctggggccacttgtgtgtgtccagaaggaaaatatttgattaatggcacctgcaatgatgacagcctgttagatgattcatgtaagttaacttgtgaaaatggaggaagatgcattttaaatgagaaaggtgatttgaggtgtcactgttggcccagttattcaggagaaagatgtgaagtcaaccactgtagcaactactgccagaatggaggaacttgcgtaccatcagttctagggagacccacctgcagctgtgcactgggtttcactgggccaaactgtggtaagacagtctgtgaggatttttgtcaaaatggaggaacctgcattgtgactgctggaaaccagccttactgccactgccagccggaatacaccggagacagatgtcagtactacgtgtgccaccactattgtgtgaattctgaatcatgtaccattggggatgatggaagtgttgaatgtgtctgtccaacgcgctatgaaggaccaaaatgtgaggttgacaagtgtgtaaggtgccatggggggcactgcattataaataaagacagtgaagatatattttgcaactgcactaatggaaagattgcctctagctgtcagttatgtgatggctactgttacaatggtggcacatgccagctggaccccgagacaaatgtacctgtgtgtctatgctccaccaactggtcaggcacacagtgtgaaaggccagccccaaagagcagcaagtctgatcatatcagcacaagaagcattgccatcattgtgcctctcgtcctcttggtgactttgataaccaccttagtaattggtttagtgctttgtaaaagaaaaagaaggacaaaaacaattagaagacaacctattatcaatggaggaataaatgtagaaattggcaatccatcttataacatgtatgaggtagatcatgatcacaacgatggaggtcttttagatcctggctttatgatagacccaacaaaggccaggtacatagggggaggacccagtgctttcaagcttccacacacagcgccgcccatctacctaaactctgatttgaaaggaccactaactgctgggccaacaaattactccaatccggtatatgcaaaattatatatggatgggcaaaactgtcgaaactccttaggaagtgttgatgaaaggaaagaactgcttccaaagaaaatagaaattggtataagagagacagtggcataatcagtgatatcttttatatgctgtataaatgtataaaatataaggattacttttgtatgttccaacagtattatacttgttttggcatcagcattacctctttctttatctttttcctggttaattgttttctgagttttttgggttttattttttgctgatgactattgattgaccatttgtatggtatttttatgaaaaagaactgcactacagtacaatttacaacaatgctgctgatatgacacacctttgaatttgttaaaattaaaaacaacgtattcctttgtagtgtgaatatgagcaatctattttatatgaacttttttggttgtacttaatcaacgaggagaatctctgcacttttccattatacggtttgaaggctgtaatacagtgtcatattatttttctgtttaaattgatggaaaaatgattgaatggtcaactctcttctttgtgcccataaagatcgattcagactctgctgaaaatatatagctctcacaagttcagcatcacctgctttgaaattagccttagattgccaaccaatagatgagaattttgaggaaaaaaattaaaaatatgtaaaattaataatttgcatgaacacagatgactacattttccaaaacttagtggactctatgtgatgtactaaatgtatacaccttgtaagcaatagttatatttaggtggtagaacatagcaaaaatataaccgaaagttggccgactgcacttgctatggaataagaccttttattctccctcagtctcgagataaatagccagcctagagcacaacagggcattgggtacttgcatcttaggtatttcttcccagtcacatccattttgtggaagattaacccaaccccttacactacactgaacactaaagaataatatataagcacacaaattggtgacagaatttcaattacgtgaacgcatcctctttgctaggtcaaaaaacaaagggcaaagcagacattttagtatacagagtgattggcaaatattttcaagatttaatatgagcaacccattatttgccctatccaaaatatattcaagggccttccaagttgtagaagaacaatgatcttcccataatcaaaagtggagagtcgaaatgctgtgccagttgctctggtattcaggtttctctgggttttacagaacgcatggaccccattcacgtttggtttgtttatcttcaaatttgagttgaaacgagtgcgatttatttaagttgtatataaaaataaaaggatagcatttttatacaaatatctttaaaggcacaaaagatttattcacaagttttggagggctttttgttcctctgatagacatgactgacttttagctgtcataatgtattaacctaacagatgaaatatgttaaatatgtggttgctctttatccctttgtacaagcattaaaaaaactgctgttttataagaagactttttgttgtactatgtgcatgcatactacctatttctaaactttgccatattgaggcctttataaactattgatttatgtaatactagtgcaattttgcttgaacaatgttatgcatatcataaactttttcaggttcttgtttaagtacattttttaaattgaacagtatttttcattttggttataatatagtcattttgcctatgtttctacaatgaagtgttaaatactttataaaaaattgttgactgacttatttaaatgaaattctacatatttaa

SEQ ID NO: 199055 - DNA, 2621 bp, Artificial Sequence
  derived and/or modified sequence
gcattgaaaagtcaagacacacgggcgtctcgctcgcgctcacacacgctctgcctcctctctcccgcacgcgcgcatccctccaccttccacatcctgctccaggcaggagaaggctgactggctggactcattgagctgaagaatttccagtgacatttgtaaatgacgccgctcgattccaggctccaagcggcccctgccgccgccgccgccgccgggccgaaggtgccgccgagcagtctccagcgcaggcttccttaccgggcgaccacaatgtccgagtttctcctcgccttactcactctctcgggattattgccgattgccagggtgctgaccgtgggagccgaccgagatcagcagttgtgtgatcctggtgaatttctttgccacgatcacgtgacttgtgtctcccagagctggctgtgtgatggggaccctgactgccctgatgattcagacgagtctttagatacctccagaacatgccaggtagaccagttttcttgcggaaatgggcgttgcattcccagagcatggctgtgtgacagggaagacgactgtggtgaccagacagatgaaatggcatcttgtgaattcccaacttgtgagccactaacccaattcgtatgcaaaagtggaagatgcattagcagcaaatggcactgcgactctgatgacgactgtggggacgggagtgatgaggtgggctgtgttcactcttgctttgataatcagttcagatgttccagtggcagatgcatcccaggccactgggcctgtgatggtgacaatgactgtggggacttcagtgatgaagcccagatcaattgtactaaagaagagattcattctcctgctggttgtaacggaaatgaatttcagtgccaccctgatggtaattgcgttcctgatttgtggcgctgtgatggagaaaaagactgtgaagatggtagtgatgaaaaaggttgcaatggtaccatacgattgtgtgaccacaaaaccaagttttcctgttggagtacagggagatgcatcaacaaagcatgggtgtgtgatggagatattgattgcgaagatcagtcagatgaagatgactgtgacagtttcttgtgtggaccacccaagcatccttgtgctaatgacacctcagtctgcctgcagccagagaaactctgcaatgggaaaaaggattgtcctgatggctctgatgaaggctatctctgtgatgagtgttcgctgaacaatggaggctgtagcaaccactgttctgttgttcctggaagaggaattgtctgttcctgccctgaaggacttcaactcaacaaagacaataaaacatgtgaaattgtggattattgtagcaatcatctaaagtgcagccaagtatgtgagcagcacaagcacacagtcaagtgctcatgttatgaaggttggaagctggatgtagacggtgaaagttgtacaagtgttgatccttttgaagcattcatcatcttttctattcgtcatgagatcagaaggattgatcttcacaaaagagactatagtctacttgttcctggattgagaaacacaatagcacttgattttcacttcaatcaaagtttactttattggacagatgttgtagaagacagaatataccggggaaagctttctgaaagtggaggtgtcagtgccattgaagtggttgtggagcatggcctggctactccagaaggcctgacagtcgactggatagcaggaaacatatactggatagacagcaatctggaccaaatcgaagtggccaaactagatggctccctaagaactacactaatagcaggagccatggaacaccccagggccattgctttggacccaagatatggaattcttttctggacagactgggatgcaaattttcctcgcattgaatctgcctctatgagtggtgctgggagaaaaaccatctataaagacatgaaaactggggcttggcctaatggactaactgtggaccactttgagaaaaggatagtgtggacagacgccaggtcagatgctatttattcagccctctatgatggaacaaacatgatagaaatcatccgaggtcatgaatacctttcccatccctttgctgtgtctctatatgggagtgaagtctactggacagactggaggaccaacacattgtccaaagccaataagtggacagggcagaatgtcagtgtgattcagaaaaccagtgcacagccatttgaccttcagatataccatcccagtcgccagccacaggctcccaatccttgtgcagctaatgatggcaaaggcccctgctctcacatgtgtctaatcaatcacaataggagtgctgcctgtgcgtgcccccacttgatgaagctttcttcagacaagaagacctgctatgaaatgaaaaaatttcttctttatgcaagacgttctgaaatcagaggagtggatattgacaatccatactttaacttcatcacggcatttacagtccctgatattgatgacgttactgtgatagacttcgatgcatctgaggaacgtttatactggacagatattaaaacacaaaccattaaacgagcttttattaacgg

SEQ ID NO: 199056 - DNA, 15371 bp, Artificial Sequence
  derived and/or modified sequence
tttttacattcaggtcccgaggaggtagaaatcaagtgccccttgaatcacattgcttgccttggtaccaacaaatgtgttcatttatcccagctgtgcaatggtgtcttggactgcccagatgggtatgacgaaggagtacattgtcagggtgagtccatttgtcaacaactgaattgtacaatgtacaagtacaaatgtacaatggtcagaaatagtacaagatgttactgtgaggatggattcgaaataacagaagatgggagaagctgtaaagatcaagatgaatgtgctgtttatggtacatgcagccagacctgcagaaacacacatggatcctacacttgcagttgtgtggaaggctacctaatgcagccagacaacagatcttgcaaggctaaaattgaacctacagatagaccacctatactattaattgcaaattttgaaacaattgaggttttctatcttaatggaagtaaaatggcaactctaagctcagtcaatggaaatgaaattcatactctggattttatttataatgaagatatgatttgttggattgaatcaagagaatcttcaaatcaactcaaatgtatccagataacaaaagcaggaggattaacagatgaatggacaatcaatattcttcaatccttccacaatgtgcaacaaatggcgattgactggctcactcgaaatctctattttgtggaccatgtcggtgaccggatctttgtttgtaattccaacggttctgtatgtgtcaccctgattgatctggagcttcacaatcctaaagcaatagcagtagatccaatagcaggaaaacttttctttactgactacgggaatgtcgccaaagtggagagatgtgacatggatgggatgaaccgaacaaggataattgattcaaagacagagcagccagctgcactggcactagacctagtcaacaaattggtttactgggtagatctttacttggactatgtgggagtagtggactatcaaggaaaaaatagacacactgtcattcaaggcagacaagttagacatctttatggtataactgtgtttgaagattatttgtatgcaaccaattctgataactacaatatcgtaaggataaaccgatttaatgggactgatattcactcattaattaaaattgagaatgcttggggaatccgaatttatcaaaaaagaactcaaccaacagtcagaagccatgcatgtgaagtcgatccatatggaatgccagggggctgttcacacatctgtctactcagcagcagttacaaaactcggacttgtcgctgcaggactggcttcaacttgggaagtgatggcaggtcatgcaaaagaccaaagaatgagttgttcctcttttatgggaaaggacgcccaggaattgttagaggaatggacttgaataccaagatagctgatgaatacatgatccccatagaaaatctggtaaaccctcgtgctttagactttcacgcagaaaccaattacatctactttgctgacaccaccagtttcctaattggccggcagaagatagatggcacagagagagaaaccatcctgaaagatgatctggataatgtagagggcattgctgtggactggattggaaataatctttactggaccaatgatggccataggaaaaccattaatgtggccaggctggaaaaagcttctcagagtcggaagactcttttagagggtgaaatgtctcatcccagaggaattgtggtggatccagttaatggttggatgtattggacagactgggaggaagatgaaatagatgacagcgtgggaaggattgagaaggcctggatggatggattcaatcggcagatttttgtgacttcaaagatgctgtggccaaacggtttaactctggactttcacaccaacacattatactggtgtgatgcctattacgatcatattgaaaaagtatttttgaatgggactcacaggaagattgtttacagtgggagagagttgaaccaccctttcggactgtcgcatcatggaaattatgtgttctggactgattatatgaatggttccatttttcaactagatttgataacaagtgaggtgacattgctgaggcatgaaagaccacccctatttgggcttcagatttatgatccacgaaagcaacaaggtgacaatatgtgccgagtaaataatgggggctgtagtacactttgcttggctatcccaggaggccgggtgtgtgcttgtgccgataatcaacttttggatgaaaatgggacaacttgcacatttaatcctggagaagcactacctcacatatgtaaagctggagagtttcgctgcaaaaacagacactgtatccaagctcggtggaaatgtgatggcgacgatgactgcctagacggaagcgatgaggattcagtaaactgcttcaatcatagctgtcctgatgatcagtttaaatgccagaataatcgctgcatccccaagagatggctttgtgatggagctaatgactgtgggagcaatgaagatgaatccaatcaaacttgcacagccagaacatgccaggtagaccagttttcttgcggaaatgggcgttgcattcccagagcatggctgtgtgacagggaagacgactgtggtgaccagacagatgaaatggcatcttgtgaattcccaacttgtgagccactaacccaattcgtatgcaaaagtggaagatgcattagcagcaaatggcactgcgactctgatgacgactgtggggacgggagtgatgaggtgggctgtgttcactcttgctttgataatcagttcagatgttccagtggcagatgcatcccaggccactgggcctgtgatggtgacaatgactgtggggacttcagtgatgaagcccagatcaattgtactaaagaagagattcattctcctgctggttgtaacggaaatgaatttcagtgccaccctgatggtaattgcgttcctgatttgtggcgctgtgatggagaaaaagactgtgaagatggtagtgatgaaaaaggttgcaatggtaccatacgattgtgtgaccacaaaaccaagttttcctgttggagtacagggagatgcatcaacaaagcatgggtgtgtgatggagatattgattgcgaagatcagtcagatgaagatgactgtgacagtttcttgtgtggaccacccaagcatccttgtgctaatgacacctcagtctgcctgcagccagagaaactctgcaatgggaaaaaggattgtcctgatggctctgatgaaggctatctctgtgatgagtgttcgctgaacaatggaggctgtagcaaccactgttctgttgttcctggaagaggaattgtctgttcctgccctgaaggacttcaactcaacaaagacaataaaacatgtgaaattgtggattattgtagcaatcatctaaagtgcagccaagtatgtgagcagcacaagcacacagtcaagtgctcatgttatgaaggttggaagctggatgtagacggtgaaagttgtacaagtgttgatccttttgaagcattcatcatcttttctattcgtcatgagatcagaaggattgatcttcacaaaagagactatagtctacttgttcctggattgagaaacacaatagcacttgattttcacttcaatcaaagtttactttattggacagatgttgtagaagacagaatataccggggaaagctttctgaaagtggaggtgtcagtgccattgaagtggttgtggagcatggcctggctactccagaaggcctgacagtcgactggatagcaggaaacatatactggatagacagcaatctggaccaaatcgaagtggccaaactagatggctccctaagaactacactaatagcaggagccatggaacaccccagggccattgctttggacccaagatatggaattcttttctggacagactgggatgcaaattttcctcgcattgaatctgcctctatgagtggtgctgggagaaaaaccatctataaagacatgaaaactggggcttggcctaatggactaactgtggaccactttgagaaaaggatagtgtggacagacgccaggtcagatgctatttattcagccctctatgatggaacaaacatgatagaaatcatccgaggtcatgaatacctttcccatccctttgctgtgtctctatatgggagtgaagtctactggacagactggaggaccaacacattgtccaaagccaataagtggacagggcagaatgtcagtgtgattcagaaaaccagtgcacagccatttgaccttcagatataccatcccagtcgccagccacaggctcccaatccttgtgcagctaatgatggcaaaggcccctgctctcacatgtgtctaatcaatcacaataggagtgctgcctgtgcgtgcccccacttgatgaagctttcttcagacaagaagacctgctatgaaatgaaaaaatttcttctttatgcaagacgttctgaaatcagaggagtggatattgacaatccatactttaacttcatcacggcatttacagtccctgatattgatgacgttactgtgatagacttcgatgcatctgaggaacgtttatactggacagatattaaaacacaaaccattaaacgagcttttattaacggaactgggttagaaactgttatttcaagagatattcagagtatcagagggctagcagtggattgggtgtcacgtaatttatactggattagctcagaatttgatgaaacgcaaattaatgtggcaaggctagatggctctttgaaaacctcaattatccatggaatcgataagccacagtgtcttgcagctcacccagtcaggggaaaactctactggaccgatggaaacacaattaacatggcaaatatggatggcagtaatagcaagattctgtttcagaatcagaaggagccagttggtctatcgatagactatgtggaaaacaagctttattggatcagttcagggaatggaaccataaatagatgcaacctggatggtggtaatttagaagtaatcgagtcaatgaaagaagaattaacaaaagctacagccctaaccatcatggataagaaactgtggtgggcagaccaaaacttagcccagctaggaacctgcagcaaaagagacggaagaaaccccaccatcctacggaataagacttctggggtagttcatatgaaagtctatgataaagaagcacagcaaggcagcaattcctgccaactaaacaatggtggatgctctcaactttgtttaccaacatctgaaactacaaggacttgtatgtgtacagtgggatattatctccaaaagaaccgtatgtcatgtcaaggtatagaatcatttcttatgtactctgttcatgaaggaatcaggggaatacctcttgaaccaagtgacaaaatggatgctttgatgcctatatcaggaacttcatttgccgtgggaatagatttccatgcagaaaatgataccatctactggacagacatgggcttcaataaaattagcagagctaaaagagatcagacttggaaagaagatatcattaccaatggcttgggaagagtggaagggatagctgttgactggattgctggtaacatatattggacagatcatggtttcaacttaattgaagttgcaagactcaatggttctttccgttatgtaattatttcccaaggcctggatcaaccaagatctatagctgtgcacccagagaaaggcctcttgttctggactgaatggggacaaatgccctgtattggaaaggctcgcttggatggctcagagaaggttgtccttgtaagcatgggaatagcatggccgaatggcatctccatcgactatgaggaaaataaattgtactggtgtgatgctcgcacagacaagatagagagaatcgaccttgagactggagggaatcgcgagatggtgctgtcaggaagcaatgtggatatgttttcagttgcagtctttggggcttacatctactggtctgacagagcacatgcaaacgggtctgtcagaaggggccacaagaatgatgccacagaaacgataaccatgagaaccggccttggagtcaacctgaaggaggttaaaatatttaaccgagtaagagagaaagggaccaatgtttgtgccagggacaatggtggctgtaagcaactctgtctttatcgaggaaattcccggagaacttgtgcttgtgcccatggatatttggcagaagatggagttacttgcctgaggcatgaaggctatttactgtattcaggaagaacaatattaaaaagtatacatctttctgatgaaaccaatttaaattccccaataaggccatatgagaatccacgttatttcaagaatgtcatagccttggcttttgactataatcaaagaagaaaaggtaccaaccgaatcttttacagtgatgcacactttggaaatatacagcttattaaagacaactgggaagacagacaagtaattgttgaaaatgtgggttctgtggaaggacttgcctatcacagagcctgggatacactgtactggacaagctctaccacctcatccatcaccagacacactgtggaccagactcggcctggagcatttgacagggaagctgtcatcaccatgtcagaagatgaccatccacatgtgctagccttggatgaatgtcaaaatttaatgttttggaccaactggaatgaacaacatccaagtatcatgagatctactctgactgggaaaaatgctcaagtggtggtcagtacagacatactcactccaaatggacttactatcgactaccgtgcagagaagctgtatttctcagatggcagtctaggaaaaattgaaaggtgtgaatacgatggatcccagagacatgtgatagttaaatctgggccagggactttcctcagtttggctgtttatgacaattatatattctggtcggactggggaagaagagctatactgcggtccaacaagtacacaggaggagatacaaaaattcttcgttccgatattccacatcagccaatgggaatcatagctgttgccaatgacaccaatagctgtgaactttctccatgtgcattattgaatggaggctgccatgacttgtgccttttaactcccaatgggagagtgaattgttcctgcagaggggaccgaatattgctagaggacaacagatgtgtgactaaaaattcctcctgcaacgcttattcggagtttgaatgtggaaatggtgagtgcattgactaccagctcacctgtgatggcattcctcactgtaaagataaatcagatgaaaaactgctctactgtgaaaacagaagctgtcgaagaggcttcaagccatgctataatcgccgctgcattcctcatggcaagttatgtgatggagaaaatgactgcggagacaactctgatgaattagattgtaaagtttcaacctgtgccacggttgagttccgctgtgcagatgggacttgtattccaagatcagcacgatgcaaccagaacatagattgtgcagatgcttcagatgaaaagaactgcaataacacagactgcacacatttctataagcttggagtgaaaaccacagggttcataagatgtaattctacctcactgtgtgttctgccaacctggatatgcgacgggtctaatgactgtggagactattcagatgaattaaagtgcccagttcaaaacaaacacaaatgtgaagaaaattattttagttgtcctagtggaagatgcattttgaatacctggatatgcgatggtcagaaagattgtgaggatggacgtgatgaattccactgtgattcttcttgctcttggaaccaatttgcttgttccgcacaaaaatgtatttctaagcattggatttgtgatggagaagatgactgtggggatgggttagatgaaagtgacagcatttgtggtgccataacctgtgctgctgacatgttcagctgccagggctctcgtgcctgcgtgccccgacattggctttgtgatggtgaaagggactgtccagatggaagcgatgagctttccacagcaggctgcgctcccaataatacatgtgatgaaaatgctttcatgtgccataataaagtatgcattcccaagcaatttgtttgtgaccatgatgacgactgtggagatggctctgatgagtcaccgcagtgtggatatcgacagtgtggtacagaagaatttagttgtgctgatgggcggtgtcttctaaatactcaatggcagtgtgatggagactttgactgtcctgaccattctgatgaagcacctttaaacccaaagtgtaaaagtgcagaacagtcatgcaacagttcattttttatgtgcaaaaatggcaggtgcattcccagtggaggtctttgcgacaataaggatgactgtggcgatggttcagatgagagaaactgccatataaatgaatgtttgagtaagaaagtcagtggatgttctcaagactgtcaagaccttccggtcagttataagtgcaaatgctggcctggattccaactgaaggatgacggcaaaacatgtgtagacattgatgaatgctcttcaggctttccctgtagccagcaatgcatcaatacatacgggacttacaagtgcctctgtacagatgggtatgaaatacaacctgataacccaaatggctgcaaatcgctctcagatgaagaaccttttttaattcttgctgatcatcatgagataaggaaaattagcactgatggctccaactacacacttttaaaacagggattaaacaatgttattgctatagactttgattacagagaagaattcatctattggatcgattctagccgacccaatggcagtcgcataaatagaatgtgtttaaatggaagtgacattaaggtagttcataacacagcggtccccaatgcacttgctgtcgattggattggaaaaaacctctattggtctgacacagaaaaaagaatcattgaagtatccaaactcaatggcttgtaccctactatactcgttagcaaaaggctgaagtttcccagagacttgtctttagatcctcaagctggatatttgtattggattgactgctgcgagtatcctcatattggccgtgttggaatggatggaaccaatcagagtgttgtcatagaaaccaagatttctagacctatggcactaacaatagattatgttaatcgtagactctactgggccgatgaaaatcacattgaatttagcaacatggatggatctcatagacacaaagtccctaatcaagatattccaggggtgattgcactaacattgtttgaagactacatctactggactgatgggaaaaccaagtcactcagccgtgcccataaaacatcgggagcagacagactctcactgatttactcatggcatgccatcacagatatccaggtgtatcattcttatagacaacctgatgtctccaaacatctctgcatgataaataatggtggttgcagtcatttgtgccttttagcccctggaaaaacccacacttgtgcatgtcccactaacttctatctggcagctgataataggacttgcttatccaactgcacagccagccagtttcgttgcaaaactgacaaatgtattccattctggtggaaatgtgacaccgtggatgactgtggtgatggatctgatgaacctgatgactgtcctgaatttagatgtcagccaggccgatttcagtgtgggactggactctgtgctctaccagctttcatctgtgatggagagaatgattgtggagacaattctgatgaactcaactgtgacacacatgtctgcctgtcaggtcaattcaaatgtaccaagaaccagaaatgtatcccagtaaacttaagatgtaatgggcaagatgactgtggtgatgaggaagatgaaagagactgtcctgaaaacagctgttctccagactatttccagtgtaagactacgaagcattgcatttccaagctgtgggtttgtgacgaggatccagactgtgcagatgcatcagacgaggccaactgcgataaaaagacttgtggacctcatgaattccagtgtaaaaacaacaactgtattcccgatcactggcggtgtgatagccaaaatgactgcagtgataattcagatgaagaaaactgtaagccacagacatgtacattgaaagatttcctctgtgccaatggggactgtgtttcttcaaggttttggtgtgatggagattttgactgtgcagatggctctgatgagagaaattgtgagacaagttgttccaaagatcagttccggtgttccaatggtcagtgtataccagcaaaatggaaatgtgatggccatgaagactgcaaatatggggaagatgagaaaagctgtgagccagcttctcctacttgctcatcacgtgaatatatatgtgccagtgatggatgtatttcagcatctttgaaatgtaatggagaatatgattgtgctgatggttcagatgagatggactgtgtgactgaatgtaaggaagatcagtttcggtgcaaaaataaagcccactgtattccaattagatggctgtgtgatggaattcatgactgtgtggatggcagtgatgaagagaactgtgaaagaggaggaaatatatgtagagctgatgagttcctttgcaataattctctctgcaaactacatttctgggtgtgtgatggagaggacgactgtggagacaactctgatgaagcccctgatatgtgtgtcaaatttctttgtccatccacgagacctcacagatgcagaaataacagaatatgcctacagtcggagcaaatgtgcaatgggattgatgaatgcggtgacaattcagatgaagatcactgtggtggtaagctgacatataaagcaaggccttgtaaaaaggatgagtttgcttgtagtaataaaaaatgcatccctatggatctccagtgtgatcgacttgatgactgcggagatggttcagatgagcaaggatgcagaatagctcctactgaatatacctgtgaagataatgtgaatccatgtggagatgatgcatattgtaatcaaataaaaacatctgttttctgtcgctgtaagcctggatttcagagaaacatgaaaaacagacaatgtgaagaccttaatgaatgtttggtgtttggcacatgttcccatcaatgtataaatgtggaaggatcatataaatgtgtgtgtgaccagaattttcaagaaagaaataacacctgcatagcagaaggctctgaagatcaagttctctacattgctaatgacactgatatcctgggttttatatatccattcaactacagtggcgatcatcaacaaatttctcatattgaacataattcaagaataacagggatggatgtatattatcaaagagatatgattatttggagtactcagtttaatccaggcggaattttctacaaaaggatccatggcagagaaaaaaggcaagcaaacagtggcttgatttgtcctgaatttaaaaggcccagggacattgcagttgactgggtggctggaaacatttactggactgatcattctagaatgcattggttcagttactacactactcactggaccagtctgaggtactctatcaacgtagggcagctgaatggccccaactgcaccagactcttaacaaatatggctggagaaccctatgctattgcagtaaatcctaaaagagggatgatgtactggactgttgttggggatcattcccatatagaagaagcagccatggatggtacactgagaaggattttagtacaaaagaacttacagagacccacaggtttggctgtggattattttagtgaacgcatatattgggctgactttgagctctccatcattggcagtgttctgtatgatggctctaattcagtagtctctgtcagcagcaaacaaggtttattacatccacataggatcgatatctttgaagattatatatatggagcaggacctaaaaatggtgtatttcgagttcaaaaatttggccatggttcagtagagtacttagctttaaatattgataaaacaaaaggtgttttgatatctcatcgttataaacaactagatttacccaatccatgcttggatttagcatgcgaatttctttgcttgctaaatccttctggggccacttgtgtgtgtccagaaggaaaatatttgattaatggcacctgcaatgatgacagcctgttagatgattcatgtaagttaacttgtgaaaatggaggaagatgcattttaaatgagaaaggtgatttgaggtgtcactgttggcccagttattcaggagaaagatgtgaagtcaaccactgtagcaactactgccagaatggaggaacttgcgtaccatcagttctagggagacccacctgcagctgtgcactgggtttcactgggccaaactgtggtaagacagtctgtgaggatttttgtcaaaatggaggaacctgcattgtgactgctggaaaccagccttactgccactgccagccggaatacaccggagacagatgtcagtactacgtgtgccaccactattgtgtgaattctgaatcatgtaccattggggatgatggaagtgttgaatgtgtctgtccaacgcgctatgaaggaccaaaatgtgaggttgacaagtgtgtaaggtgccatggggggcactgcattataaataaagacagtgaagatatattttgcaactgcactaatggaaagattgcctctagctgtcagttatgtgatggctactgttacaatggtggcacatgccagctggaccccgagacaaatgtacctgtgtgtctatgctccaccaactggtcaggcacacagtgtgaaaggccagccccaaagagcagcaagtctgatcatatcagcacaagaagcattgccatcattgtgcctctcgtcctcttggtgactttgataaccaccttagtaattggtttagtgctttgtaaaagaaaaagaaggacaaaaacaattagaagacaacctattatcaatggaggaataaatgtagaaattggcaatccatcttataacatgtatgaggtagatcatgatcacaacgatggaggtcttttagatcctggctttatgatagacccaacaaaggccaggtacatagggggaggacccagtgctttcaagcttccacacacagcgccgcccatctacctaaactctgatttgaaaggaccactaactgctgggccaacaaattactccaatccggtatatgcaaaattatatatggatgggcaaaactgtcgaaactccttaggaagtgttgatgaaaggaaagaactgcttccaaagaaaatagaaattggtataagagagacagtggcataatcagtgatatcttttatatgctgtataaatgtataaaatataaggattacttttgtatgttccaacagtattatacttgttttggcatcagcattacctctttctttatctttttcctggttaattgttttctgagttttttgggttttattttttgctgatgactattgattgaccatttgtatggtatttttatgaaaaagaactgcactacagtacaatttacaacaatgctgctgatatgacacacctttgaatttgttaaaattaaaaacaacgtattcctttgtagtgtgaatatgagcaatctattttatatgaacttttttggttgtacttaatcaacgaggagaatctctgcacttttccattatacggtttgaaggctgtaatacagtgtcatattatttttctgtttaaattgatggaaaaatgattgaatggtcaactctcttctttgtgcccataaagatcgattcagactctgctgaaaatatatagctctcacaagttcagcatcacctgctttgaaattagccttagattgccaaccaatagatgagaattttgaggaaaaaaattaaaaatatgtaaaattaataatttgcatgaacacagatgactacattttccaaaacttagtggactctatgtgatgtactaaatgtatacaccttgtaagcaatagttatatttaggtggtagaacatagcaaaaatataaccgaaagttggccgactgcacttgctatggaataagaccttttattctccctcagtctcgagataaatagccagcctagagcacaacagggcattgggtacttgcatcttaggtatttcttcccagtcacatccattttgtggaagattaacccaaccccttacactacactgaacactaaagaataatatataagcacacaaattggtgacagaatttcaattacgtgaacgcatcctctttgctaggtcaaaaaacaaagggcaaagcagacattttagtatacagagtgattggcaaatattttcaagatttaatatgagcaacccattatttgccctatccaaaatatattcaagggccttccaagttgtagaagaacaatgatcttcccataatcaaaagtggagagtcgaaatgctgtgccagttgctctggtattcaggtttctctgggttttacagaacgcatggaccccattcacgtttggtttgtttatcttcaaatttgagttgaaacgagtgcgatttatttaagttgtatataaaaataaaaggatagcatttttatacaaatatctttaaaggcacaaaagatttattcacaagttttggagggctttttgttcctctgatagacatgactgacttttagctgtcataatgtattaacctaacagatgaaatatgttaaatatgtggttgctctttatccctttgtacaagcattaaaaaaactgctgttttataagaagactttttgttgtactatgtgcatgcatactacctatttctaaactttgccatattgaggcctttataaactattgatttatgtaatactagtgcaattttgcttgaacaatgttatgcatatcataaactttttcaggttcttgtttaagtacattttttaaattgaacagtatttttcattttggttataatatagtcattttgcctatgtttctacaatgaagtgttaaatactttataaaaaattgttgactgacttatttaaatgaaattctacat

SEQ ID NO: 199057 - DNA, 13800 bp, Artificial Sequence
  derived and/or modified sequence
atgagcgagttcctgctggccctgctgaccctgagcggcctgctgcccatcgcccgagtactgaccgtgggcgcagaccgtgaccagcagttatgcgacccaggagaattcctgtgccacgaccatgtcacctgcgtgtcgcaaagctggctgtgcgacggcgacccagattgtcccgatgattcagacgaaagcctcgatacttgccccgaggaagtggagatcaagtgcccactgaaccatattgcctgtttaggaacaaacaagtgcgtgcatctctctcagctgtgtaacggggtgcttgactgcccagacggatatgacgagggagtccactgtcaggaattgctgagcaactgccaacagctgaactgccaatataagtgcaccatggttcgcaactccacccggtgttactgcgaagatggctttgagattaccgaggatgggcggagctgcaaagaccaggacgaatgcgctgtctacggaacatgctcccagacttgccgaaacacgcacgggagctatacctgctcatgtgtggaggggtatttgatgcagccagacaacaggagttgcaaggcgaaaatagaacccactgatcgtcccccaatactgttgatcgcgaattttgagaccatcgaggtgttctacctcaatggctctaaaatggcgactctttcttctgtcaacggcaatgagatccacaccctggacttcatctataacgaggacatgatctgctggattgagtcaagggagtctagtaatcagctgaaatgtattcagatcacaaaggcaggaggcttaaccgatgagtggaccattaacatacttcagtcctttcacaacgtacagcagatggccatcgactggttgacacgaaacttgtatttcgtcgatcacgtgggggacagaatctttgtgtgtaatagcaacggcagcgtttgtgtgaccctgattgacttagagctgcacaatccaaaagccatagcagtggatcctatcgcgggcaaactgttttttactgattacggcaacgtcgcaaaagtggagagatgcgatatggacggaatgaaccggactcggatcatcgactccaaaacagaacagccagcggcactggctttggatttggtgaacaaactggtttattgggtggatttatacctcgattacgtgggagtggtggattaccagggcaagaatcggcacaccgttatccagggcagacaggtgcggcacctgtacgggatcacagtcttcgaagattacctctatgccactaacagcgacaactacaacatcgtgcggatcaaccgcttcaacggaacagacatccactccctgatcaaaattgagaacgcatggggtataaggatttatcagaaacgaacacaacccactgtgcgaagtcatgcttgcgaggtggatccgtacggtatgccaggaggttgcagccatatatgccttctctcatctagctataaaactaggacttgccggtgcaggaccggcttcaacctcgggtcagacggacgatcctgcaagcgcccaaagaacgagctcttcctcttctacggcaaaggccggccaggtatcgttcgtgggatggacctcaacaccaaaatcgctgatgagtacatgattccaatcgagaacctagtgaacccccgtgccctggatttccacgccgagacaaattacatctatttcgccgataccacatcattcctgatcggccggcaaaaaattgatggcaccgagagggaaacgatcctgaaggatgatctggacaacgtggaagggatcgctgtggattggatcggaaacaatctctattggactaatgacggccaccggaaaacaattaatgttgcgcggttggagaaggcttcccaatctagaaaaacccttctagagggggaaatgtctcacccccgagggattgtggtggatcccgtcaatggatggatgtactggacggattgggaggaggatgagatcgatgactccgtgggtcggatcgagaaggcctggatggatggctttaataggcagatcttcgttacttcaaagatgctgtggcctaacggactcactttggattttcacactaacactctgtattggtgtgatgcctactacgaccatatcgagaaggtgtttctcaatggtacgcataggaagatagtgtactctggccgggagctaaatcacccatttggcctgtcacatcatggcaattacgtgttctggactgactatatgaatggaagcattttccagcttgacctgatcaccagcgaggtgactctcctgagacacgagagaccccctctatttgggcttcagatctatgatccgagaaaacagcagggtgacaatatgtgtagagttaataatggggggtgcagcacgctgtgcctggctattcccggtgggcgcgtttgtgcttgcgccgataatcagttgctagatgagaacggtactacatgtactttcaatccgggagaggccttgccccatatatgtaaagcgggagagttccgatgcaaaaatcgccactgcattcaggcaagatggaagtgtgacggcgacgacgactgccttgacgggagcgacgaagactctgttaactgctttaaccacagctgtcccgacgaccagtttaaatgtcagaacaacaggtgcatccccaagcgttggctgtgcgatggcgcgaatgactgcggcagtaatgaggacgagtccaaccagacgtgcacagctagaacatgtcaagtggatcagttttcatgcggtaatggccgctgtatcccacgcgcttggctctgtgacagggaggacgattgtggggaccagactgatgagatggcctcttgtgagtttcctacctgcgagcctctaacacagtttgtgtgcaagagcggcagatgcatttcatcaaaatggcattgcgatagtgatgacgactgcggagacggttcagatgaggtggggtgcgttcacagctgttttgataaccagttccggtgctcatctggccgttgcattcccggacattgggcgtgcgacggggacaacgattgcggagattttagcgatgaggcacaaataaactgtacaaaagaagagatacacagcccagcaggttgcaacgggaacgagtttcagtgccatcccgacggaaactgtgtccccgacctgtggcgttgtgacggcgagaaagactgtgaggacgggagtgacgaaaagggctgcaatggcacgatcaggttatgtgatcacaagacgaagttctcttgctggtcaaccggccgttgcattaacaaggcatgggtgtgcgacggagacatcgactgtgaggaccagagcgacgaggacgactgtgattcgttcctttgtggccctccaaaacacccatgtgcgaacgacacctcagtctgtctccagcctgagaaactatgcaatggcaaaaaagattgcccggatggctcggacgaaggatacctgtgcgacgaatgttccttgaataacggcgggtgctctaaccattgctctgtcgttccaggaaggggaattgtgtgctcttgccccgaaggcttacaattgaacaaggataataaaacttgcgaaattgtcgattactgttccaatcatctcaaatgctcgcaggtgtgtgaacagcacaagcataccgtcaagtgttcgtgctatgaaggatggaaacttgatgtcgatggcgaatcctgcacgtctgtagaccctttcgaggcttttataattttcagcattaggcatgagatcaggcgaatcgacttgcataaacgcgattattcattgttggtcccaggccttcgtaatactattgccctcgacttccattttaaccaatctctcttgtactggactgacgttgttgaagatcggatctataggggaaaactgtctgagagcgggggagttagcgccatcgaagtggtggtagagcatggcctggccacccctgaaggtctcaccgtagactggattgccggtaacatctactggatcgattcaaacttagaccagatcgaggtggccaagctcgatggaagccttcggactaccctcatcgcaggagctatggagcacccacgggccattgccttggacccccgatatggcatcttgttctggactgactgggatgctaacttccctcgaatcgagagcgcctctatgagtggggctgggcggaaaactatttacaaagacatgaagacgggcgcttggcccaatgggctgacagtcgatcacttcgaaaagaggattgtttggacagacgccaggtccgacgccatctactcggccctgtacgatgggacaaatatgatcgaaattatcagaggtcacgagtaccttagccaccctttcgctgtgagcctgtatggcagtgaggtgtactggaccgactggaggacaaatactctctccaaggctaataagtggacaggccagaatgtttctgttatacagaaaacctcagcccagccttttgatctacagatttatcacccttcccgtcagccgcaggcccctaacccgtgcgcagctaatgacggcaagggtccctgctcacacatgtgcctgattaaccacaataggtccgcagcctgtgcttgtccacatctgatgaagctaagcagcgataagaaaacttgctatgaaatgaaaaaattcctgttgtacgcacgtcggagcgaaatccggggagtggacatagataacccatactttaatttcataaccgccttcacagttcctgacattgacgacgtcacagtgatagacttcgacgcctcagaggaaaggttgtactggaccgacatcaagacccagaccatcaaaagagcttttatcaacgggacaggccttgagacagtgatatccagggacatccagtcaataagaggcctggctgtggactgggtgagcaggaatttgtattggataagctcagaatttgatgagacgcagattaacgtcgcgcggcttgatggatctctgaagacatccatcatacacgggattgacaaaccccaatgtctggctgcacatcctgtgaggggaaaactctattggacagacggaaataccattaatatggcaaatatggatggaagtaattccaagatcctgtttcagaatcagaaggagcctgtcgggttgtccatcgactatgttgagaacaagctatactggattagcagcggaaacggcacaattaatcgctgtaatctcgatggaggcaaccttgaggtgatcgagagcatgaaggaagagctaacaaaggccacagctctgaccatcatggacaagaaactatggtgggctgaccagaatctggcacaactgggcacctgcagcaagcgcgacgggcggaaccctacgatccttaggaataagaccagcggagtagtgcatatgaaggtgtacgataaggaggcgcagcaaggatccaactcttgccaacttaacaatggaggctgttctcagctgtgcctgccaacctctgagactacaaggacttgcatgtgcacagtaggatattacctgcagaaaaacaggatgtcgtgtcaggggatagagagtttcttgatgtattcggttcacgagggaattcgtgggatcccactggagccttctgataagatggacgcattgatgccgatttcaggtacgtctttcgccgtcggaattgacttccatgccgagaatgacaccatctactggactgatatgggctttaacaagatctcccgcgcaaagagggatcagacctggaaggaagatatcatcactaatggcctgggaagggtagaaggcattgccgtggactggattgcgggcaacatctattggacggaccacggcttcaatctgatcgaggtcgctagattgaacggtagcttccgctatgtgattatctcccagggcctcgaccagccacgatcgatcgctgttcaccccgaaaagggtttgctgttctggaccgagtgggggcagatgccctgcattggcaaagctcgcctcgacggcagcgagaaagtcgttctggtcagcatgggcatagcatggcccaatggaatcagtatagattacgaggaaaataagctgtactggtgcgatgcccgcacagacaaaattgaacggatagatctcgaaacgggtggcaatcgggagatggtgcttagcgggagtaacgtcgacatgttttccgtcgccgtctttggcgcatacatctattggagcgacagagcacacgctaatggatccgtgagacggggccacaagaacgatgcaacggagactattacaatgcgcacaggactcggggttaatctgaaagaggttaaaatctttaatcgggtccgggagaaaggaacaaatgtttgtgcacgggacaatggcggctgtaagcaactctgcctttaccgcggcaactcacgaagaacctgtgcgtgtgcccatggctatctggcggaagatggagtgacttgcttgagacacgagggctacctgttatattcaggtaggactattctcaagtctattcacctttccgacgagacaaacctgaattctcccattcgcccatacgaaaatccccggtacttcaagaacgttatcgccctcgcgttcgattacaaccagaggcggaaaggcacgaacagaatcttttatagtgatgcccatttcggcaacattcagttgatcaaagataactgggaagacagacaggtgatcgtggagaacgtcgggagcgtggagggcctagcataccaccgtgcttgggacacgttgtactggacttcaagcactacctctagcatcaccaggcacacggtggatcagacacggcctggagcttttgaccgggaagccgtcatcacaatgagcgaagacgaccacccccacgtgctcgctttagatgaatgccagaatttaatgttttggaccaattggaacgagcagcacccatccataatgcgatctactctcactgggaaaaatgcccaggtggtagtctccacggacattctcacccctaatggcctgacaattgactacagggcggagaaattgtacttcagcgacggcagtctgggcaaaattgagcgctgcgagtacgacggttcgcagcgccacgtaattgttaagtctgggcctggaaccttcctgtcgctcgcggtgtatgacaactatatcttttggtcagattggggccgtagagctatactgcgatccaataagtacactggaggagacacaaaaatcctccggagtgatattccccatcagccgatgggcataattgctgtggccaatgacaccaacagctgcgagctctcaccttgtgcacttctaaacggagggtgtcacgacctgtgcttgctcactcctaatggccgcgtgaattgtagctgtagaggcgataggatcctcttggaggacaatagatgtgtcaccaaaaattcaagttgcaacgcatactccgaatttgaatgtggaaatggggagtgcatcgattaccagctaacctgtgacgggatccctcattgcaaggacaaaagtgacgagaagttgttgtactgtgagaatagatcttgccgacgcggctttaaaccttgctacaatcgacgatgtatccctcacgggaagctctgcgacggggagaatgactgtggagataattctgacgaactggattgcaaggtttccacatgcgctacagtggaattccgttgcgctgatggtacatgtatcccccgcagtgcccggtgtaaccagaacatcgactgcgccgacgcctctgatgaaaaaaactgtaataataccgattgcactcatttttacaaattgggggtaaaaacaaccgggtttatccgatgtaacagtacatccctgtgtgtgctgccgacatggatatgtgatgggtccaatgattgcggtgattattcagatgaacttaaatgtccagtacagaacaaacataaatgcgaggagaattatttctcctgtcctagtggtcgttgcatcctcaacacgtggatctgtgacggacagaaggattgcgaggatgggagggacgagttccactgcgattcaagttgctcttggaatcagttcgcttgttctgcccagaaatgcatcagtaaacattggatctgcgacggagaagatgattgcggtgacgggctggacgagagcgattcgatttgtggggctattacctgcgcagccgacatgttctcctgccagggctccagggcctgcgtacctcggcactggttatgcgacggtgaaagggactgtccagatggctcagacgaactcagcactgctggatgcgctcccaataatacatgcgacgaaaatgccttcatgtgtcacaataaggtctgtatccctaagcaatttgtgtgcgatcacgatgacgattgcggcgacggtagcgacgaaagccctcagtgtgggtaccgccagtgtggaaccgaggagttttcttgtgccgatggtagatgcttactgaacactcagtggcagtgcgatggagactttgactgccctgatcacagtgatgaagcacccctcaatcctaaatgcaaatcagccgagcagagctgtaacagctctttttttatgtgtaagaacggccggtgtatcccatctggaggcctgtgcgataacaaggacgactgtggagacggctcagacgagagaaattgccacatcaacgagtgtctgtcgaagaaagtctcgggatgttcgcaggactgtcaagatcttcccgtctcctacaagtgcaagtgctggccgggatttcaattaaaagatgacggtaagacttgtgtcgacattgatgagtgctcatccgggttcccttgcagccagcagtgcatcaatacttacggcacctacaaatgtctgtgcactgatggttatgagatacagccagacaaccccaacggctgcaaaagtttgtccgacgaagagccttttctgattctcgctgatcaccacgagattagaaaaatcagcacagatggatctaattacaccctgctgaagcaagggcttaacaacgtgatcgcgattgatttcgactatcgcgaggagttcatctattggattgactcctccaggccaaatggatccagaattaaccggatgtgtttgaacggatctgacatcaaagttgtgcataacactgccgtgcccaacgcgttggctgtggactggatcggtaagaacctgtattggtctgacaccgaaaagcggatcatcgaggtttctaagttaaacggcctgtacccaacgatcctggtgagcaagagactgaaattcccccgggatctttcgctcgatcctcaggccggctacttatattggatagattgctgcgagtaccctcacatcggcagagtggggatggacggcactaaccagtcagtcgttattgagacaaaaatatcccgccccatggcactgacaatcgactacgtgaaccggagattatattgggctgatgaaaaccatattgagttcagcaatatggatgggtcccatagacacaaagtcccaaaccaggatataccaggcgtgatcgcattgactctatttgaagactatatctactggacagacgggaagacaaaatcactgtcccgagcacacaagacctccggggccgatagactatccttgatttatagctggcacgcaatcactgatatccaggtatatcacagttaccggcaaccggatgtctccaagcatctgtgtatgattaataacggagggtgttcacacctgtgtctgctggcacccggcaagacacatacctgtgcttgcccaaccaacttctatctcgctgccgataatagaacatgtctttcaaactgtactgcatcccagtttagatgcaaaaccgacaagtgtatcccattctggtggaagtgcgataccgtcgatgactgcggcgatggatctgatgaacccgacgattgccccgagtttaggtgtcaacccggcagattccagtgtggaacaggcctctgtgcactgcctgcctttatttgcgacggggaaaatgactgtggcgacaacagtgatgaactcaactgcgacactcacgtctgtctgagtggccagttcaagtgcactaagaaccagaagtgcattccagtgaacttacgctgtaacggacaggatgattgcggcgatgaggaggatgagagagactgcccggaaaacagctgctcccctgattatttccagtgcaagactacgaaacattgcatttccaagctgtgggtatgtgacgaagacccagactgtgcggatgcaagcgacgaagccaactgtgacaaaaagacttgcggacctcatgaattccaatgtaaaaataacaattgcataccggatcattggagatgcgatagtcagaacgattgttctgacaattctgacgaggaaaattgtaaacctcagacttgcacactgaaggactttttgtgtgccaacggggactgcgtgagcagccggttctggtgtgacggagattttgactgtgccgacggcagtgatgaaaggaattgcgaaacctcctgtagtaaagaccagttccggtgtagtaatggacaatgcatacctgctaaatggaaatgtgatggtcatgaagactgtaagtatggagaagacgagaaatcctgtgaacccgcaagccctacctgttcgagcagagagtacatctgtgcaagcgatggatgtatttctgcctcgctcaaatgcaacggggaatacgactgcgcggatgggtccgatgaaatggattgcgtgaccgagtgtaaggaagatcagtttcgatgtaaaaataaagcacattgtatcccaatccggtggctctgtgacgggatccatgactgcgtagatggatccgacgaagagaactgcgagagagggggaaatatttgccgagcagacgaattcttatgtaataatagcctctgcaagttacacttctgggtgtgtgatggagaagacgactgtggagacaattctgacgaggcccctgacatgtgtgtgaagtttctttgcccttctactcggccccatagatgccggaacaaccgaatctgcttgcagtccgaacagatgtgcaatggcattgatgagtgcggggacaatagcgacgaagatcactgcgggggtaaactgacctacaaggccagaccttgcaaaaaagacgaatttgcctgttctaacaaaaagtgtattcccatggatctgcagtgtgatagattagacgattgtggtgacggatccgacgagcaaggatgcagaattgcccctactgagtacacttgtgaggataatgtgaacccatgcggagatgacgcttattgcaatcaaatcaagaccagcgtcttctgtcggtgcaaaccaggattccaacgcaatatgaagaatagacagtgtgaagaccttaacgagtgccttgtcttcggcacctgcagtcaccagtgtattaatgtggagggctcttacaaatgcgtgtgcgaccagaactttcaggaacggaataatacttgcatcgcagaagggtcagaggatcaggtcctctacatcgcgaacgataccgatatattgggcttcatctacccttttaattactctggcgatcaccagcaaatctctcacattgagcacaattctaggatcactgggatggacgtctattaccagagagacatgatcatttggagcacgcaatttaatccgggaggtatcttctacaaaaggatccacgggcgtgaaaagcgacaggccaactcaggactaatctgcccagagtttaagagaccccgggatatcgctgtcgattgggttgctggtaacatttattggaccgatcactcgaggatgcactggttctcttattatacaacccactggacctcgctgcgttattctatcaacgtgggccagctgaacggcccgaactgcactagactgctgaccaatatggcgggtgaaccatatgccattgccgtgaatcccaaaaggggtatgatgtactggactgtcgtaggcgaccactcgcacattgaagaggctgccatggacggtaccctgcgtaggatcctggtgcagaagaacctgcaaaggcctactggactcgccgtagattattttagtgaacgcatttactgggctgacttcgagctgtccatcatcgggtcagtgctgtatgatgggtccaattcagtggtttccgtaagttctaagcaaggcctgctgcacccccaccgaatagatatcttcgaagattatatctacggcgccggccctaagaacggcgtgttcagggtccaaaaatttggccacgggtccgtagagtatctcgccctgaatatcgacaagactaaaggagtcctgatttcccaccggtacaagcaattggacttgcctaatccttgccttgacctggcctgcgagttcctatgtttactgaatcctagcggcgcaacttgcgtatgccccgaaggtaaatatcttataaacggcacttgtaatgatgactcactgcttgatgattcttgtaaactgacatgcgagaacggtggcaggtgcattcttaacgaaaagggggacctgcgatgtcattgctggcctagttatagcggtgagcgctgcgaggttaaccattgttccaactactgtcagaacggtggtacctgcgtgcctagcgtgctgggccgccctacttgtagctgcgccctggggtttaccggacctaactgcggtaagactgtatgtgaggatttctgtcagaacgggggtacctgcatcgtgacagccggcaatcagccatattgtcattgtcagcctgaatatactggagatcgctgtcagtactacgtatgccatcactactgtgttaattccgaatcttgtaccattggtgacgacggttccgtggaatgcgtatgccctacacgctacgagggacctaaatgcgaggtcgataagtgtgtacggtgtcatggcggccattgtattatcaacaaggatagcgaagatatcttttgcaattgcactaacggcaagatcgcttctagttgtcagctctgcgacggttattgctacaatggaggcacttgccagctggacccagagacgaatgtccccgtctgcctttgtagtaccaactggagtggcacacagtgcgaaaggccagcgccgaagtctagtaaatctgaccatatcagcacccgaagtatcgccatcatcgtgcctctggtgctgcttgtgactctgatcacaactttagtgatagggctggttctgtgcaagagaaaacgacgtacaaaaactatcagaagacagcccattattaatggcggtataaatgtcgagatcgggaacccgagctacaacatgtatgaggtcgaccatgatcacaacgatggaggacttctggatcccgggtttatgattgaccctaccaaggcacggtatatcggcggggggccaagcgcctttaaactgcctcatacagctccgccgatctacctgaacagcgacctgaagggccccctaacagcaggtccgacaaactattccaatcctgtttacgctaagctctacatggacggccaaaactgtcgcaacagcctcggctctgttgatgagcgcaaggagctcctccccaagaaaatagagattggaatacgggagactgtcgcttag

SEQ ID NO: 199058 - DNA, 2349 bp, Artificial Sequence
  derived and/or modified sequence
atgagcgagttcctgctggccctgctgaccctgagcggcctgctgcctatcgcacgcgtcctaacagttggtgccgatcgggatcaacagctgtgtgacccgggagagtttctgtgccacgatcatgtgacgtgtgtgtcccagagctggctgtgcgatggtgacccagattgtccagatgacagcgacgagagtctggatactagtcggacgtgtcaggtagatcagttctcctgcggcaacggacgttgcatcccccgcgcttggttgtgtgatcgagaggacgactgcggggatcagacagacgaaatggccagttgtgaatttccaacctgcgagcccctgacgcaatttgtgtgcaagtccggccgctgtatctcttccaagtggcactgcgacagcgatgacgattgcggggatggcagcgatgaggtgggctgcgttcactcctgttttgataaccagttccgctgctcttccggacgctgcattccaggtcattgggcctgcgacggagataacgactgcggtgatttcagcgatgaagctcaaatcaattgcacaaaagaggaaattcatagcccagccgggtgtaacggaaatgaatttcagtgtcacccggatggcaattgcgtccccgacttatggagatgtgatggcgagaaggactgcgaggatgggagcgatgaaaaggggtgcaacggaaccatcaggctgtgtgaccacaagactaaatttagttgttggagcacagggagatgcattaataaggcctgggtgtgtgacggggacatcgattgcgaagaccaatcagatgaggatgattgtgattcctttctctgcggccctcctaagcacccctgtgcgaacgatacaagcgtctgtctccagccagagaagctttgtaacggaaaaaaagactgccccgatgggtcagatgaaggatacctgtgcgatgagtgtagcttgaacaatggtgggtgcagcaaccactgttccgtcgttccgggtcgcggcatagtctgttcctgtccagagggattgcagcttaataaggacaacaagacttgcgaaatagtggattactgcagcaaccatctgaagtgttcacaggtttgcgagcaacacaaacacacggtcaagtgtagttgttatgaaggatggaaactggacgtggatggcgaatcgtgtacaagcgtggatcccttcgaggctttcattatattctctatccgccacgagataagacgcattgacctccataaacgcgattactccttgctcgtacccggcctcagaaacaccatagcactagatttccatttcaatcagagcctgctctattggacagacgttgtagaggatcggatttaccgagggaagctgagtgaaagtggaggcgtttccgcgatcgaggtcgtcgtggaacacggcctcgctacccctgaaggcctgacagttgactggatcgccggcaatatctactggattgactcaaatctagatcagatcgaggtcgcaaaattagacggatccctgagaacaactttgatcgctggcgctatggagcacccgcgggcaattgcattggatccccggtatggtatcctcttctggactgattgggatgctaattttcctcgcatcgagtccgcctcaatgtccggagccggacgcaaaacaatctacaaagacatgaagaccggcgcctggccgaatggactaaccgtcgaccattttgagaaaaggattgtgtggaccgacgcaaggagcgatgctatctatagcgcgctgtatgatgggacaaatatgattgagattatccgcggtcacgagtatctctctcacccatttgcagtcagtctgtacggttctgaagtgtattggactgactggcgtaccaatactctgtccaaggcaaataaatggacagggcagaatgtaagcgtcatccagaagacgtctgctcagccgttcgatcttcagatttaccatcccagtcggcagccccaggccccaaatccatgtgcggcaaacgacggaaagggaccctgctcccatatgtgccttataaatcacaaccgcagtgccgcatgcgcttgtccccatctgatgaagctgagctctgacaagaagacttgttacgagatgaagaagtttctgctttatgcccggaggtccgagatacgcggcgtggatattgataatccctacttcaattttattacagcatttaccgttcccgatattgacgacgtaacagttattgattttgacgcaagcgaagagaggctgtattggactgatataaagactcagacgatcaagcgtgccttcattaatggctag

SEQ ID NO: 199059 - DNA, 13614 bp, Artificial Sequence
  derived and/or modified sequence
ttcctgcacagcggccccgaggaggtggagatcaagtgccccctgaaccatatcgcatgcctgggcaccaacaagtgcgtacatctcagccagctttgtaacggcgtgcttgactgtcccgatggatacgacgaaggtgtgcattgtcaaggagagtccatctgtcagcagctcaactgcactatgtataaatataaatgcacgatggtgagaaatagcaccaggtgctactgtgaagacggcttcgagatcactgaggacggacgaagctgtaaggatcaggacgagtgtgccgtctatggcacttgtagtcagacctgccggaatacgcacggaagttacacctgctcctgtgtagaaggctatctaatgcagccagataatagatcatgcaaagccaagattgagcctaccgaccggccccctatattgttgatagctaacttcgagactattgaagtgttttacctcaatggaagcaagatggccacactgagctctgtcaatgggaacgagatccacacccttgacttcatctacaatgaagacatgatttgctggatcgagtctagggagtccagtaaccaactaaaatgtattcaaattactaaggccggcggacttactgatgaatggacaattaacatcttgcagtcgtttcataatgtgcagcagatggctatcgactggctgactcggaacctgtattttgtcgaccatgtgggggatagaatctttgtatgcaacagcaacgggtccgtctgcgtcaccttaatcgatttagaactgcataatccaaaagctatcgccgttgaccctattgctggtaagctcttctttacagattatggaaacgtggcgaaagtcgaaaggtgtgacatggacgggatgaaccgcacaagaataatcgattctaaaaccgagcagccagccgccctcgcgcttgacctggtcaataagcttgtatactgggtggacttgtacttagactatgtgggcgtggtcgactatcaggggaagaatcgacacacggttattcaaggccggcaggtgaggcacctgtacggaataacagtcttcgaagactatctctacgcaactaattccgataactacaacattgtgcgcattaatcgttttaatggcaccgatatccacagtttgatcaaaattgagaatgcatggggaatcaggatttaccaaaagcggactcagcccactgtgagatcacatgcttgtgaagtcgacccctacggaatgccagggggctgcagtcacatttgcctgctatcctccagctataagacacggacctgtaggtgtcggactggctttaatctggggagtgatggcaggagctgtaaaaggccaaaaaacgaactgttcctgttttatgggaagggaaggccgggcatcgtacggggcatggatctcaatactaaaatcgccgacgagtacatgatcccaatcgagaatctagtaaaccctcgagccctcgattttcatgccgagacgaactatatttattttgcggataccacaagcttcttgattggaaggcagaagatagatggcacagagcgtgagacaatactcaaggacgacttagacaacgtggaggggatcgctgtggattggatcgggaacaacttatactggacgaacgacggacaccgtaagaccatcaacgtagcgcggctggaaaaagcaagccaaagtcggaaaactttgctggagggggaaatgagccaccctcgcggtattgtagtggacccagtcaacggatggatgtactggaccgactgggaagaagacgaaattgacgacagcgtgggccgcatagaaaaagcgtggatggatggtttcaatcgacagattttcgtcacctccaaaatgctctggccaaatggactgacactcgacttccacactaacactctctattggtgtgacgcatattatgatcacatcgagaaggtcttcctgaatggaacccatcgaaagatcgtctactcgggccgcgagctgaaccacccattcggattgtcacaccacggcaactatgtgttctggaccgattatatgaatggttctatcttccagcttgacctgattacttccgaggtgaccttgttgcgtcatgagaggccacccctctttggcttgcagatatatgacccccggaaacagcaaggcgacaacatgtgtcgtgtgaataacggcgggtgtagtacactctgcctcgccattccagggggccgtgtgtgtgcttgcgctgacaatcaactcctcgatgaaaatggaacaacatgcaccttcaaccccggggaggccttgccccacatctgtaaggctggggaattcaggtgtaaaaatagacactgcatccaggcgcggtggaagtgcgacggcgacgacgattgtctagatggatcagacgaggatagcgtgaattgttttaatcatagttgtcctgatgaccaattcaagtgccagaataacagatgtatccctaaacggtggctttgcgacggagccaacgactgtggaagtaatgaagacgagagtaatcagacatgcaccgccagaacctgtcaagttgaccagtttagctgcggaaatggccgctgcattccacgggcctggctatgcgatcgggaggacgactgcggtgaccaaactgatgaaatggccagctgcgagttccctacgtgtgaaccgcttacccaattcgtgtgcaagtccggacgctgcattagttccaaatggcattgcgactctgacgatgactgcggagacgggagcgacgaggtgggctgtgtccattcttgtttcgacaatcagtttagatgctctagcgggaggtgcattcccgggcactgggcttgtgatggcgacaacgactgtggagacttttctgacgaagctcagatcaattgtaccaaggaggagatccatagtcccgctgggtgcaacgggaatgaatttcagtgtcatccggatggaaactgtgtcccagacctgtggaggtgcgatggagagaaagactgcgaggatggcagtgacgaaaagggatgcaacggaacaatccgcctgtgcgatcataaaactaaattttcttgctggtcaaccggtagatgtattaacaaagcatgggtctgcgatggcgatatcgactgcgaagaccagagtgacgaagatgattgtgatagttttctatgtggaccacccaagcacccctgtgcaaatgacactagtgtgtgcctgcagccagagaaactgtgcaatggcaagaaagactgtcccgatggatctgatgagggctacctgtgcgatgaatgctccctgaacaatggcggatgttcaaatcattgctctgtcgtgcccggacgcggcatcgtgtgctcttgtccagaaggtctccagcttaataaagacaacaaaacgtgtgagatagtcgactattgctccaaccaccttaaatgtagccaggtatgtgagcaacacaaacatacagtaaaatgctcttgttatgagggctggaaattagatgtggacggcgaaagctgcacaagcgttgacccattcgaagcttttataatctttagcatcaggcacgagattcggagaatcgacctacataagcgggattacagcctgctggtacccggactccgtaatacaatcgcactggattttcattttaaccagtccctgctgtactggaccgatgtggtggaagacagaatctatcgcggaaagctgagcgaaagtggcggcgtgagcgctatcgaagtagtcgtcgagcacgggctggccacccccgaaggactgactgtggactggatcgcagggaacatctattggatcgacagcaatctcgatcagatcgaagttgccaagctcgatggctcactgcgaacaaccctgatcgccggtgccatggagcaccctagagccatcgcccttgatccaaggtacggcatcttgttttggacggattgggacgcaaacttccctcggattgagtccgcttccatgtccggcgccggtaggaaaaccatctacaaggatatgaaaaccggggcctggccaaacggtcttactgtggatcacttcgagaaacggattgtctggacagatgcacgaagtgatgccatctattctgccctgtacgatggtacaaatatgatcgagataattaggggtcatgagtatctgagccatcctttcgctgtttccctgtacgggtccgaagtttactggaccgactggagaacaaataccctatccaaggctaataagtggacaggacagaacgtgtcggtgatccaaaagacctccgcccagccctttgacctccaaatatatcatccatcacggcaacctcaggctccaaatccttgcgctgctaatgatggtaagggaccctgtagccacatgtgtctgattaaccacaatcgatctgcagcatgtgcatgtccccacctaatgaaactgtcttcagataaaaaaacttgctatgagatgaagaagttcttgttgtacgccagacgctccgagattcgcggcgtggacatcgacaacccttattttaatttcatcacagcttttaccgtgccagacatcgacgacgtcaccgttatcgatttcgacgcttcagaagagaggctgtactggaccgacatcaaaacacagacgataaagagggcctttatcaatggcactggactggaaaccgtcatatcccgcgacatccaatccattcgcggcctggccgtcgattgggtgagccgtaatctgtattggattagcagcgaattcgacgagacccagatcaatgtggcccgcctcgacggtagtctcaaaacatctatcattcacggaatcgacaaaccacagtgtctcgcagcccatcccgtgaggggcaaactttattggacagacggaaatacgatcaacatggctaatatggacggctcaaacagcaaaatcttgtttcagaaccaaaaagaaccggtgggactcagtatcgactacgtggagaacaagctgtactggatctcctccggaaacgggacaatcaacagatgcaatttagacggaggcaacttggaagtcatcgagagcatgaaggaagagttgacgaaagcgacagccctcactatcatggacaagaagctgtggtgggcggaccaaaacctggctcaactcgggacgtgctccaaacgggacggacggaatcctacaattcttcgcaacaagacctcaggcgtggtgcacatgaaagtctatgataaggaggcgcagcagggaagcaatagttgccaactcaataatggtgggtgtagccagctttgtctgcctactagtgagaccacacggacgtgcatgtgtaccgtaggctattatctgcagaagaaccgcatgagttgtcaaggtatcgagtcttttctcatgtacagtgtccacgagggcattcgtggcatcccactggagcccagcgacaaaatggatgccctcatgccaattagtggtacatcattcgctgtggggatcgattttcatgccgaaaacgacactatttattggaccgacatgggattcaacaagattagcagagccaaacgtgatcagacttggaaggaagatataataacaaatggtctcgggcgagtcgaaggcatcgctgtcgattggatagcgggaaacatatattggaccgaccatggtttcaacctgatcgaagttgcccgcttgaacggctcatttcggtacgtcatcatttcacaggggttggatcagccccggtccattgcggttcatcccgagaagggcctcctcttttggaccgaatggggtcagatgccgtgcatcgggaaggctcgcctggatgggtctgaaaaagtggtgctggtgtccatgggtatcgcatggcctaatgggatttctattgactatgaggaaaataaactctactggtgtgacgcccgaacggataaaatcgagcgcattgacctcgagacgggtgggaacagagaaatggtcctgagtggctccaatgtcgatatgttttcagttgccgtttttggggcatatatttattggagtgatagagctcacgctaacgggagtgtcagaaggggccataagaacgatgctacagaaactatcacgatgcgtactgggctgggagtgaatcttaaagaggtgaagattttcaaccgggtaagggaaaaaggaaccaacgtctgcgctcgagacaatggtggatgcaagcagttatgcttgtatcgaggcaatagtaggagaacctgtgcttgcgctcacggctacttggcagaagacggagtcacttgcctgcggcatgaaggatatctcctgtattctggcaggacaatcctgaagagcatacatctcagtgatgaaacaaaccttaattcccctattagaccctatgagaacccacgatatttcaaaaacgtgatcgctctggcttttgattataaccaacgtcgaaaaggcaccaaccggattttctacagtgatgcccactttggaaatatccaactgataaaagacaattgggaagataggcaggttatcgttgagaatgtcggatctgtagaaggactcgcttatcaccgagcctgggataccctgtattggacgagctccacaacaagctcgataactcgacatacagttgaccagaccagaccaggagctttcgacagggaggccgttattaccatgagcgaagacgatcatccacacgtattagccctcgatgagtgtcagaatttgatgttctggacaaattggaacgaacagcatcctagtatcatgaggtctacattaactggcaagaacgcccaggtcgtggtgtcgacagatatcctgacgcctaatgggcttacaatcgattatagagcggagaaactttactttagcgacggcagtctaggcaaaattgagagatgcgagtatgacgggagccagaggcatgtaatcgtaaaaagcgggcccggaaccttcctaagtctggctgtgtacgacaactacatcttctggtctgactggggacgccgtgccatacttcgctctaataaatataccggcggcgacactaagattctgcgctcagatatcccgcatcaacccatggggattattgccgtcgcgaatgacacgaattcctgcgagctttctccatgcgccctcttgaacggtggttgtcacgacttgtgtttactcactcccaatgggcgggtgaactgttcctgtaggggggacagaatactgctggaggacaacagatgtgtgactaagaactcttcatgtaatgcttattctgagttcgaatgtggcaatggggaatgcatagattaccagctgacctgcgacggcattccccactgtaaggacaagtctgacgagaaactgctctattgcgagaatcgaagctgccgcagaggcttcaaaccctgctataatcgacggtgcatacctcacgggaagctttgtgacggcgaaaacgactgcggcgacaactctgacgaactggactgtaaggtcagcacttgcgcgacggtggaattccgctgtgcagacggtacttgcatacccaggtccgcccgctgcaaccagaacatcgattgtgccgatgctagcgatgaaaagaattgtaacaatacggactgcactcatttttacaaattgggggtcaagacaacaggctttatcaggtgtaatagcacatcactgtgtgtgctaccgacctggatttgtgatgggagcaacgactgcggcgattactccgacgagttgaaatgcccagttcaaaataagcataaatgcgaggaaaattacttctcctgtccttccggaagatgcatcctaaacacgtggatctgtgatggacagaaagactgcgaagatggacgggacgagtttcactgcgatagtagttgctcctggaaccagtttgcctgctctgcacagaaatgcattagtaagcactggatatgtgatggcgaagatgactgcggggacggacttgacgaatcagatagcatctgtggggcaattacatgtgcggcggacatgttttcatgtcaagggtcgagggcttgcgtacctcgtcattggctatgtgacggggagcgcgactgccccgatgggtcggatgaactctcaactgccggttgtgccccgaacaacacctgcgatgagaatgccttcatgtgtcataacaaggtctgtataccaaaacaattcgtgtgtgaccacgatgacgactgtggcgatggatccgatgagagccctcaatgcggctaccgacagtgcggtaccgaagaattcagttgcgctgatgggcgctgcctactgaatacgcaatggcagtgcgacggcgattttgactgtccagatcacagtgacgaggcccctctcaatccaaaatgcaaaagcgccgagcagtcctgcaatagcagcttttttatgtgtaaaaatggtaggtgtatcccatccggtggtctgtgtgataacaaagatgattgtggtgacggctctgacgaaagaaattgccacattaatgagtgtttgtccaaaaaggtttcaggatgtagccaagactgccaggacctccccgtgagttataagtgcaagtgttggccgggatttcagctgaaagatgacggaaagacgtgtgtggacattgacgaatgctccagcgggtttccctgtagccaacagtgcataaacacctacgggacttacaaatgcttatgcaccgatggctatgagatacagcccgacaacccaaacggttgtaagtctttatcggatgaggaaccctttttaattttggcagaccaccacgaaatccggaaaatctcaaccgacggctctaactatactcttctcaaacagggcctaaacaatgtcatagccatagattttgactaccgcgaagaattcatctactggattgattcctcccggccgaatgggagtaggattaaccggatgtgcctgaatggatcggacataaaagttgttcataacacagccgtccccaacgccctcgccgtggactggatcggcaaaaatctctattggtcagacaccgagaaaaggataattgaagtgtccaaactgaacggcctttatccaactatcttggtgtcaaagagactgaagtttcccagggacctctcacttgacccccaggctggatatttgtattggatcgattgttgtgaatatccccatatcggccgggtggggatggatggcactaaccagtccgtggtgatcgagacaaaaatttcacggcccatggccctgacaattgactacgtgaacagaagactatactgggcagacgaaaaccacattgaattttcgaatatggacggtagtcaccgccacaaagttccgaaccaagatattcctggagtaatcgccctaacactgtttgaggactacatatactggactgacggtaaaactaaatccctcagtcgtgcccacaaaaccagcggcgcggacagattgtccctcatttattcttggcacgccatcactgatatccaggtgtaccactcgtatagacaacccgatgtgtctaagcacctttgtatgattaacaacggcgggtgcagccatctgtgtctgctggcgcccgggaaaacccacacttgcgcttgccctaccaacttttatctggccgcagacaatcggacgtgcttatctaattgcacagcctcccagtttagatgcaaaactgacaagtgcatccccttctggtggaagtgcgatacagtcgatgattgcggcgacggatcagacgagccagatgactgcccggagtttcgctgccagcccggaaggtttcagtgtgggaccggtctatgcgcactgccggcatttatctgcgacggggaaaacgactgcggcgacaattctgacgagctgaattgtgacacacatgtgtgcctgtccggacagtttaaatgtactaaaaatcaaaaatgtatacccgtaaacctacgatgcaatggacaggacgactgcggggatgaggaagatgaacgggactgcccagaaaattcctgttctcccgactattttcaatgtaaaaccactaagcattgtattagcaaactgtgggtgtgtgacgaagatccagattgcgccgatgcttcagacgaggctaattgtgataagaaaacatgtggcccgcatgagttccagtgcaagaataataattgcatccctgatcactggcgctgcgattctcagaatgattgttcagacaacagtgacgaggagaattgcaagccgcagacctgtactctgaaagacttcctgtgcgctaatggcgactgtgtgtcttctcgcttttggtgcgacggggatttcgattgcgccgatggctccgacgaacgcaactgtgagacatcctgcagtaaggatcagttcaggtgctcgaacggccaatgcatccctgcgaaatggaagtgtgacggccatgaagactgcaaatatggcgaggatgagaagtcctgtgaacccgcctcacccacctgtagtagcagggagtacatctgtgcctctgacggttgtatttcggccagcctcaagtgtaatggtgaatatgactgcgccgatggctccgatgagatggactgtgtcaccgagtgtaaagaggaccagttcagatgtaaaaacaaggcccattgtattcctatccgctggctgtgtgatggaattcatgactgcgtcgacgggtcggatgaggagaattgcgaaagaggcggcaacatctgtagagccgacgagttcctgtgcaacaactcactctgtaaactgcacttctgggtgtgtgatggcgaggacgattgcggggataactctgacgaggccccagatatgtgcgttaagttcctgtgcccttcaacacgaccccaccggtgtaggaacaatcgaatatgcctacagagcgagcagatgtgcaatggaattgacgagtgtggggataatagtgatgaggatcattgcggtggaaagcttacttacaaggcccggccttgtaagaaggatgaattcgcttgtagtaacaagaagtgtatcccaatggatctgcagtgcgaccgtcttgacgattgtggagacggctccgatgaacagggctgcaggattgctccaaccgagtacacctgcgaagataatgtgaatccgtgtggcgacgatgcttactgcaatcaaatcaagactagtgtgttctgcaggtgtaagccggggttccagaggaacatgaagaatagacagtgtgaggatctgaatgagtgtctggtgtttgggacctgtagccaccagtgtatcaacgtcgaagggagttacaaatgtgtgtgcgaccagaactttcaagaaagaaacaacacttgcatagctgagggcagcgaggaccaggttctgtacatagccaacgacaccgacatcttgggcttcatttacccattcaactatagcggggatcaccaacaaatttcccatatagagcacaacagccggattaccgggatggatgtctactatcaaagagatatgatcatttggagtacgcagtttaaccccggaggaatcttttacaaaagaatccatgggcgcgaaaagcggcaggctaatagcggactgatctgccctgaattcaagaggcctcgagacatcgcagtcgattgggttgctggaaatatctattggacagatcatagtcgtatgcactggttctcctactacacgacacactggacctcattgagatactctataaatgtcgggcaacttaacggcccaaattgcactcgattgctgacaaatatggctggtgaaccctacgcaatcgcagtaaaccccaagagaggaatgatgtactggactgtagttggagatcactctcacattgaggaagccgccatggatggaacgcttcgcagaattctggtccagaaaaatttacagagacctacagggttggccgttgactatttcagcgagcggatctattgggcggacttcgagctatcgatcattggtagcgttctgtatgatggatcaaattcagttgtgagtgtttccagtaagcagggcctgctgcacccacaccgcatagacatctttgaggattacatttatggcgctgggccaaagaacggggttttcagagtgcagaagttcggccacggaagcgtggagtatttagctctgaacatagataagacaaaaggtgtgctgatatcccacagatacaagcaactggacttgcctaatccctgcttggacctggcctgcgagttcctctgcctgctgaaccccagcggagccacttgtgtctgtcccgagggcaaatatctcataaacggcacatgtaatgatgatagtctgctggacgactcatgcaaacttacatgcgaaaatggcggccgttgtatattgaatgaaaaaggcgatcttaggtgccactgctggccaagttacagcggggaacgctgtgaagttaatcattgtagcaattattgtcagaacggcgggacatgcgtgccttcagtccttggacgacctacgtgtagctgcgctctggggttcacaggaccaaactgtggcaagacagtttgcgaagatttctgccaaaatgggggtacctgtattgtgactgcaggcaaccagccatattgccactgccagcctgaatataccggagacaggtgtcagtactacgtatgccatcattattgcgtgaattctgagtcgtgcaccataggcgatgacggctctgtggaatgtgtgtgtcccactcgatatgaaggtcccaaatgtgaggtggataagtgcgtcagatgccatggggggcactgcattatcaacaaggattcagaggacattttttgtaattgtaccaacggaaaaatcgcttctagttgccaactatgcgatggctactgctacaatggaggaacttgtcaattagatcctgaaactaatgtaccggtctgcctctgttccacgaactggtccggcacccaatgtgagcggcctgcaccgaagtcgtccaaatctgaccacatctctacgagatccatcgccatcattgttcccttggtgttgctggtcaccctcatcacaaccctggtgattggtctggtcctgtgcaagagaaaacgaagaacgaagactatccggaggcagccgattattaatggggggatcaatgttgagatcggaaatccaagttataatatgtatgaggtagaccacgaccacaatgacggcggacttttggatcccggtttcatgattgatccaaccaaggcacgttacattgggggaggtccctccgctttcaaactcccccacaccgcaccaccaatctatctgaactctgacctgaaggggcctttgaccgccggaccaacgaattatagcaaccctgtgtatgctaagctgtatatggatggacaaaactgcagaaactctctcggatcggtcgatgagcgaaaagaactgctgccaaagaaaattgaaattggaatccgtgagaccgtcgcttag

SEQ ID NO: 199060 - DNA, 13800 bp, Artificial Sequence
  derived and/or modified sequence
atgtcggagtttctgctggcgctcctgactctgtcgggcctgttacctattgcaagggtgctgacggtgggcgctgaccgcgatcagcagctttgcgaccccggagagttcctgtgtcatgatcacgtcacctgtgttagccagagctggttgtgcgacggagaccccgattgtcctgacgactctgacgagtccctggacacatgtccagaggaggtggagattaagtgcccgctgaaccatattgcatgccttggaaccaataagtgcgttcacctgagccagctctgcaacggggtcttggattgcccagacgggtacgacgaaggggttcattgccaagagttgttatctaactgccaacagttgaactgccagtataagtgcaccatggtgcgcaattcaacacgctgttattgcgaagacggattcgagataactgaagatggcaggagttgtaaggaccaggacgagtgtgcagtgtacggcacctgtagccagacttgccgaaatactcacggttcgtatacatgttcctgcgtagaaggatacctaatgcagcccgacaatcggtcatgcaaggccaaaattgaaccgactgaccgacccccaatcctgctgatcgcaaattttgagaccatcgaagtattctatttgaatgggagtaaaatggccacgctcagctcagtgaacgggaatgagattcatactttggacttcatctacaatgaggatatgatctgttggatagaatcccgagagtcctccaaccagctgaagtgcatccagattaccaaagccggtgggctgacagacgagtggaccatcaacatcctgcagtccttccacaacgtgcaacaaatggccattgactggttgacccggaatctctactttgtggaccatgtgggggacagaatatttgtatgtaattccaacggctcagtatgcgtgaccctcatagatctggaactgcacaatccaaaggcaattgccgtggacccaattgctggcaagctgttcttcaccgattatggcaatgtagctaaggtcgagcgctgcgacatggatgggatgaatcggactcgaatcattgacagcaaaacggaacagccagccgctctcgctctcgacctagtgaataaacttgtttattgggtggatctgtacctcgattatgtgggcgtggtggattatcaggggaagaatcgccatactgtgatccagggccgacaggtgaggcacctctacggcatcactgtctttgaagattatctgtatgctactaattctgacaactacaacatagttaggatcaatagattcaacggaacggacatacatagcttgatcaaaattgaaaatgcctggggcattcgaatttaccagaaacgaacccagccaaccgttagatctcacgcctgtgaggtcgatccctatggaatgcctgggggttgctctcatatctgccttctgtcgtcttcttacaaaacccggacatgtcggtgccggactggattcaacctgggcagcgatggcagatcatgtaagcggccaaaaaatgaacttttcctcttttacgggaaaggacgcccaggcattgtcaggggaatggacctgaatactaagatcgcagacgagtatatgatacctattgaaaatctggttaaccctcgggctttggacttccacgccgagactaattatatctatttcgccgatactactagctttctgatcggtaggcagaagatcgacgggactgaaagagagacgattttaaaagacgacttagataatgtagagggaatcgctgttgactggatcgggaataatctgtattggactaacgacggacaccggaagaccatcaatgtggccagattagaaaaagccagccaatctaggaaaacgctgctggagggagagatgagccaccccagaggcatcgtggtggaccctgttaatggttggatgtattggacagattgggaggaggacgagattgacgattccgttggcagaatagagaaagcttggatggacggctttaatcggcaaatctttgtcacttctaagatgctgtggccaaacgggctgaccttagactttcacacaaacacactatattggtgcgacgcctactacgaccacatcgagaaagtgttcctcaatggaacgcatcggaaaattgtttacagcggacgtgagctcaatcacccttttggacttagccatcatggaaattacgtcttttggaccgattatatgaatggatctatatttcagttggacctgattacttccgaggtgaccttacttagacatgaacggccaccattatttggcctgcaaatttatgacccaaggaaacagcagggagataatatgtgccgcgtgaacaacgggggttgcagtaccctttgcctcgccattcctggaggcagggtctgcgcttgtgcagacaatcaattgttagacgagaatggaacgacctgcacgttcaaccctggtgaggccctgccccatatctgcaaggccggtgagtttaggtgcaagaatcgccattgtatccaggccagatggaaatgcgatggggacgatgactgtttagacggcagtgacgaagactcagttaattgctttaatcacagctgtcccgacgatcagttcaagtgtcaaaacaacaggtgtatcccgaagcggtggctctgtgatggggcaaatgactgcggttccaatgaggacgagagcaaccaaacctgtaccgcacgcacctgccaggtcgatcagttctcctgcggaaatggccgatgtatcccccgagcatggctgtgcgacagagaggatgactgtggggatcagacagacgaaatggccagctgtgagttcccaacctgtgaacctctgactcaattcgtgtgcaagtccgggagatgtatctcttcaaagtggcactgtgacagcgacgacgattgcggggacggatccgatgaagtcggttgtgtgcacagttgcttcgataaccagtttagatgctcgtccggcagatgtatccccggacactgggcctgcgacggagacaacgattgcggcgacttcagtgatgaagcccaaattaattgtactaaagaggaaatccactctcccgctggctgtaacggtaatgagttccagtgtcaccccgacggcaattgcgtcccagatctctggcgatgcgacggagagaaagactgcgaggatggtagtgacgagaaagggtgtaatggcactatccgcctctgcgaccataagacaaaattctcttgttggagcactggcaggtgtatcaacaaagcttgggtctgtgatggcgacatcgattgtgaggatcaaagcgacgaagacgactgcgattcctttctctgtggacccccaaaacacccatgcgccaacgataccagcgtatgtcttcagcctgaaaaactctgtaatgggaagaaggattgccccgacggatctgacgaagggtacctgtgcgatgaatgttccctgaacaacggcggatgctctaatcactgtagtgtcgttcctggccgaggtatcgtttgtagctgtcccgagggtctgcagctgaacaaagacaataagacttgtgagatcgtggactattgttcgaaccacctaaagtgcagccaagtgtgcgagcagcacaaacacaccgtgaagtgctcttgttacgaagggtggaaattggatgtcgacggtgagagttgcacatcagtggaccctttcgaggccttcattatcttctctattaggcacgaaattcgcagaatcgacttacacaagcgcgattatagtctcctagtaccagggctgaggaacactatcgctcttgactttcattttaatcaatccttactttactggaccgatgtggtagaggacaggatttataggggaaaactgtctgagagtggtggcgtcagcgccattgaagtggtggtggaacacggcctagcaacgcctgaggggttgactgtggattggattgctgggaacatctactggattgacagtaatctggaccagatcgaggtggccaagctggacggctccctccggaccaccttaatcgcgggagcaatggagcaccctagggctatagcattggacccacgctatggcattcttttctggaccgactgggacgccaatttcccacgaattgagagtgctagcatgagtggggctgggagaaagacaatatacaaggacatgaaaacaggggcttggcccaatgggctgaccgtcgatcactttgaaaagcgcatcgtttggactgacgcccgatccgacgctatttacagcgccttatacgacggcactaatatgatcgaaattatccggggacacgagtacctgagccacccctttgctgtgtcactgtacggctcagaggtttactggaccgattggcgcacaaacacattaagcaaagctaacaagtggacgggacaaaatgtgagtgtaattcagaaaacctctgcccagccattcgatctacagatctaccacccctctcgccagccacaggctcctaacccgtgtgctgctaatgacggtaaggggccttgtagccatatgtgcttaatcaatcataacagatcagcggcttgcgcatgcccccacctgatgaagttgtccagtgataaaaagacctgttacgagatgaagaaattcttgctgtacgcaaggcggtctgagataaggggtgtggacattgacaacccatacttcaattttatcactgccttcactgtgcccgacattgacgacgttacggtgatagacttcgatgcatctgaggaacggctgtattggactgacatcaagacccagacaattaagagagccttcattaacggtacaggtctagagaccgtaattagccgcgacatccagtcaataaggggactggcagtggattgggtgtcgcgcaatctgtattggatcagtagtgagtttgatgagacccaaattaacgtcgccaggcttgatggctcattaaagactagtatcattcacggaattgacaaacctcagtgcctcgcagctcatccagtgagggggaagctgtactggacagatggaaacactattaacatggcgaatatggatgggagcaactctaaaatcctattccaaaaccagaaagaaccagtcggcctgtctattgactatgtcgaaaacaaactctattggatctctagtgggaatggaaccattaaccggtgtaatttggatggagggaatctggaggtcatcgaatcgatgaaagaagaactcacgaaagctacagcactgacaatcatggacaagaagctttggtgggctgaccagaatctagcgcaattgggaacatgcagcaagcgtgatggacgcaacccaacaattctgcggaataagacatctggagttgtgcatatgaaagtgtacgataaggaggctcagcaggggtccaattcctgtcaacttaacaatggaggatgttcccagctttgccttcccacttcagaaaccacccggacttgcatgtgtaccgtgggatactacctgcagaaaaataggatgtcctgccagggaattgagtccttcctgatgtattccgtacatgagggcatccggggtatacccctcgagccaagcgacaagatggacgccctcatgcccattagcggtacaagctttgcagtgggtatcgacttccacgctgaaaacgatactatctattggaccgacatgggcttcaacaaaattagtagagcaaagcgggatcagacctggaaagaagacatcatcactaacggcctcggacgggtcgaaggcatagccgtggattggatagctgggaatatctactggactgaccacgggttcaatcttatcgaggttgccaggttgaatggctcttttagatatgttataattagccagggactcgaccagcctcggtcaatagctgtgcaccctgagaaaggcttactgttctggacagaatggggtcagatgccctgcattggtaaagcgcgtttagacgggtcagagaaggttgtcctggtgtctatggggattgcgtggcctaacggcatctccatcgattacgaggagaacaagctctactggtgtgacgctcgaacagataagatcgaacggatcgatctggaaactgggggaaacagggaaatggtgctgtcaggctctaacgtcgacatgtttagcgtagcagtctttggtgcatacatatactggtcagaccgggcacacgcaaacggtagtgttcgcaggggccacaaaaatgacgctacggaaacaataactatgaggaccgggctgggcgtgaatctcaaggaagtcaaaatctttaaccgggtgcgggaaaagggaactaatgtgtgtgcgagagacaacggcggatgtaagcagttatgcctgtaccggggtaacagccgtcgtacatgcgcatgcgcacacggttatctagccgaggatggcgtaacgtgtttacgccatgagggctacctcctatattcgggacgaaccatattgaaatccatccatctgtccgacgagactaatctcaattctccaattagaccatatgagaaccctcggtatttcaaaaatgtgatagccctggcatttgattataatcaacgcagaaaaggaacaaaccggatcttttatagcgatgctcactttggcaacatacagctcattaaggacaattgggaggaccgccaagttatagtcgaaaacgtgggcagcgttgaaggccttgcctaccatcgggcatgggataccctgtactggacatcctccactactagcagtatcacccggcataccgtggaccagacccgtcccggtgcgttcgatcgcgaggccgtcatcacgatgtcagaagacgaccatcctcatgtgttggcgctagatgagtgccaaaatctgatgttttggaccaattggaacgaacagcacccgagtatcatgcgctcgaccctgaccgggaagaacgctcaggttgttgtctccaccgatattctgaccccaaatggcctgactatcgactatagagccgaaaaattgtacttttcagatgggtctcttggaaagatagagaggtgcgagtacgatggctcccaacggcacgtcattgtaaaatccgggccaggaacttttctctcactggccgtatatgacaactatattttctggtcagactggggaagaagagcaatactgagatccaataaatataccggcggtgatactaagattctaagatctgacattcctcaccaacccatgggtattattgctgtcgccaacgatactaacagttgcgagttatccccctgcgccctgctgaacggcggatgtcacgatctctgcttgctaacacctaatggaagagtgaactgctcttgcaggggagaccgaatccttctcgaggataatagatgcgtgacaaagaatagcagttgtaatgcgtactctgagtttgagtgcggtaatggggagtgtatcgactatcagctcacctgcgacgggatccctcattgtaaagataagagcgatgaaaagcttttatactgcgagaatcgctcttgtcgcaggggcttcaagccatgttacaaccggagatgcattccccacggtaagctgtgcgatggagagaacgattgtggggacaatagcgacgagctggattgtaaggtttcaacctgtgcaaccgtggaattcaggtgtgccgatgggacctgtattcctaggagtgcacgttgtaatcagaacatcgactgcgcggatgctagtgacgagaaaaattgcaataacaccgactgcacacacttttacaaactcggtgtaaaaaccaccggctttatacgatgcaatagtacaagcctgtgtgtccttccgacctggatatgcgacggttcaaatgactgtggcgattactcagatgagttaaagtgtccagtgcagaataagcacaagtgtgaagagaactacttctcttgtccatcaggacgctgcatcctcaatacttggatttgtgatgggcaaaaggattgtgaagatggacgcgacgaattccactgtgacagtagctgtagctggaatcagtttgcttgcagtgctcagaaatgcatcagtaagcactggatttgcgacggagaagacgattgcggcgatggcttagacgaatcagacagcatttgtggggctataacatgtgctgcggatatgttctcttgtcaagggtccagggcttgcgtgccgaggcactggctatgtgacggcgaacgtgactgtcccgacggctctgatgagctctccacagcaggatgcgctcctaataatacttgcgacgagaacgcgttcatgtgccacaataaggtctgcataccaaaacagtttgtgtgcgatcatgatgacgattgtggagacggctcagatgagtctccacagtgcgggtatagacagtgcggaacagaggaatttagttgtgccgacggcagatgtctgttgaacactcagtggcagtgtgatggagattttgattgtcccgaccacagcgatgaagcacctctgaatccaaagtgcaagtccgccgagcagtcctgtaactcaagtttctttatgtgtaaaaacggcagatgcattccctccggtgggctgtgcgacaataaggacgattgcggcgacgggagcgacgaacgcaattgccatattaacgagtgcctgtcaaaaaaggtcagcggctgttcccaggattgtcaggatctacccgtgtcatataaatgtaagtgctggccaggttttcagttgaaggacgatggtaagacttgcgtggatatcgacgaatgctcgtcaggatttccttgttcccaacagtgtataaacacatatgggacctataaatgcctttgcacggatggctacgaaatccagccggataaccctaacgggtgcaagtccttatccgatgaggagccttttctgatactcgcagatcatcacgaaattcggaagatatctactgatgggtccaactacaccctgctgaaacaggggctgaacaatgtcatagctatcgacttcgattaccgggaggagtttatatactggattgactcatcccgtcctaacggaagcaggattaacagaatgtgccttaacggatcggacattaaggttgtgcataacaccgcagtccccaatgctctggcagtggactggatcggcaagaatctctattggtctgacacagagaaaagaataatcgaagtatctaaactaaacggattgtatcccacgatactggtcagtaagcgcctgaaattcccacgagatttatccctggacccacaggctgggtatctgtactggatcgactgttgcgaatatccacacatcggtcgggtgggcatggatggaactaaccaatcagtcgtgattgagacgaaaatcagtcgacccatggctcttaccatagactatgtgaatagacgcctctactgggcagacgagaaccatattgagtttagcaacatggatgggtcccatcgccacaaagtgccgaatcaagatattccgggagtaattgccctcacattgtttgaggattacatatactggacggacggaaagacgaaatccctctcaagggcacacaagactagcggcgctgataggctgagcctcatctattcgtggcacgcaataacagatattcaagtgtaccattcttaccgacagcctgatgtttcaaagcacctgtgtatgattaacaatggaggatgttctcacctctgcctgctcgccccaggaaagacgcacacctgtgcttgccctaccaacttttacctggccgctgacaataggacctgtctcagcaattgtacagcgtcccagtttcgctgtaagacagacaaatgcataccattctggtggaaatgcgatactgttgatgactgtggagatgggtctgacgagcccgacgactgtcctgagttccgctgccagcccggacggttccagtgtggcacaggcctgtgtgctctcccagccttcatctgcgacggagagaatgattgcggggataactccgatgagctcaattgcgatactcacgtttgtttgtcgggacagtttaaatgtaccaagaatcagaaatgcattccagttaacctcagatgtaatggacaggatgactgtggtgatgaggaggatgagagggattgccccgaaaatagttgtagccctgactactttcagtgtaaaactacaaaacactgtatatctaaactgtgggtctgcgacgaggaccctgactgcgcagatgcctccgacgaggcaaactgtgacaagaagacatgtggtcctcatgagttccaatgtaagaacaacaattgtatccccgaccactggcgctgcgactctcagaatgactgcagcgacaactcggacgaggagaactgcaagccccagacatgtacactcaaggattttctctgtgcaaatggtgactgtgttagttcacgtttctggtgcgacggcgatttcgactgcgcagatgggtcagatgaaagaaactgcgaaactagttgcagcaaggatcagtttcggtgctcaaacggtcagtgtatcccagctaagtggaagtgcgatggacacgaggactgtaaatatggcgaggatgagaagtcctgcgagcctgccagccccacttgtagctcgagggagtatatatgcgcatccgacgggtgcatttcagccagcctgaagtgtaatggggaatatgactgcgctgatgggtccgacgaaatggactgtgtaacagaatgtaaagaagatcagtttagatgcaagaacaaagctcactgcatacctattaggtggctgtgtgacgggatccatgactgtgtggacggaagtgacgaagagaattgcgaacgtggaggcaatatttgccgtgcagatgaatttctgtgcaacaactcactgtgcaagctgcatttctgggtttgtgacggtgaggacgattgcggtgacaactccgacgaggctccagacatgtgtgttaagtttctatgtccgtccacccgcccacatcgatgccgcaacaacaggatttgtctccagtctgaacagatgtgcaacggcattgatgagtgtggcgataattctgatgaagatcactgcggtgggaaactgacgtataaggcgcgaccttgtaaaaaggatgaatttgcttgcagtaataaaaagtgtatcccaatggacttgcagtgtgaccggcttgatgattgcggcgatggctcagatgaacaggggtgtcgtattgccccaactgagtacacttgcgaggataacgtgaacccatgtggcgacgatgcatattgcaatcaaattaaaacaagcgtgttctgcagatgtaagccgggatttcaaagaaacatgaagaaccgccagtgtgaggacttaaatgaatgcctggtgttcggcacctgcagtcaccagtgcatcaacgtcgaggggtcctacaagtgcgtctgcgatcagaactttcaagagcgcaataacacgtgcatagctgagggcagtgaggatcaggtactgtatatagccaatgacacagacatcctgggtttcatttatccctttaattattctggcgaccaccagcaaatttctcacattgagcataattcaaggattactggcatggacgtttactaccagagggatatgatcatatggagtacacagtttaatccaggcggaatattctacaagcgtatacatgggagagagaagaggcaggccaactccggattgatctgccctgagttcaagcgccctcgtgacattgccgtcgactgggtggcgggaaatatatactggactgatcactctcgtatgcactggttttcatattataccacacactggacttctctgcggtattccatcaacgtggggcagctcaacggtcccaattgcactcggctgctgactaacatggcaggcgagccatacgcgatcgctgtgaatcctaagcggggaatgatgtattggaccgtggtaggcgaccactcacacatcgaggaggcagccatggatggcacactgaggcgtatactcgtacaaaagaacctgcagaggcccaccgggcttgccgtcgactacttctccgaacgcatttactgggccgatttcgagctgtcgattatcgggtcggtgctctatgacgggtcaaatagtgtggtatctgtaagttccaaacaggggttattgcatccgcatcggatagacatattcgaagactacatctacggtgccggaccaaagaatggcgtgttccgcgtgcagaaattcggccatggatcagtagagtatctggcactgaacatagacaaaaccaagggggtgctcatctcccaccggtacaagcagctggacctgcctaacccttgcctggacctcgcgtgcgaatttttgtgtttgttgaatccgtctggggctacctgcgtttgtccggagggaaagtacctgatcaacgggacttgcaatgatgactcgctgcttgacgactcctgtaaactgacatgtgagaatggaggcagatgcattttgaatgagaaaggtgacttgaggtgccactgttggccttcctactctggagagcggtgtgaggtcaatcactgcagcaattactgccagaacggagggacttgcgttccctcggttctcggaagacctacttgttcctgtgcattagggttcaccggtccaaactgtggaaaaacagtttgtgaggatttttgtcagaatggtggaacttgcattgttactgcagggaatcagccatattgccattgccagccagagtacacaggggaccgttgtcagtattacgtctgccatcactactgtgtgaattcagagtcctgcaccataggagacgatgggagtgtcgaatgtgtgtgcccgacgagatatgagggtcctaagtgcgaggtcgataaatgcgtgcgctgtcatgggggacattgtattatcaacaaggactctgaagacatcttctgtaattgcaccaacggcaagattgcgagcagctgtcaactttgcgatggctactgttataacggtggtacctgccagctggatcctgagacgaacgtgcctgtgtgcctctgcagcacaaattggtcagggactcagtgtgagcgcccagccccaaaaagctccaagagtgaccatatctccacccgcagtattgccatcatagttccgctggtgctgctggtcaccctgatcacaactcttgtaattggcctagtgttgtgtaagcggaagcgaagaacgaagacaattaggagacagccgatcatcaacggaggcattaatgtggagatcggaaatcctagctataatatgtatgaagtggatcacgaccacaatgacgggggtctgctggacccgggttttatgatcgaccccaccaaggcgagatacatcggaggagggcctagtgcctttaaactgcctcacaccgcaccccctatatacctcaactctgaccttaaaggccctctcaccgcaggtcccaccaattattcgaatccagtgtatgcgaaactctacatggacggtcagaactgtagaaatagcctcgggagtgtggatgagcgaaaggaactgctgccgaaaaaaatcgaaatcggaatacgggagacggtagcctaa

SEQ ID NO: 199061 - DNA, 2349 bp, Artificial Sequence
  derived and/or modified sequence
atgagcgagtttctgctggccctcttgaccctttcaggtttattgcctatcgctcgagtgttgacagtgggcgctgacagagaccagcagctttgcgaccccggagaatttctgtgtcatgaccatgtgacctgtgtcagccagtcctggctgtgcgacggcgatccggattgccccgatgattccgacgagtctcttgacacctcacgcacatgccaggtggaccagttctcctgtggcaacggtagatgtatcccgagagcttggctgtgcgaccgggaggacgactgtggagatcagacagacgagatggcaagttgcgagttcccaacctgcgagccgctgacccagttcgtttgcaagtcaggcagatgcatttccagcaagtggcactgtgactccgacgacgattgcggcgatggatccgacgaggtgggttgcgtgcatagttgctttgataaccagttccgttgttcaagcggtcgatgcattcccggacattgggcgtgtgatggggataacgattgtggcgatttctcagatgaggcgcagattaattgcacgaaggaagagatccacagcccagctggttgcaacggcaacgaatttcaatgccatcctgacggaaactgtgttccggatctctggaggtgcgatggagagaaagactgcgaggatggaagcgacgagaagggctgcaatggtacaattcggttgtgcgaccacaaaaccaagtttagctgctggtcaaccggaaggtgtataaataaagcctgggtgtgcgacggcgacattgactgcgaggatcaatccgacgaagatgattgtgatagcttcctgtgcgggcctcccaagcacccatgcgcaaatgatacttctgtctgcctgcagcctgaaaaactgtgcaacggcaagaaggactgcccagatgggtcagacgaagggtatctgtgcgacgagtgttccttaaacaacggcggatgctctaaccattgcagcgtagtgcctggtcgagggatcgtctgtagttgccccgaaggactgcaactgaacaaagataataaaacctgtgaaatagtagattactgcagcaatcatcttaagtgttctcaagtttgtgagcaacacaagcacaccgtgaagtgttcctgttatgaagggtggaagttagatgtggacggagagagctgtacttcagtggaccccttcgaagccttcataatctttagtattaggcacgaaatacgcaggatcgatctgcacaagcgcgactactctctcctggttcctggtttgcgaaacaccatagcactcgactttcactttaatcagagcttgctttactggaccgacgtggtggaggacaggatatatcggggaaaattaagcgaatcggggggtgtttccgcgatagaagtggtggtggagcatggactcgccacccctgaaggactgactgttgattggattgccggaaacatctactggattgattcgaatctcgaccagattgaggtggccaagttggatggctctctacgaactaccttgatagccggagctatggagcaccccagggctatcgccctggaccctagatacggaattctgttctggacggattgggatgctaattttcctaggattgaatctgcctcgatgtcaggagccggacgtaaaactatatacaaggacatgaaaacgggcgcatggccaaatggtctgactgtggaccatttcgagaaacggattgtctggactgatgctcggtcagacgccatttatagcgctctgtacgatggaactaatatgatcgaaattataaggggccatgagtatctgtcccacccatttgccgtgtcactctatggctcggaggtgtattggacagattggcggaccaatacactgtctaaagccaataaatggactggacagaacgtgtctgtgatacagaagaccagtgcacagcctttcgatctccagatatatcacccatctaggcagccccaggcccctaatccttgtgcagctaatgacggaaagggaccctgtagccacatgtgcctgattaatcataataggagtgccgcttgtgcctgtccccacctgatgaaactgagtagcgacaaaaagacatgctatgagatgaaaaaatttctcctctacgctagacggagtgagatacggggtgttgacatcgataacccgtatttcaatttcattaccgcatttactgtacccgacatcgacgatgttacagtgattgatttcgatgcctccgaggaaaggttatattggaccgatattaagacgcagacgatcaagcgggcatttatcaacgggtag

SEQ ID NO: 199062 - DNA, 13614 bp, Artificial Sequence
  derived and/or modified sequence
tttttacatagcggccctgaagaggtggagattaagtgccccctgaaccacatagcatgcctaggcacaaacaaatgcgttcacttaagtcagctctgtaacggggttttggactgccccgatggctacgatgaaggggtacattgtcagggtgaaagtatatgccagcaactgaactgcacaatgtataagtataaatgcactatggtacgcaatagcaccagatgctactgcgaggacggatttgagatcaccgaagatggaaggtcttgtaaggaccaggacgaatgcgcggtctacggaacctgtagtcagacctgccggaacactcatggatcctacacatgcagctgtgttgaaggctatcttatgcaaccagataacaggagctgcaaagccaagatagaacctactgaccggcctcctatattgctcattgcaaattttgagactatcgaagtgttttacctgaacggatcaaagatggcgaccctttctagcgtgaacggtaatgagattcacacgctcgattttatttataacgaggacatgatctgctggatcgaatctagggagtcaagtaaccagctgaagtgtattcaaatcacaaaagctggaggattgacggatgaatggactatcaatatattgcagtccttccataatgtacagcagatggccatcgattggctcacccgtaacctgtactttgtggatcacgtcggtgaccggatatttgtctgcaacagtaatgggtctgtttgcgtgacgctcatagacctggaattacataatcctaaagccatcgccgttgaccccatcgctggtaaactgttctttacagattatggaaacgttgccaaagttgagagatgtgatatggacggtatgaatcgtacacggatcatcgatagcaagacagaacagcctgccgcattggccctagacttggtaaataagctggtctattgggtcgatttatacttggattacgtcggggtcgtggattaccagggcaagaataggcacaccgtcattcagggacgccaggtgagacacctgtacggcattactgtgtttgaggactacctgtacgccactaatagtgacaactataatatcgtgaggatcaatcggttcaacgggaccgacatacattccctgattaaaatcgaaaacgcgtggggcattcggatctaccagaagaggacccaacctacagttcggtctcacgcgtgtgaagtcgacccatacgggatgcccggagggtgctctcatatctgcctgctgtcaagcagctacaagacgcggacgtgcaggtgtcgaactggattcaatctcggttccgacggacgttcttgtaagaggccgaaaaatgagctcttcctattttacggtaagggccgacccggtatagtgcgcggaatggacctgaacacgaagatagcagacgagtatatgattcccattgagaacctcgtgaatcccagagctctagatttccacgcagagaccaattacatttactttgctgataccacttcctttcttattggcaggcagaagattgacggcacagagagagagactattttgaaggatgacctggacaacgtcgaaggaatcgctgtggattggatcgggaataatctttactggaccaacgacggacacaggaaaacaattaacgttgcaaggttagaaaaggcgtcgcagtctagaaaaaccctgctggaaggcgaaatgtcacaccccaggggaatcgtggtggatccagtcaacggatggatgtactggactgactgggaagaggatgaaatcgatgattctgtcgggaggattgaaaaagcttggatggacggatttaaccgccagatctttgtcacttcaaagatgctctggccaaatggtttaactctcgatttccatactaacaccttgtactggtgcgacgcttattatgatcatattgagaaagtattcctgaatggtacccatcggaagatcgtctactctggccgtgaattgaatcaccccttcggactgagccaccacgggaactatgtcttttggacagactatatgaacggcagtattttccagttggacctgattacatccgaagtgacactcctgagacatgaaaggcccccacttttcggcctgcagatctacgacccaagaaagcaacagggggacaatatgtgtagggtgaacaacggagggtgtagcactctctgcctggctatcccaggaggtagagtatgtgcctgtgctgacaaccagctgctggatgaaaacggtacgacctgtacattcaatcccggtgaagccctgcctcacatttgcaaagctggtgaattcagatgcaaaaacaggcactgcatccaggccagatggaaatgtgacggagacgacgattgtctagatggaagtgacgaagatagcgtgaactgttttaatcacagttgtccagatgatcaattcaagtgtcaaaataatcgctgtattcctaagagatggctctgtgatggggctaacgactgcggttccaacgaggacgagtctaaccaaacctgcactgcacgcacatgtcaggtcgatcagttttcatgtggaaatggacgttgcatcccccgagcgtggctctgcgatcgcgaagatgactgcggggatcagacagatgaaatggccagctgtgaatttccgacatgcgagccactgactcagtttgtgtgcaagtctgggaggtgcatatcaagtaaatggcattgcgactctgacgacgactgtggagacggtagcgatgaggtaggatgtgtgcatagctgtttcgataaccagtttagatgtagcagcggacgatgtatacctggccactgggcatgtgatggagataacgattgtggcgatttcagcgatgaagcgcagattaattgtacaaaggaggagatacatagcccagccggatgtaacggtaacgaattccagtgccaccccgatgggaactgcgtcccagacctttggcggtgtgacggggaaaaggactgtgaggacggttctgacgagaaaggctgtaacggtaccatccgcctgtgtgaccataagaccaagtttagctgctggagcacggggaggtgcattaacaaggcttgggtgtgtgatggggacatagattgcgaggaccaatccgacgaagatgattgcgactcctttttgtgcgggccaccaaagcacccatgcgctaacgatacctctgtgtgcttgcagcctgaaaaactgtgtaacggaaaaaaggactgcccagatggctccgatgagggatatctgtgcgacgagtgctccttaaacaatgggggttgcagtaatcattgtagcgtggtgcctggacgcggtattgtatgctcgtgtcctgagggcctgcaattaaataaggacaataaaacctgtgagattgtcgattattgttctaaccacttgaagtgttcgcaggtctgtgagcagcacaagcacaccgtgaagtgtagctgctatgagggatggaagttggatgtcgatggagagtcttgtacttcggtcgacccttttgaggccttcattatcttctcaattcgccacgagatacggagaattgacttgcacaagcgagattattctttgctcgtacctggtttacgcaatacaattgctcttgacttccactttaaccagtcattgctctactggaccgacgtagtcgaggatcgcatttaccgcggaaagctgtccgagtccggcggtgtgagcgcgatagaggtggttgttgaacacgggctagccacgccggaaggcctgaccgtggactggattgcaggtaacatctactggatcgatagcaacctagaccagattgaggtggccaagctagatggatcattacgcaccacattgatcgctggcgcaatggaacaccctagagccatcgcactggatccacgttacggcatcctgttttggactgactgggatgcgaatttccctaggattgaatccgcctctatgtctggagccggtcggaaaacaatatataaggatatgaaaactggcgcatggccaaacggcctgaccgtcgaccattttgagaagagaatcgtgtggacagatgcgaggtcagacgcaatctattccgctctgtacgatggtaccaacatgatcgaaatcatacgagggcacgagtaccttagtcatcctttcgccgtgtcactgtatggtagtgaggtgtattggacagattggagaacaaacactttatccaaggcaaataaatggacagggcagaatgtttcagtgatccagaaaactagtgctcaaccatttgacctgcagatttatcatccttcaaggcagcctcaggcacccaatccttgcgcagctaatgacggaaaaggcccatgctcccatatgtgcctgatcaatcacaacagatctgccgcatgcgcttgtcctcatctaatgaagctgtcttcggacaaaaagacctgttatgaaatgaaaaagttcctcctctacgcccgtaggtcagagatccgcggtgttgatattgacaacccctactttaattttatcaccgcatttacggtaccagacattgatgatgtgacagttatcgacttcgacgcctccgaagaacggctgtattggacggacattaaaacgcagacaatcaagcgagcatttatcaacggcactggattggagaccgttattagcagggacattcagtccataagaggcctggctgttgattgggtgtcccgcaacctgtactggatttcaagcgagtttgatgagactcagataaacgtcgccagactggacggctctctgaaaacgtctatcattcatggaatcgacaagcctcagtgcctggccgctcaccccgtgagaggaaaactgtattggaccgacggcaacaccatcaacatggctaatatggatggatctaactcaaagatcctgtttcagaaccagaaagaaccagtgggtttgtcgattgactatgttgagaataaactgtactggatctcttctggcaatggaacgattaatcgctgtaacttagatggcggtaatctggaggtgattgagtccatgaaggaggagctgacaaaagctaccgctttgaccattatggataagaagctgtggtgggccgatcaaaacttggcgcagttggggacatgctcgaagcgggatgggaggaaccctaccattctgaggaataaaacaagcggcgtggtgcatatgaaggtgtacgacaaagaggctcagcagggaagtaactcttgccagcttaacaatggagggtgcagccagctttgcctgcctaccagcgagaccacgagaacttgtatgtgcaccgttggatactacctgcagaagaatcgtatgagctgccagggtatcgagtcgttcctgatgtacagcgtacatgaaggcatccggggtatcccactagaacctagtgataaaatggatgccctgatgcccattagcggaacctccttcgccgtcgggattgacttccacgccgagaacgataccatctactggacagatatggggtttaacaagatctctcgcgctaagcgggaccagacctggaaggaggatatcattacaaacggactgggccgagtggagggtatagccgtcgactggatagctggaaacatctactggactgaccatggattcaacttgatagaggtggccaggctcaacggttccttcagatatgtcatcatcagtcaaggactggatcagcctcggagtattgccgtccacccagaaaagggcctgctcttctggacagaatggggccaaatgccttgcataggcaaagctagactggacggaagcgagaaggtcgtgttggtatcgatggggatcgcgtggcccaatggcatatcaatagactacgaagaaaataaactctactggtgtgacgcgaggacagataagattgaacggatcgatttggaaacaggcggaaacagggaaatggtgctgtcaggttcaaacgtggatatgtttagtgtggccgtgtttggcgcatatatctattggagcgaccgggcacacgctaatgggtccgtacggcgaggacacaagaacgatgccaccgaaactatcacgatgaggactggtctgggggttaatctaaaggaggtgaaaatcttcaacagagtaagggagaaaggcactaatgtatgtgccagagataatggcggatgcaagcaactgtgcctgtaccgtggcaactcccgacggacctgcgcttgcgctcatggttatctcgctgaagacggggtgacctgcttgcgccacgaaggttacctgctgtattccggtcgaactattctgaaaagcattcacttaagtgatgagaccaatctgaactcacctataaggccttatgagaacccacgctactttaaaaacgtgatcgccctcgctttcgactacaaccagcggcgtaaaggcactaacaggattttttacagcgacgctcattttggcaatatccagttaatcaaagacaactgggaggatcggcaggtgatagtggagaacgtgggcagcgtcgaggggctcgcttatcatcgcgcttgggacaccctttactggactagctcaaccaccagcagtattacccgtcacaccgtggaccagaccagaccaggggcttttgaccgggaagctgtgattaccatgtccgaagacgaccacccacacgtgctagctttggatgagtgccagaacttgatgttctggactaactggaacgagcagcatccatccatcatgcgctcaacactgactggcaaaaatgcacaggtcgtcgtgtctacagacattctgaccccgaatggactgaccattgactatcgggctgaaaaactttatttttctgatggatcattgggcaagattgagagatgtgaatatgatggcagccagcggcacgtgattgtgaaaagtggccctggtactttcctgtcactcgctgtctatgacaactacattttctggtcagactggggcaggagggctattctacggagtaataagtataccggcggagatacaaaaatcttgcggtcagacatcccccaccagccgatggggattatcgccgtagcgaatgataccaactcctgcgaactgtcaccgtgcgcgctcttgaatgggggatgtcacgatctgtgcttgctcactccaaacggaagagtcaactgcagctgtaggggggaccgcattctgctggaggataatagatgtgtcacgaagaactcttcttgtaacgcgtacagtgagttcgagtgcgggaacggtgagtgtatcgactaccaattgacatgcgatggaatcccccattgtaaagacaaaagcgacgagaaattgctctattgtgagaaccgatcctgtcggagaggcttcaaaccctgttacaatcggagatgcataccgcacggaaaactgtgcgatggagagaatgattgtggagacaattcagacgagctcgattgtaaggtcagcacctgcgccaccgtggagttccgctgtgcggacggcacctgtatccccagaagtgccagatgtaaccagaacattgattgtgccgacgcttctgacgagaaaaactgcaacaatactgattgcacacacttctacaagttgggcgtgaagaccaccggcttcatcaggtgtaattccacatccctgtgcgtgttgcctacctggatttgcgacggaagcaacgactgcggtgattattccgatgaactcaaatgtcccgttcagaataagcacaagtgcgaagaaaattacttctcttgcccgagcggaagatgcatcttaaacacatggatttgcgatgggcagaaagactgcgaggacggaagagatgaatttcattgcgacagcagttgcagctggaatcaattcgcatgctcagctcagaaatgcatctctaagcactggatctgtgacggcgaagatgattgcggtgatggtctcgacgagtccgattctatttgcggcgcaatcacatgcgccgctgatatgttctcttgccagggatcacgggcttgcgtgccgaggcattggctgtgcgacggagaacgtgattgtccagatgggagcgatgaactgagcacagcaggttgcgcgcctaataatacctgtgatgaaaacgctttcatgtgtcacaacaaagtgtgtatccccaaacagtttgtatgcgatcacgatgacgactgtggcgatggatccgacgaaagtccgcaatgcggctacaggcagtgcgggaccgaagagttttcttgcgcagatggtagatgcctgctgaacactcagtggcagtgcgatggcgacttcgattgtcccgaccactccgacgaagcccctcttaatcccaaatgtaagagcgctgagcagagctgtaactcaagtttctttatgtgcaagaacggacgctgcatccccagcggtggtctatgcgataataaagatgactgcggggacggaagtgatgagcgcaattgccatattaatgaatgtctttccaaaaaggtgagcgggtgctctcaggattgtcaggatcttcccgtctcttacaaatgcaaatgttggccaggattccaactgaaagacgatgggaagacgtgtgtggatatcgacgagtgctccagtggttttccctgcagtcagcagtgcattaacacttatgggacgtacaagtgcctttgcaccgatggctacgaaatacagcccgacaaccctaacggatgcaagtctctgagcgacgaggagcccttccttattctcgccgaccaccacgagatacggaaaatttccacagatggctcgaactacactcttttaaagcaaggactcaataatgtcatcgcaattgactttgattatagggaggagtttatctattggattgattcatctaggcctaatggtagccgcatcaataggatgtgcttaaacgggtccgacattaaagtggtccacaacactgccgttcccaacgctctggctgtcgattggattggcaaaaacttgtactggtccgacaccgagaagcgcatcatagaggtctctaagctcaatggcctctacccaacaattctcgtgagcaagcgcttaaaattcccacgagatctgtcactggatccccaggctggatacctgtattggatcgattgttgtgagtatccccacatcgggagagttggtatggacgggacaaaccagtcggttgtgatagaaaccaagatcagtagacccatggccttaaccatcgactatgtgaacaggaggctgtattgggccgacgagaaccatattgagttctcaaatatggacgggtcccaccgccacaaagtgcccaaccaagacataccgggtgtgatcgcattgacactgttcgaggactatatctattggactgatgggaagactaagtccctgtcacgcgctcataaaacaagtggcgcagatcggctatcgctaatctattcctggcatgccattacagatattcaagtgtaccactcctatcgccaaccagacgtgtcaaagcacctgtgtatgataaacaacggtggctgcagtcacttgtgtctgttagcacccggaaagactcacacctgcgcatgcccgacaaacttttatctggccgctgacaacagaacgtgcctatcaaattgtacagcttcacaattcaggtgtaaaaccgataagtgtatccccttttggtggaagtgcgatacagttgacgactgcggggatggttccgatgagcccgatgactgcccagaattccgttgccagccgggacgttttcaatgcggaaccggactgtgcgcactgcctgccttcatctgcgatggggagaatgactgcggcgacaacagcgacgagctcaactgcgacacccatgtgtgcctcagcggccaattcaagtgcacgaaaaatcagaaatgtatccctgttaatttgcgttgcaatgggcaggacgattgtggtgacgaggaagatgaacgggattgcccggagaactcatgtagtccagattacttccagtgtaaaacaaccaaacactgcatttccaagttgtgggtttgcgacgaagacccagattgtgctgacgcctctgacgaagccaattgtgataaaaagacttgtggtccacacgagtttcagtgcaagaacaataattgcatacccgaccactggcgttgcgactcacagaacgactgctcagacaattccgatgaggaaaattgcaaaccccagacatgtaccctgaaggacttcctgtgcgctaacggagattgcgtgtcgtcgaggttttggtgcgacggggacttcgattgcgcagacggcagcgacgagcgcaattgcgagacatcatgttctaaggaccagtttcggtgctccaatggacaatgcatacccgctaaatggaagtgtgatgggcacgaggattgtaagtatggagaagatgaaaaaagttgcgaacccgcttctcccacgtgctctagcagggaatatatctgcgcatccgatgggtgtatatcagcaagcctcaagtgcaacggcgaatatgactgcgccgatggttcagacgaaatggattgcgtgactgaatgtaaggaggatcaatttcggtgcaaaaataaggcgcattgtatccccattagatggctgtgcgacggtatccatgattgcgtcgacggatctgatgaggaaaactgcgaacggggaggtaacatatgcagggctgacgagttcctgtgcaacaactcactgtgcaaactacatttctgggtgtgcgatggagaggacgattgcggtgacaattccgacgaggcgccagatatgtgtgttaaattcttgtgtcctagcacgcggccacatcgctgtcggaacaatagaatttgtcttcagtctgagcagatgtgtaatgggattgatgaatgcggagacaatagtgacgaggatcactgtggaggtaagctgacgtataaggcacggccttgcaagaaagatgaatttgcctgttccaataaaaaatgcattcctatggaccttcagtgcgaccgattggatgattgtggagacggctcagatgagcagggctgccgcatcgcgcctactgagtatacatgcgaagataacgtgaacccctgcggagatgacgcatattgcaatcaaattaagacgtccgttttttgcagatgtaagccaggcttccagcggaacatgaagaaccggcagtgtgaggatctgaatgaatgcctcgtttttggaacgtgctcccatcagtgtattaacgtggaggggtcctacaagtgcgtctgtgaccagaatttccaagaaagaaataatacctgcatcgccgagggtagcgaggatcaagtgctgtacatcgctaacgatacagacatcctcggctttatttaccccttcaattattctggtgatcaccagcagatcagccatatcgagcacaattcaaggatcaccggcatggacgtgtattatcagagggatatgatcatctggtccacccaatttaaccccggaggcattttctacaaaagaatccacgggagggagaagcggcaagcaaattccggcttgatctgtcctgaattcaaacggcctcgcgacatagctgtcgactgggtggctgggaatatttattggaccgaccatagccggatgcactggttctcatattacaccacccactggaccagcctacggtacagcatcaatgtgggtcagctcaacggcccaaactgcacaaggcttctgacgaatatggccggagagccctacgccatcgctgtgaatcctaagaggggcatgatgtattggacagtggttggcgaccattcacacatagaagaagctgcgatggatggtaccctgagacgcatcctggtgcagaaaaatctgcagagacccacagggcttgccgtcgattacttttcagaaaggatctattgggccgactttgagctcagcattattgggagcgtactgtatgacggctctaactccgtagtcagcgtttcctcaaagcagggccttctccacccccatcgaattgatatctttgaggattatatctacggagctggacccaaaaatggggtatttcgcgtgcagaaatttgggcatgggtcggttgagtatcttgccctcaacatcgacaagactaaaggcgtgctcatctcgcacaggtacaagcaactggatctgccaaacccgtgcctggatcttgcctgcgaattcttatgcctcctcaacccttccggcgcaacttgcgtgtgtcccgagggaaagtacctgataaatggcacttgcaacgatgacagcttgcttgacgattcctgcaagctgacctgcgagaatggcggacggtgcatactgaatgaaaagggggacctgcggtgccactgctggcccagttattccggagagaggtgcgaagtcaaccattgctccaattattgccaaaacggaggaacgtgcgtgccctctgtgctcggacgccctacctgttcctgtgctctgggatttaccggccctaactgtggcaaaaccgtctgcgaggacttctgtcaaaacggcggaacctgcattgtcacagctggtaaccagccatactgccactgccagccagaatacaccggcgaccggtgtcaatactatgtgtgccatcactactgcgttaactctgaaagctgtacgatcggagacgacgggtctgtcgaatgcgtatgtcctactcgctacgaaggtccaaagtgcgaagtagataaatgcgtcagatgtcatgggggtcactgtattatcaataaggactccgaagatattttctgcaactgcaccaacgggaaaatcgcctcctcttgtcaactgtgtgatgggtattgctataacgggggaacatgccagctggaccccgagactaatgtccctgtttgcctgtgcagcacgaactggtctggcactcagtgcgaaagacccgcacctaagtcttcaaagtccgaccatatcagtacccgatcaattgccatcatcgttcctctagttcttctcgtgaccctcattaccaccctggtgattggcttagtcttgtgcaagcgaaaacgtcgcacgaagaccatacgcaggcagcctattatcaacggcggtatcaacgtagaaataggtaatccctcctacaacatgtacgaggtagatcacgatcacaacgatggaggcctgttggacccagggttcatgattgatcctacgaaggctcgatatatcgggggagggcctagtgcattcaaattaccacacacagcccctcccatttacctgaactcggatctgaaaggcccactcaccgcaggacccaccaactacagcaaccccgtgtatgccaagctgtacatggacggccagaactgccgcaactctctaggcagtgttgatgaaagaaaggaactattacctaaaaagatcgagataggtattcgcgagacagtggcctaa

SEQ ID NO: 199063 - DNA, 80 bp, Artificial Sequence
  derived and/or modified sequence
aatcaataaatgtaaaccagcatataaacagaaccaacgacaaaaaccacatgattatctcaatagatgcagaaaaggcc

SEQ ID NO: 199064 - protein, 150 aa, Artificial Sequence
  derived and/or modified sequence
MLRAAVILLLIRTWLAEGNYPSPIPKFHFEFSSAVPEVVLNLFNCKNCANEAVVQKILDRVLSRYDVRLRPNFGGVLETNSTWGLNDDELMAHGQEKDSSSESEDSCPPSPGCSFTEGFSFDLFNPDYVPKVDKWSRFLFPLAFGLFNIV

SEQ ID NO: 199065 - protein, 632 aa, Artificial Sequence
  derived and/or modified sequence
MGIRGMLRAAVILLLIRTWLAEGNYPSPIPKFHFEFSSAVPEVVLNLFNCKNCANEAVVQKILDRVLSRYDVRLRPNFGGAPVPVRISIYVTSIEQISEMNMDYTITMFFHQTWKDSRLAYYETTLNLTLDYRMHEKLWVPDCYFLNSKDAFVHDVTVENRVFQLHPDGTVRYGIRLTTTAACSLDLHKFPMDKQACNLVVESYGYTVEDIILFWDDNGNAIHMTEELHIPQFTFLGRTITSKEVYFYTGSYIRLILKFQVQREVNSYLVQVYWPTVLTTITSWISFWMNYDSSAARVTIGLTSMLILTTIDSHLRDKLPNISCIKAIDIYILVCLFFVFLSLLEYVYINYLFYSRGPRRQPRRHRRPRRVIARYRYQQVVVGNVQDGLINVEDGVSSLPITPAQAPLASPESLGSLTSTSEQAQLATSESLSPLTSLSGQAPLATGESLSDLPSTSEQARHSYGVRFNGFQADDSIFPTEIRNRVEAHGHGVTHDHEDSNESLSSDERHGHGPSGKPMLHHGEKGVQEAGWDLDDNNDKSDCLAIKEQFKCDTNSTWGLNDDELMAHGQEKDSSSESEDSCPPSPGCSFTEGFSFDLFNPDYVPKVDKWSRFLFPLAFGLFNIVYWVYHMY

SEQ ID NO: 199066 - DNA, 1899 bp, Artificial Sequence
  derived and/or modified sequence
atgggtatccggggcatgttacgcgctgcagtgattttgcttcttatcagaacgtggctcgccgaaggcaactatcctagccctatcccaaagtttcacttcgagtttagcagtgctgttcccgaggtcgtcctgaatttgttcaattgcaagaactgtgctaacgaagccgtggtacagaaaattctggatagagtcctgtcccgatacgacgtaagacttcgccccaatttcgggggggctcctgtcccagtgcgcatctcaatttacgtgacctccattgagcagattagcgagatgaatatggactacaccatcacaatgtttttccatcagacctggaaagacagccggcttgcttattatgaaacaaccctgaatctgactctagattaccgcatgcacgagaagctgtgggtgccagactgttacttccttaacagcaaagatgcctttgtgcacgacgtaacagtcgaaaacagggtcttccaactgcacccagacggcaccgtacgctacgggattagactgacgacaacggccgcctgtagtctggatctccataaatttccaatggacaagcaggcgtgcaatcttgtcgttgagagttatgggtacactgtcgaagacattatcctgttttgggatgataacgggaacgccattcatatgacagaggagttgcacattccacaattcacattcctgggccgcactatcacatctaaagaggtgtacttttatactggctcatacataaggcttatcttgaaattccaagtgcagagagaagtcaactcttatctggtgcaggtctactggcccaccgtgctgacgaccattaccagctggatctctttttggatgaattacgactcttcagctgccagggttactatcggacttacttctatgctgatactgacaacgatcgacagccacctaagagataaactgccaaacatttcatgtatcaaagccatcgatatctacatcctagtgtgcctgtttttcgtgtttctgtcccttctcgagtatgtgtacatcaattacctgttttacagtaggggcccgaggaggcagccccgtaggcataggaggcctaggcgggtcattgcaaggtataggtaccaacaagtggtggtgggaaacgtgcaggatggcctcattaatgtggaggacggcgtgtcttcactaccgataactccagcccaggcaccccttgcctcacctgagtcattgggcagtctgacttccacatcagaacaggcgcagttagccacctctgagagcctctctcccttgacatcactatcaggccaggctcctctggcgactggagaaagcctgtctgacctcccaagtactagcgaacaagcgcgccattcttacggcgtaaggtttaacgggttccaggctgatgatagcatttttcccactgagatacgtaaccgggtggaagcccacgggcacggggtaacacacgaccacgaagattcgaacgaatcactgtcctccgacgagcgccatggtcacggtccatcgggcaaaccaatgttacatcacggcgaaaagggtgtgcaagaggcagggtgggacctggatgacaacaacgacaaaagtgactgtttagccatcaaggaacagttcaagtgtgacacaaactccacgtggggccttaacgatgacgaactgatggcacatgggcaggagaaagactcctcttccgaatccgaggactcgtgcccaccttctccaggttgttctttcaccgaaggctttagctttgacctctttaacccggactacgtgccaaaggtcgacaaatggagcaggttcttgttccctctggcattcgggctgttcaatattgtatattgggtctaccacatgtactag

SEQ ID NO: 199067 - DNA, 6174 bp, Artificial Sequence
  derived and/or modified sequence
gcgcccagaacgccccggccatgggcatccgaggcatgctgcgagccgcagtgatcctgctgctcatcaggacctggctcgcggagggcaactaccccagtcccatcccgaaattccacttcgagttctcctctgctgtgcccgaagtcgtcctgaacctcttcaactgcaaaaattgtgcaaatgaagctgtggttcaaaagattttggacagggtgctgtcaagatacgatgtccgcctgagaccgaattttggaggtgcccctgtgcctgtgagaatatctatttatgtcacgagcattgaacagatctcagaaatgaatatggactacacgatcacgatgttttttcatcagacttggaaagattcacgcttagcatactatgagaccaccctgaacttgaccctggactatcggatgcatgagaagttgtgggtccctgactgctactttctgaacagcaaggatgctttcgtgcatgatgtgactgtggagaatcgcgtgtttcagcttcacccagatggaacggtgcggtacggcatccgactcaccactacagcagcttgttccctggatctgcataaattccctatggacaagcaggcctgcaacctggtggtagagagctatggttacacggttgaagacatcatattattctgggatgacaatgggaacgccatccacatgactgaggagctgcatatccctcagttcactttcctgggaaggacgattactagcaaggaggtgtatttctacacaggttcctacatacgcctgatactgaagttccaggttcagagggaagttaacagctaccttgtgcaagtctactggcctactgtcctcaccactattacctcttggatatcgttttggatgaactatgattcctctgcagccagggtgacaattggcttaacttcaatgctcatcctgaccaccatcgactcacatctgcgggataagctccccaacatttcctgtatcaaggccattgatatctatatcctcgtgtgcttgttctttgtgttcctgtccttgctggagtatgtctacatcaactatcttttctacagtcgaggacctcggcgccagcctaggcgacacaggagaccccgaagagtcattgcccgctaccgctaccagcaagtggtggtaggaaacgtgcaggatggcctgattaacgtggaagacggagtcagctctctccccatcaccccagcgcaggcccccctggcaagcccggaaagcctcggttctttgacgtccacctccgagcaggcccagctggccacctcggaaagcctcagcccactcacttctctctcaggccaggcccccctggccactggagaaagcctgagcgatctcccctccacctcagagcaggcccggcacagctatggtgttcgctttaatggtttccaggctgatgacagtatttttcctaccgaaatccgcaaccgtgtcgaagcccatggccatggtgttacccatgaccatgaagattccaatgagagcttgagctcggatgagcgccatggccatggccccagtgggaagcccatgcttcaccatggcgagaagggtgtgcaagaagcaggctgggaccttgatgacaacaatgacaagagcgactgccttgccattaaggagcaattcaagtgtgatactaacagtacctggggccttaatgatgatgagctcatggcccatggccaagagaaggacagtagctcagagtctgaggatagttgccccccaagccctgggtgctccttcactgaagggttctccttcgatctctttaatcctgactacgtcccaaaggtcgacaagtggtcccggttcctcttccctctggcctttgggttgttcaacattgtttactgggtataccatatgtattagtcccccagtgctccagaacagcgggagcactgtgctgtgctcctttcagtttcttttgggtttgtttttccctctttcctttgttccttttattttgtggttatttgggcaatccaataagttcatacttctctttataaacatgaggtggggagtaattggaaagaacatgttctagctggaagggaagggattgaggaggagttggaggtatacagcacatggatttcctttcctgctagaagactctcaccttttcaaagacttgtaacaaggaataagcatagaaaagcccctggaaatgtttagaggacagagaagagccaggttgggggatggggcaaggatctgggccttttgcccacaaacatttctggggggcttttctgtcccccttgaggtgtcaacatttctttttcattacatgttttcttctttttttgtttcctcctagggattatgggtcttgttcaccctctgcttagggctttatagaagaaagtcaagctgggttgggctggggttcatagctaaagggctagccatggcttagaagttcagggaacttcctataggaaacttagggagcatttgtaagtgcctttcccccactgtatggcatttgactgtggtgttttgatgcaagcgtggaaggggaatgtgggtggatggggctgcagagtgagacatcagggtgagagagcacatactcagcttgtggggttggcagagggtggggggtgatgtcaggttggaaattacacagttgagctggcctcttcggagggattggaacttgcctatatttctgcttcagaacgcttggcaatagagactcaatacatctgtctaagtcaggagttagctttccgtcagttgctgagttgatcaccagttacagcacttggtgaataagcactaaggttaggataattcacacttgctattttaccatctgatctagactagcagatgaatatctatcgtaagtctatatactaatcctttctatttgtctagtgcatagtaagtgtcaacaagctccctgacccattacatcactggagcctcacaggagccctgtaagccagggaaggcaaagcacattgtccccagtgttccaaggaaaacgaatggagcttatgccgcatgcttgaggacatgcagccagtgagtggtagatccaccccacttgctctttcttgtctttttcctcctgactgtcccaactgaggcatttccttttcttccctccctaaagagggtgctccagagggcccccaccacatcctctagcacctggggcatctctgcaggaataggctggtgaccagccaatgagcgtgacgtgagcagatggagaacacactctctgcccactgagcagggcccctaacggaagtaggattggccagcattccaacttgccaagcagctccacctcactgatggaggttgtgagggagtgaactttgccgagcactcaacatatgccacctcttcctccctatgcagtctctccctcagtcccttacccctctacccactcaccctttaactgtgcttctgtgtttgtgtttctgtatatacctgggtgtatgcatatgcagcagggtgggtgtatgtacatatacaaccatttgagaagctgcatagtgccgtgtctagtggtgtaaatctacattggtgtgtacagaattgtatctacagcatgtggatgcatgcgtgtgtgtgcacatccctgtgaaagtgtggcttatgtatgtgtatgcttgtgtacacatgggtctatgctgagtgcatgtatataagggcatgtctgcatatctatgtttatctgatttgaatgggtgtgaaaggaaatacccctgaaagcatatgtattccctgttggtgacccttctagaaccactataattcccttggcctgctcccatatggtggaggggccctatttggccgggctgcttaactgactgtttctttccaacttcctgttccagggagcagcatctcccagttcccttccactgtttgccctgtccctccatccatctgtgctgtctcctagatagaagactggggaagtgaatgtagtcctaagaagtggtgagctagtgccttgaggtaggaagtggttaatccatggaagaagctgcaagtacagagcatttcactttgtcctagaggaacatgtttcggggtaacaggctggggagtgaggctgaaagaggcattgagaatagacacttgtacagtcacatacacatacacacacacaaatcttgtacaacagttgaaaacaagaaagttaccactggaagagctaaaattgcctctttatttttggataccccatatagagattcaggtggaggggagagcagtgactccatgtctgaagctcccaatgtggctattgaaaggctggcttcctggagcctaagcattggttggttgacgtggatttgggtctccagcaccctggaggtgctttcaaccctgtggtggcaagcagttcatttgggataaagtcataaagggagattggagcagtgtgaagaaaaggagggttttaagatttgtctggaagcaatgcacatgaaggcttcacagcacagaggaagggcagcgaggccagttgtaaatatctctatagatccatatagctagatataatactataccttaaaaaggatatcttgccctgacgtgctgcaatgagagcagttgaactctactgcgactcatactctgtaggttaagtgtcaaaatgaggtggagatttggcagtgacaccctttcgggaacgtgaaccttctgagtttgctatggatttggtcattttagcctgcacgttgccagatctccccttgttgagtcttgtatgtggtctgtcctctgtgtcatttgagtcctcagctgtccccaaccccttcccagcccctccccagcctgcagtcaccccctgtccagcaagctgcctccatcccatccctctcctcacctcacaccaggtaactctggaagtgcagaatgcttggtagtttggagcttgggcagcatctgggatgcaacaacccctattttactcttctacccaccttccatttctttccttcccatcgacttccccgacccaggatcccttctttgccactatcatgggaaggacacccctgtctgtctttctgaagtatcattttattgtggggatgtgtgacacgtttcctaccaagttcttgccagttccatctgccactgtggggtgcctttgcacaggtcatggacgatctgctgggtcttactagagcctgtcaaatgtattcttacaattcatgtcatcttgttaatagcaggacttcaaagtctttgcatatttagagctgagttttgctgagactgtggccattcctaatgaggtttcctcattccatatatataatagctaacccttaaagccattaactaatgaatgcatttattaagctatccactcgcatggtaccctgctgtggtgatgagcagtaactttctagctattccatagcccaacatcaaaggaaatcgtgactcgtcctactagaagtgtagtgtctttgtgtttgttgtgtagtgtcctgtgatcaatataaaatctatattatcagtgttgggttttcaggggagggagggagaggatgttaaagtctctctttgataaacttaaattatgaaatagcccagttgttcagggtcacttctattgactcaatttgtgtgagactttgcactcactatctcgccggccggactgcatgcccagggtcagtagtcagcagagctaaaggtgcccgaatttagcacagctggctgtggtgcctgacatagggcagtaccgggggattcttcagaggtcagccaagtcggtaacattctgtgaagcagattaaatacagtaaaatcaaacaaacggaggtctttggaagtgatgctgggcccaggcagtgaaaatcaagaaaagaggagaaagaccaagacctggatgtcctggacgacctgacccaaaaaggggcacaaagcagcagagcttcaccaggtgactgggtggcttctttgtcctcattaaatgtacatctttgcatgaaaaggaccttgactggtccggactttaacaaagtaaaatatgaagaaacgtaaaattatgcttctgaaaaatatactgaaataaaattttgtaaatagctaaaagaaaaataaataaatataataacaa

SEQ ID NO: 199068 - DNA, 1899 bp, Artificial Sequence
  derived and/or modified sequence
atgggcatccggggcatgctgcgggccgccgtcatcctgctgctgatccgcacctggctggccgagggcaactaccccagccccatccccaagttccactttgagttcagcagcgctgtgcctgaggtggtgctgaacctcttcaactgcaagaactgtgccaatgaagctgtggtgcagaagatcctggacagagtgctgagccgctatgatgtgcggctgcggcccaactttggaggagcccctgtgcctgtgcgcatcagcatctacgtgaccagcattgagcagatcagcgagatgaacatggactacaccatcaccatgttcttccaccagacctggaaggacagccggctggcctactatgagaccaccctgaacctgaccctggactacaggatgcatgagaagctgtgggtgcctgactgctacttcctgaacagcaaggatgcctttgtgcatgatgtgacagtggagaacagagtcttccagctgcacccagatggcaccgtgcgctatggcatccggctgaccaccacagctgcctgcagcctggacctgcacaagttccccatggacaagcaggcctgcaacctggtggtggagagctatggctacacagtggaggacatcatcctcttctgggatgacaatggaaatgccatccacatgacagaggagctgcacatcccccagttcaccttcctgggccgcaccatcaccagcaaggaggtgtacttctacacaggcagctacatccgcctcatcctgaagttccaggtgcagcgggaggtgaacagctacctggtgcaggtgtactggcccaccgtgctgaccaccatcacctcctggatctccttctggatgaactatgacagcagcgctgcccgggtgaccatcggcctgacctccatgctgatcctgaccaccatcgacagccacctgcgggacaagctgcccaacatcagctgcatcaaggccatcgacatctacatcctggtgtgcctcttctttgtgttcctgagcctgctggagtatgtgtacatcaactacctgttctacagccggggcccccggcggcagcccaggaggcaccggcggcccaggagggtcatcgcccgctaccgctaccagcaggtggtggtgggcaatgtgcaggacggcctcatcaacgtggaggatggagtgagcagcctgcccatcaccccagcccaggcccccctggccagccctgagagcctgggcagcctgaccagcaccagcgagcaggcccagctggccaccagcgagagcctgagccccctgaccagcctgagcggccaggcccccctggccaccggggagagcctgagtgacctgcccagcaccagcgagcaggcccggcacagctatggagtgcgcttcaacggcttccaggctgatgacagcatcttccccacagagatccggaacagagtggaggcccacggccatggagtgacccatgaccacgaggacagcaatgaaagcctgagcagtgatgagcggcacggccacggccccagcggcaagcccatgctgcaccacggggagaagggcgtgcaggaggccggctgggacctggatgacaacaatgacaagagtgactgcctggccatcaaggagcagttcaagtgtgacaccaacagcacctggggcctgaatgatgatgagctgatggcccacggccaggagaaggacagcagcagcgagagcgaggacagctgcccccccagccctggctgcagcttcacagagggcttctcctttgacctcttcaacccagactatgtgcccaaggtggacaagtggagccgcttcctgttccccctggccttcggcctcttcaacatcgtgtactgggtgtaccacatgtactag

SEQ ID NO: 199069 - DNA, 1899 bp, Artificial Sequence
  derived and/or modified sequence
atgggcatccggggcatgctgcgggccgccgtgatcctgctgctgataagaacctggttagcagaaggtaactacccttctccaataccaaagttccattttgagtttagctccgctgtccctgaggttgtgctgaacctgtttaactgtaaaaattgtgcaaatgaagctgtcgtgcagaaaatcctcgatcgtgttcttagccgttatgatgtgcgacttaggccaaattttggaggagctcctgttcctgtacgaatcagtatctacgtaactagtatcgaacaaatctcagaaatgaatatggactatacgattaccatgttctttcaccaaacgtggaaagatagtcgtctcgcctattacgagactactctgaacctcaccctggactacagaatgcacgagaaactgtgggtgcctgactgttactttcttaattccaaggatgccttcgtgcacgacgttacagttgaaaacagagtattccagttacacccggatgggaccgtgcgctacggtatacggctgacaaccacagccgcatgctccctcgatctccacaagtttcctatggacaagcaggcctgtaatctggtggtggagagttatgggtacaccgtcgaggatatcatactgttttgggatgataacgggaatgcaatccacatgacagaagaactgcatatcccacagtttacttttttaggcagaaccattaccagtaaagaagtgtacttctataccggaagctacattcgcctaatcctcaaattccaagtgcagcgagaggttaattcataccttgtgcaggtttactggccaactgtgctcaccactatcacgagctggatcagcttctggatgaattatgacagttcagccgctagagtcactatcgggcttacgtccatgctcatcctcaccacaatcgacagtcacctgagagataagttgcctaatatcagctgcatcaaggcaatcgatatctatatcctggtctgtctattctttgtgttcctgagtctgcttgaatatgtctatattaattatttattctactctcggggccccaggcgacaaccacgtcgccaccggagacctcgcagggtcatcgctagatacagataccaacaggtagtcgtcggcaacgtgcaagatggtttgatcaatgtggaggacggggtgtcttccttgcctatcacgcccgcacaggctcccctggcctcaccagagtccttggggtcactgacaagcaccagtgagcaggcacaactggccacttccgaaagcctctcccctctgacctctttgtcagggcaggcgccgctggccacaggcgaatccctttccgatctgccaagcacgagcgaacaggcacgccatagttatggggtgcgatttaacggctttcaggccgacgactccatcttccccacagagattagaaatagggtcgaggctcacggtcatggtgtgacccatgaccacgaggactccaatgaatctctgagcagcgatgaaagacatgggcatgggccctccggtaagcctatgctgcaccatggagaaaaaggtgtacaggaggcaggttgggatctcgatgacaataacgataagagcgactgcctggccattaaggaacaattcaaatgtgacactaattctacctggggactcaacgacgacgaactcatggcccacggacaagagaaggactcctccagcgagtccgaggattcctgcccacccagcccaggatgtagctttaccgaaggcttctcattcgatctctttaatcccgactacgtgcccaaggtggacaagtggtctagattcctgtttcccttagctttcggtctctttaatatcgtgtattgggtgtaccacatgtattag

SEQ ID NO: 199070 - DNA, 1899 bp, Artificial Sequence
  derived and/or modified sequence
atgggcattaggggaatgctgcgggcagctgtgatcctcctcctcatcagaacatggcttgcagaagggaattacccaagccctattcccaaatttcattttgaattctcatccgccgtgcccgaagtggtgctgaacttgttcaattgcaagaattgcgccaacgaggccgtggtgcagaagatcctggatagggtcttatctaggtatgatgttcggctgcgcccaaacttcggaggcgctcctgtgccggtcaggatcagcatatatgtgactagcatcgagcagattagcgagatgaatatggactatacaatcacaatgttttttcatcaaacctggaaggattcaagactcgcttattacgagaccaccctgaatctgacattggactacaggatgcacgagaagctctgggtgcccgactgctacttcctgaactccaaagatgccttcgtgcacgacgtgactgtagaaaatagggtatttcagctgcacccagacggaaccgtacgctatggaatcaggctcaccacaacggctgcttgttccctcgatcttcacaagtttccaatggataaacaggcttgcaatctggtggtcgagagttatggttacaccgttgaggacataattcttttctgggacgataacggtaacgctatccacatgacagaagaacttcacatcccccagttcacgtttctggggagaactattacctccaaggaggtgtacttctacaccggttcatacatccgactaatactgaagttccaggtacagcgcgaggtgaatagttacttagttcaggtgtactggccgacagttctcactaccataaccagctggatttccttctggatgaactacgactcctccgcagctcgtgttactatcggtctgaccagcatgcttatactcaccacgattgacagccatcttagagataagctgccaaacatttcctgcataaaggcgatcgatatctacatcttggtctgcctgtttttcgtctttctctccctgctggaatacgtgtatatcaactaccttttctactcacggggtcctcggcgacagcccagacggcatcggaggcctaggcgtgtgatcgcacgttaccgctaccaacaagtggtggtggggaacgtacaggatgggcttatcaacgtggaggatggcgtttcttctctccctataactccagctcaagcgcctttggccagccccgaatctttagggtctttgacctccacctccgaacaggcgcagctggccacctcagaaagcctttcaccactgacctccctaagtggacaggcgccattggcgaccggcgaaagcctgtccgatctgcccagcacaagcgagcaagccagacacagctacggcgtccgttttaacgggtttcaagctgacgacagtatcttcccgactgaaattagaaatcgcgtggaagcacatggacacggcgtcacccacgaccacgaggattccaacgagtctctcagcagtgacgaaagacatggccatgggccttctggcaaaccgatgctgcaccacggagagaaaggggtgcaggaagccggttgggacctggatgacaataatgataaatcagattgtctcgctattaaggagcagttcaaatgcgacacgaacagcacctggggcctgaacgatgatgaacttatggcccatggccaggagaaggacagtagctcagagtctgaggactcgtgtccgccaagccctggctgtagcttcaccgagggcttttcttttgatcttttcaatcccgattacgtacctaaggtcgacaaatggtcccggttcctcttcccgctcgccttcggtctgttcaacatcgtgtattgggtataccacatgtactag

SEQ ID NO: 199071 - DNA, 1899 bp, Artificial Sequence
  derived and/or modified sequence
atgggcatcagaggcatgctgagagccgccgtgatcctgctgctgatcagaacctggctggccgagggcaactaccccagccccatccccaagttccacttcgagttcagcagcgccgtgcccgaggtggtgctgaacctgttcaactgcaagaactgcgccaacgaggccgtggtgcagaagatcctggacagagtgctgagcagatacgacgtgagactgagacccaacttcggcggcgcccccgtgcccgtgagaatcagcatctacgtgaccagcatcgagcagatcagcgagatgaacatggactacaccatcaccatgttcttccaccagacctggaaggacagcagactggcctactacgagaccaccctgaacctgaccctggactacagaatgcacgagaagctgtgggtgcccgactgctacttcctgaacagcaaggacgccttcgtgcacgacgtgaccgtggagaacagagtgttccagctgcaccccgacggcaccgtgagatacggcatcagactgaccaccaccgccgcctgcagcctggacctgcacaagttccccatggacaagcaggcctgcaacctggtggtggagagctacggctacaccgtggaggacatcatcctgttctgggacgacaacggcaacgccatccacatgaccgaggagctgcacatcccccagttcaccttcctgggcagaaccatcaccagcaaggaggtgtacttctacaccggcagctacatcagactgatcctgaagttccaggtgcagagagaggtgaacagctacctggtgcaggtgtactggcccaccgtgctgaccaccatcaccagctggatcagcttctggatgaactacgacagcagcgccgccagagtgaccatcggcctgaccagcatgctgatcctgaccaccatcgacagccacctgagagacaagctgcccaacatcagctgcatcaaggccatcgacatctacatcctggtgtgcctgttcttcgtgttcctgagcctgctggagtacgtgtacatcaactacctgttctacagcagaggccccagaagacagcccagaagacacagaagacccagaagagtgatcgccagatacagataccagcaggtggtggtgggcaacgtgcaggacggcctgatcaacgtggaggacggcgtgagcagcctgcccatcacccccgcccaggcccccctggccagccccgagagcctgggcagcctgaccagcaccagcgagcaggcccagctggccaccagcgagagcctgagccccctgaccagcctgagcggccaggcccccctggccaccggcgagagcctgagcgacctgcccagcaccagcgagcaggccagacacagctacggcgtgagattcaacggcttccaggccgacgacagcatcttccccaccgagatcagaaacagagtggaggcccacggccacggcgtgacccacgaccacgaggacagcaacgagagcctgagcagcgacgagagacacggccacggccccagcggcaagcccatgctgcaccacggcgagaagggcgtgcaggaggccggctgggacctggacgacaacaacgacaagagcgactgcctggccatcaaggagcagttcaagtgcgacaccaacagcacctggggcctgaacgacgacgagctgatggcccacggccaggagaaggacagcagcagcgagagcgaggacagctgcccccccagccccggctgcagcttcaccgagggcttcagcttcgacctgttcaaccccgactacgtgcccaaggtggacaagtggagcagattcctgttccccctggccttcggcctgttcaacatcgtgtactgggtgtaccacatgtactag

SEQ ID NO: 199072 - protein, 340 aa, Artificial Sequence
  derived and/or modified sequence
MARDLIGPALPPGFKARGTAEDEERDPSPVAGPALPPNYKSSSSDSSDSDEDSSSLYEEGNQESEEDDSGPTARKQRKNQDDDDDDDDGFFGPALPPGFKKQDDSPPRPIIGPALPPGFIKSTQKSDKGRDDPGQQETDSSEDEDIIGPMPAKGPVNYNVTTEFEKRAQRMKEKLTKGDDDSSKPIVRESWMTELPPEMKDFGLGPRTFKRRADDTSGDRSIWTDTPADRERKAKETQEARKSSSKKDEEHILSGRDKRLAEQVSSYNESKRSESLMDIHHKKLKSKAAEDKNKPQERIPFDRDKDLKVNRFDEAQKKALIKKSRELNTRFSHGKGNMFL

SEQ ID NO: 199073 - DNA, 1023 bp, Artificial Sequence
  derived and/or modified sequence
atggccagagacctgatcggccccgccctgccccccggcttcaaggccagaggcaccgccgaggacgaggagagagaccccagccccgtggccggccccgccctgccccccaactacaagagcagcagcagcgacagcagcgacagcgacgaggacagcagcagcctgtacgaggagggcaaccaggagagcgaggaggacgacagcggccccaccgccagaaagcagagaaagaaccaggacgacgacgacgacgacgacgacggcttcttcggccccgccctgccccccggcttcaagaagcaggacgacagcccccccagacccatcatcggccccgccctgccccccggcttcatcaagagcacccagaagagcgacaagggcagagacgaccccggccagcaggagaccgacagcagcgaggacgaggacatcatcggccccatgcccgccaagggccccgtgaactacaacgtgaccaccgagttcgagaagagagcccagagaatgaaggagaagctgaccaagggcgacgacgacagcagcaagcccatcgtgagagagagctggatgaccgagctgccccccgagatgaaggacttcggcctgggccccagaaccttcaagagaagagccgacgacaccagcggcgacagaagcatctggaccgacacccccgccgacagagagagaaaggccaaggagacccaggaggccagaaagagcagcagcaagaaggacgaggagcacatcctgagcggcagagacaagagactggccgagcaggtgagcagctacaacgagagcaagagaagcgagagcctgatggacatccaccacaagaagctgaagagcaaggccgccgaggacaagaacaagccccaggagagaatccccttcgacagagacaaggacctgaaggtgaacagattcgacgaggcccagaagaaggccctgatcaagaagagcagagagctgaacaccagattcagccacggcaagggcaacatgttcctgtag

SEQ ID NO: 199074 - DNA, 1023 bp, Artificial Sequence
  derived and/or modified sequence
atggccagagatctgataggccccgctctgccccctggtttcaaggccaggggaacagctgaggacgaggagcgcgacccaagccctgtggcaggccccgctttaccacctaattacaaatcctcatcaagtgattcgagcgattcggacgaggacagctcgagtctgtatgaggagggaaatcaggagagtgaggaagacgattccggccctacggcccgcaagcaaaggaagaatcaggacgacgacgacgacgatgacgatggtttctttgggcccgctctgccaccaggctttaaaaaacaagacgatagccccccaaggccaatcattggtcctgccttacctcccggctttataaagtcaacccagaaatcagacaaaggaagggacgaccctggtcagcaggagacagacagctccgaggatgaagatatcattggccccatgccagccaaaggaccggtgaattacaatgtgactactgagtttgagaagcgggcccaaaggatgaaagagaaactgactaagggagatgacgattccagtaagcctattgtgcgcgaatcgtggatgaccgagcttccaccggagatgaaagatttcggtctgggcccaagaacatttaagagacgagcggacgacacaagtggggaccggtctatctggacagatacccctgctgatcgggagcgaaaagcaaaagaaactcaggaggcccgaaaaagctcttctaagaaggacgaagagcacatcctgtcggggagagataaacggttggctgagcaggtgtcaagctacaacgagtcgaaacgctccgaaagcttgatggacatacaccacaaaaagctgaagtccaaggcagctgaggacaagaacaaaccccaggagcgcataccttttgatagggataaggacttaaaggtgaatagattcgacgaagcccagaagaaggcgctaatcaagaagtccagagaactgaacactagatttagccacgggaaaggcaacatgttcctttag

SEQ ID NO: 199075 - DNA, 1023 bp, Artificial Sequence
  derived and/or modified sequence
atggcacgggatctcatcggtccggcactgccacccggattcaaggctcggggaaccgcagaagacgaagagcgtgatccgtccccagtcgctggtcccgcacttccacccaattataaatcttcatctagcgatagctctgactccgacgaggattcatcgtctctttatgaagagggcaaccaggagtctgaggaggacgacagtggtccgacagcccgaaagcagcgcaagaatcaggacgacgatgatgacgacgacgacggcttcttcggaccggctctgcccccagggttcaaaaagcaggacgactcgccccctaggcctattataggcccagctctgcccccgggttttattaagagtacacagaagtctgacaagggacgcgatgacccaggccagcaagaaacagattcctcagaggacgaggatatcatcggcccaatgcctgccaagggtccagttaattataatgtcactaccgagtttgaaaaacgagctcagaggatgaaagaaaaactcacaaagggcgacgatgacagctcaaagcccattgttcgagaatcttggatgacagagttgccacccgaaatgaaagatttcggcctgggaccccgcacctttaaacgaagagcagatgacacatccggggacagaagcatatggacagatactcctgcagacagggagagaaaggctaaagagacacaggaggctcgaaaaagctcgtctaaaaaagatgaagagcacatcctctccggccgagacaagcgtcttgcagagcaagtttcatcgtacaatgagtctaagaggagcgagtcgctcatggacatacaccacaagaaactgaaaagtaaggctgctgaggataaaaataagccacaagaaaggattccttttgatcgtgacaaagatttgaaggtgaaccggttcgatgaggctcaaaagaaagcattgatcaaaaagtcacgggaactcaatacgagattcagtcacggaaaaggaaacatgttcttatag

SEQ ID NO: 199076 - DNA, 1023 bp, Artificial Sequence
  derived and/or modified sequence
atggcccgggacctgattggccctgccctgcccccaggcttcaaggcccggggcacagcagaagatgaggagcgggaccccagccctgtggccggccctgccctgccccccaactacaagagcagcagcagtgacagcagtgacagtgatgaggacagcagcagcctgtatgaggagggcaaccaggagagcgaggaggatgattctggccccacagccaggaagcagaggaagaaccaggatgatgatgatgatgatgatgatggcttctttggacctgccctgcccccaggcttcaagaagcaggatgacagccccccccggcccatcatcggccctgccctgcccccaggcttcatcaagagcacccagaagagtgacaagggcagagatgatcctggccagcaggagacagacagcagtgaagatgaggacatcatcggccccatgcctgccaagggccctgtgaactacaacgtgaccacagaatttgagaagagggcccagaggatgaaggagaagctgaccaagggagatgatgacagcagcaagcccatcgtgcgggagagctggatgacagagctgcccccagagatgaaggactttggcctgggccccaggaccttcaagagaagagcagatgacaccagcggggacaggagcatctggacagacaccccagctgaccgggagaggaaggccaaggagacccaggaggccaggaagagcagcagcaagaaggatgaggagcacatcctgagcggccgggacaagaggctggccgagcaggtgagcagctacaatgaaagcaagaggtctgagagcctgatggacatccaccacaagaagctgaagagcaaggctgctgaggacaagaacaagccccaggagcgcatcccctttgaccgggacaaggacctgaaggtgaacagatttgatgaggcccagaagaaggccctgatcaagaagagccgggagctgaacacccgcttcagccatggaaaaggaaacatgttcctgtag

SEQ ID NO: 199077 - DNA, 1023 bp, Artificial Sequence
  derived and/or modified sequence
atggcccgggacctgatcggccccgccctgccccccggcttcaaggccaggggcaccgctgaagatgaagaacgagatccctcgcctgtagcaggacctgctctcccccccaattataaatcttcgagttccgactccagtgactcagacgaggacagttcatccctttacgaggaaggtaaccaggaatctgaagaagacgattccggacccaccgcccgtaaacaacgtaagaaccaggacgatgacgacgatgacgacgacggatttttcggcccagcgctgccacctggttttaagaaacaggacgattctccacccagaccgattatagggcccgccctgccaccaggattcatcaagagtacgcagaaatccgataagggtcgtgatgacccgggccaacaggaaacagactcaagcgaggatgaggatattattggacccatgccagcgaagggtcctgtgaattacaatgttactactgagtttgagaaaagagcacaaagaatgaaagaaaagcttactaagggtgatgatgactcatctaaacccattgtgagagagtcctggatgaccgaactccccccagagatgaaggacttcggactgggaccaagaacatttaaacggcgcgctgacgatacatccggcgaccgttcgatttggaccgacacaccagccgatcgcgaaaggaaagccaaagagactcaggaggcacgcaaatccagcagcaaaaaggacgaggaacacattcttagcggccgcgacaagcgtctggccgagcaggtgtcaagctacaatgagtccaaaagatccgaaagtcttatggacatccatcacaagaagttaaaatccaaggcagccgaggacaagaataaaccacaagaacgcattccttttgacagggataaagacctaaaggttaataggtttgacgaggcccaaaaaaaagccctgatcaaaaaatcacgtgaattaaacacccggttcagccacggaaagggtaacatgttcttgtag

SEQ ID NO: 199078 - DNA, 1023 bp, Artificial Sequence
  derived and/or modified sequence
atggcccgggacctgatcggccccgccctgccccccggcttcaaggcaagggggacagccgaggacgaggaaagggaccccagcccggtggctggccccgctctgccacctaattacaaatcctcttcatctgattcctccgactcagatgaggactcttctagcttgtacgaagagggtaaccaggaatctgaggaggatgactctgggccaaccgctagaaaacaacgcaaaaaccaggatgacgacgatgatgacgacgacggtttcttcgggcccgcactaccccctggatttaagaaacaggatgattctccaccaagacctataattgggcctgcgctgccaccaggtttcatcaaatccacccagaaatccgataaaggacgggacgaccccggccaacaggaaacagactcatcagaagacgaagatatcattggaccaatgcctgcgaagggtccagtgaattacaatgtgacaacagagtttgagaagcgcgctcagagaatgaaggagaaactgaccaagggcgacgacgatagcagcaagcctatagttagggagtcttggatgactgaactgcctcccgaaatgaaggatttcggccttggccccaggacctttaagcggcgcgctgacgacactagcggagatagatcaatttggaccgacacaccagctgacagagagcggaaagctaaggaaacacaggaagcgcgcaagagctcttccaagaaggacgaagagcatatactgagtggtagggacaagcggcttgctgaacaggtatcctcatacaacgagtctaagcggagcgagtctctcatggacatacatcataagaagctgaaaagcaaggcagccgaggacaagaacaaaccgcaggaaagaatccccttcgatcgggataaggaccttaaagtgaacaggttcgatgaggcgcagaagaaggctttgataaagaaaagcagggagctcaatacccgcttcagccacggcaaaggaaacatgttcttatag

SEQ ID NO: 199079 - DNA, 1023 bp, Artificial Sequence
  derived and/or modified sequence
atggcgcgtgatttgataggacccgctctcccccctggatttaaggcccgtggcacagccgaagatgaagagagggatccctcgcccgtcgctggtccggctctgcctcctaattacaaatcttccagctctgacagttctgacagcgatgaagattcatcgagtctgtatgaggaggggaaccaagaatccgaggaggatgatagtgggccaaccgcaaggaaacagcgaaagaaccaggacgacgatgatgatgatgacgacgggttctttggaccagcactcccgcctggattcaagaagcaggatgatagccctccgaggccaattatagggccagccctgcccccaggcttcattaaaagcacacagaagtctgataaggggagggatgatcccggacagcaggagaccgactcttcagaggacgaggacatcatcggcccaatgccagcaaagggccctgtgaattataacgtgaccactgaattcgaaaagcgtgcccagcgcatgaaagagaaactgacgaaaggcgacgacgatagttccaaacccattgttagagagtcttggatgacggagctgccgcctgagatgaaggacttcgggcttggtccaagaacatttaaaaggagagcagatgatacatccggggacaggagtatctggacggacactcccgctgatcgggagcggaaagctaaggaaacacaggaagctaggaaatcatcatcaaagaaagacgaagagcacatactctccggcagagacaaacggctggcggaacaggtaagctcctataatgagtcaaagcgctctgaatcactgatggacattcatcataagaagctgaagtccaaggcagctgaagacaagaacaagccccaggaaaggattccctttgacagagataaggatctgaaggtgaacaggtttgacgaagcacagaagaaggcacttataaaaaagtcccgagagttgaatactagattctcccatggaaagggtaacatgttcctctag

SEQ ID NO: 199080 - DNA, 1023 bp, Artificial Sequence
  derived and/or modified sequence
atggccagagatctgatcggtccagctctgcctcctgggttcaaagcaagaggcaccgcagaagatgaggaacgtgacccgagtcccgttgctggtcccgcacttcccccaaactacaaatcaagctcttctgacagcagcgactcagacgaggattctagctcattatacgaggagggtaaccaggaaagcgaggaagacgattctggccctaccgccagaaaacaaaggaagaatcaagacgatgatgatgacgacgacgacgggttcttcggccctgcactcccgcctggcttcaagaagcaagatgactcaccccctcgcccaataattggtccggctttacccccagggttcatcaagagcacacaaaagagtgataaaggacgagacgatccagggcaacaagagactgacagcagcgaagatgaggatataatcggtccgatgcctgccaaagggccagttaattataacgttaccactgagtttgaaaagagggcgcagaggatgaaagaaaagcttaccaaaggtgacgatgatagcagtaaacctattgtccgtgaatcctggatgactgagctcccccctgagatgaaggactttggcctgggaccccgtacctttaagcgtagggccgacgatacaagcggggaccgatctatttggacggacacgccagcggatagagagcgcaaagcaaaagaaactcaggaggcccgtaaatcctccagcaagaaagacgaagagcatattctgagcggtcgggacaaacggctcgccgagcaagtttcaagttacaatgagtcaaaacgctcagaatcgttaatggacatccaccataaaaagctgaagagcaaagctgctgaagataagaataaacctcaggaacgtattccatttgatcgtgacaaagatcttaaggtgaaccgcttcgacgaggctcagaaaaaggccctgatcaaaaaaagcagagaattgaataccagatttagccacggcaaggggaacatgttcctatag

SEQ ID NO: 199081 - DNA, 4025 bp, Artificial Sequence
  derived and/or modified sequence
agactcatatctgtgaccagtgtccgccaccgcggatggcaagagacctgatcggaccggccctgccgcccggcttcaaggcccgcggaacagcggaggacgaagagcgggacccgagccctgttgcaggaccagctctgccccctaattataaaagcagtagttcagattcatcagacagcgatgaagacagtagttctttgtacgaagaaggaaatcaagaatctgaagaagatgacagtggtccaactgcaagaaaacagaggaaaaatcaggatgatgacgatgatgatgatgatgggttttttggaccagcccttcctcctggatttaaaaagcaggatgattctcctccaaggcccataataggtcctgcattgccacctggtttcattaaatctacacagaaaagtgacaagggcagagatgatccaggacaacaggaaacagacagcagtgaagatgaggatattattggaccaatgcctgcaaaaggaccagttaactataatgtaacgacagagtttgaaaaaagggcccagagaatgaaagaaaaactgaccaaaggagatgatgattcatctaaacccattgtaagagagtcatggatgactgaacttcctccagaaatgaaagactttggtcttgggccaaggacttttaagagaagagctgatgacacatctggagatcgatcaatctggacagatactccagctgatagggaaaggaaagctaaggaaacacaagaagcaaggaagtcatccagtaagaaagatgaagaacatatattatcaggaagagataagagactggctgagcaggtatcttcatacaatgaatcaaaaagatcagaatctcttatggacatacatcataaaaagttaaagagtaaggctgctgaagacaaaaataagcctcaagagagaataccatttgaccgtgataaagatctcaaggttaatcggtttgatgaagctcagaaaaaagccctaataaaaaaatctagagaactaaacaccagattttcacacggcaaaggcaatatgtttttataaggggatttccctgtgcaatgaagaaaagttgaagaatactctttgtccatctttatttctttgtttttggcttcttaagattagagattactttaatcttaaaaaacatacaaatttaccttgttctgtatgtccttttaaggtcatgtggaaacataaaacgaatgttttttatgtagaacagaatattctatgtgcctttagcttctgtggaagtatggggaattatgggcttttcttcaaataattattttaagaggcttccattccccctgatttttgtggtgtctcacaagtaccctctaaggtctggtcaggactgaccaccaaatctctaccacagcctggacctccttgtgaaatatacctaacctgccctagagtcagtgtgtcaagtccttactgtaaatccatgactttgaaatttgttgttttttccctttaaactgcagccagtgaatacaaatttacttgaaaatagagggtatggggttttgcctgttttgtaatcagtttgcttgttttagcactcagggctttttatttgttatttaattttttaattgtttttaagtcagaaagatctctgggttatctcatgtgctaaggaaaaactattttgctttttccaactttaatagttagtatttctaggggaggcaatcaagataagatatgccattaactgttagcattgtgaaatctgtaagactcaatctctgatctcaaccaaagctttctgagtcctggaactttgctttgggacaactttactttacccatttatatgctgtacttaacagtttgtagctaatttatggggtcatatcttttttttagctaatttacgggggtcatatcagtcatgaatagccttttttaaaaatttaataatccctgaatacaaaaatggaaatggaaaatttataatcataacccccctaattgggagtattataagtttgtaatgctttaagcactgcctcttaagatgataaatttataagatgagaaattctatttaaactattaaactattgttaaataaatgccaattctataagttatattttcttgcagattaatcccaattgttccactagtattctagttttgatgagacacaaatttttgttgttgtttatttttgtttttttgagagatggagtcttgctctgtcacccaggctggagtagagtggcgtgatctcagcttactgcaacctccgcctcctgggttcaagcgattctcctgcctcagtgtcccaagtagctgggactacaggcgtgcaccaccatgcctggccaagacacaaatttttaatggaaaaatattctgattcccagttcatgtaagctttatgaaaattgagtatattgtttatatgatggtacaaattattcttcctctaataatagcagtacagtatattttttccatagcatcagtgtaaaccatagcaaactaaaggagcattgctattaaaaagatgaattagctgggcgcagtggctcatacctgtaatcccagctactcaggaggctgaagcaggataattgcttgaacctaggaggcggaggttgcagtgagccaagatcacaccattgcattccagcctgggcaacaagagtgaaactccatctctaaataaataagtaaataaatagatgaatttttctcctaagcaaattgaaaaagcttcttgtgtactcaaaattgaacagagctaccttttgactaaaaatgtcatttttaatgagcagtattttctgaacacaaaattttgtacaagagtgtctccattgcattaatttaattttgttataattttttcccaatgaaaggaaaaaagtattttgtagctcctcttccttatgtaaattcttaacatatatttttgagaaatttgcattttttaaagtaaaattgttatctttggatacttacttttctttgttttcctcatttaaagagaatagggatatttctgtattatatatttactgtttcatccctcacctttggagtgaccatgaccttggcatgaaggagagaaacctctgctttccgcctattgcttccaggagttactaccttactggccttggagataatgctcttttgtgccaacctgaggataattttaacaaaatgtaaggccagtttcagaggttgttttgccccacagagagactaatcccaatacaagaatattgacaacaaaaggacaaagtagttattgcacaggacggaaaggtgtctttatttcatcccctccccacttccaaagatgcaaaaggcctaattgaatcaagtctcctttccatctggcaggagacattttaataaggactttttaatttcctacatttcttggccaagtgtcataggaatgtggcctcttttgaaatttaaaaatgaagaagaaaaaaagagcaacactaagttaatataatggagcagatacttttaatgttcttaccattgaatatgccatttaagtttgttatacttgaaattatatgatttttgtccagctctctaaattgtcatctccaatagatttagatgcttcaaatagtaaccacattactgtgataggtattattagaaaaaagttatttcttgagttacacctaagaggaagaagtaacatgatggaaagtggttggagatagcacccaattaacatcgacagccaagtcttctatttcagaatattgatttatttcgctttggcttttgatgccatcatgagatttaagtctgcagtttcaaaagctcatgctacttagatgatttttgcagcttaaaaaattgcttgtgactgcagtatgtacacagttaaaaagctgttcactgcccctttcaaccttttcattttgagctttactaagagaatgcttttaggaacagaattcctaaagtgtaattttttatgtataaataaagttttatctatatctg

SEQ ID NO: 199082 - DNA, 1393 bp, Artificial Sequence
  derived and/or modified sequence
ccgggaaacctgccattcttcgctgctgatcgcgggattctttttggatagggttgacgttcgtggatagactcatatctgtgaccagtgtccgccaccgcggatggcaagagacctgatcggaccggccctgccgcccggcttcaaggcccgcggaacagcggaggacgaagagcgggacccgagccctgttgcaggaccagctctgccccctaattataaaagcagtagttcagattcatcagacagcgatgaagacagtagttctttgtacgaagaaggaaatcaagaatctgaagaagatgacagtggtccaactgcaagaaaacagaggaaaaatcaggatgatgacgatgatgatgatgatgggttttttggaccagcccttcctcctggatttaaaaagcaggatgattctcctccaaggcccataataggtcctgcattgccacctggtttcattaaatctacacagaaaagtgacaagggcagagatgatccaggacaacaggaaacagacagcagtgaagatgaggatattattggaccaatgcctgcaaaaggaccagttaactataatgtaacgacagagtttgaaaaaagggcccagagaatgaaagaaaaactgaccaaaggagatgatgattcatctaaacccattgtaagagagtcatggatgactgaacttcctccagaaatgaaagactttggtcttgggccaaggacttttaagagaagagctgatgacacatctggagatcgatcaatctggacagatactccagctgatagggaaaggaaagctaaggaaacacaagaagcaaggaagtcatccagtaagaaagatgaagaacatatattatcaggaagagataagagactggctgagcaggtatcttcatacaatgaatcaaaaagatcagaatctcttatggacatacatcataaaaagttaaagagtaaggctgctgaagacaaaaataagcctcaagagagaataccatttgaccgtgataaagatctcaaggttaatcggtttgatgaagctcagaaaaaagccctaataaaaaaatctagagaactaaacaccagattttcacacggcaaaggcaatatgtttttataagtaagtatatttcagtgaggtatattttaatactgatcaatgtgaacttttctaaatactctattgtctttaataattgtgctgaaatctatttccttttataatagattaaaaattttatatttttataagtaaacagtgatttttgaaaagtcagccttgtgggatgaaaaatatgtcttactggaaaaatccctcataataacctaatagggcattgctattaaaaatgctaaaataaaaattcagcttatgagaaatggcaaa

SEQ ID NO: 199083 - protein, 640 aa, Artificial Sequence
  derived and/or modified sequence
MDRCKHVGRLRLAQDHSILNPQKWCCLECATTESVWACLKCSHVACGRYIEDHALKHFEETGHPLAMEVRDLYVFCYLCKDYVLNDNPEGDLKLLRSSLLAVRGQKQDTPVRRGRTLRSMASGEDVVLPQRAPQGQPQMLTALWYRRQRLLARTLRLWFEKSSRGQAKLEQRRQEEALERKKEEARRRRREVKRRLLEELASTPPRKSARLLLHTPRDAGPAASRPAALPTSRRVPAATLKLRRQPAMAPGVTGLRNLGNTCYMNSILQVLSHLQKFRECFLNLDPSKTEHLFPKATNGKTQLSGKPTNSSATELSLRNDRAEACEREGFCWNGRASISRSLELIQNKEPSSKHISLCRELHTLFRVMWSGKWALVSPFAMLHSVWSLIPAFRGYDQQDAQEFLCELLHKVQQELESEGTTRRILIPFSQRKLTKQVLKVVNTIFHGQLLSQVTCISCNYKSNTIEPFWDLSLEFPERYHCIEKGFVPLNQTECLLTEMLAKFTETEALEGRIYACDQCNSKRRKSNPKPLVLSEARKQLMIYRLPQVLRLHLKRFRWSGRNHREKIGVHVVFDQVLTMEPYCCRDMLSSLDKETFAYDLSAVVMHHGKGFGSGHYTAYCYNTEGGACALLCGVGDTERG

SEQ ID NO: 199084 - protein, 15 aa, Artificial Sequence
  derived and/or modified sequence
MDRCKHVGRLRLAQD

SEQ ID NO: 199085 - DNA, 1923 bp, Artificial Sequence
  derived and/or modified sequence
atggacagatgcaagcacgtgggcagactgagactggcccaggaccacagcatcctgaacccccagaagtggtgctgcctggagtgcgccaccaccgagagcgtgtgggcctgcctgaagtgcagccacgtggcctgcggcagatacatcgaggaccacgccctgaagcacttcgaggagaccggccaccccctggccatggaggtgagagacctgtacgtgttctgctacctgtgcaaggactacgtgctgaacgacaaccccgagggcgacctgaagctgctgagaagcagcctgctggccgtgagaggccagaagcaggacacccccgtgagaagaggcagaaccctgagaagcatggccagcggcgaggacgtggtgctgccccagagagccccccagggccagccccagatgctgaccgccctgtggtacagaagacagagactgctggccagaaccctgagactgtggttcgagaagagcagcagaggccaggccaagctggagcagagaagacaggaggaggccctggagagaaagaaggaggaggccagaagaagaagaagagaggtgaagagaagactgctggaggagctggccagcaccccccccagaaagagcgccagactgctgctgcacacccccagagacgccggccccgccgccagcagacccgccgccctgcccaccagcagaagagtgcccgccgccaccctgaagctgagaagacagcccgccatggcccccggcgtgaccggcctgagaaacctgggcaacacctgctacatgaacagcatcctgcaggtgctgagccacctgcagaagttcagagagtgcttcctgaacctggaccccagcaagaccgagcacctgttccccaaggccaccaacggcaagacccagctgagcggcaagcccaccaacagcagcgccaccgagctgagcctgagaaacgacagagccgaggcctgcgagagagagggcttctgctggaacggcagagccagcatcagcagaagcctggagctgatccagaacaaggagcccagcagcaagcacatcagcctgtgcagagagctgcacaccctgttcagagtgatgtggagcggcaagtgggccctggtgagccccttcgccatgctgcacagcgtgtggagcctgatccccgccttcagaggctacgaccagcaggacgcccaggagttcctgtgcgagctgctgcacaaggtgcagcaggagctggagagcgagggcaccaccagaagaatcctgatccccttcagccagagaaagctgaccaagcaggtgctgaaggtggtgaacaccatcttccacggccagctgctgagccaggtgacctgcatcagctgcaactacaagagcaacaccatcgagcccttctgggacctgagcctggagttccccgagagataccactgcatcgagaagggcttcgtgcccctgaaccagaccgagtgcctgctgaccgagatgctggccaagttcaccgagaccgaggccctggagggcagaatctacgcctgcgaccagtgcaacagcaagagaagaaagagcaaccccaagcccctggtgctgagcgaggccagaaagcagctgatgatctacagactgccccaggtgctgagactgcacctgaagagattcagatggagcggcagaaaccacagagagaagatcggcgtgcacgtggtgttcgaccaggtgctgaccatggagccctactgctgcagagacatgctgagcagcctggacaaggagaccttcgcctacgacctgagcgccgtggtgatgcaccacggcaagggcttcggcagcggccactacaccgcctactgctacaacaccgagggcggcgcctgcgccctgctgtgcggcgtgggcgacaccgagagaggctag

SEQ ID NO: 199086 - DNA, 1923 bp, Artificial Sequence
  derived and/or modified sequence
atggataggtgcaaacacgtgggaagacttaggcttgctcaggaccactctattttgaacccacaaaaatggtgttgtctggaatgcgccacaacagaatcagtgtgggcctgtctaaagtgtagtcacgttgcctgcgggaggtatatagaagatcatgcgctcaagcactttgaagagaccggacatccgttagcgatggaggttcgcgacttatatgtgttctgttacctgtgtaaggattatgttcttaatgataaccccgagggggatctgaagctgttacgtagctctctgctagccgtaagaggtcagaagcaggatactccagtgcgccgggggcggacactgcggagcatggcctccggcgaagatgtagtgctgccacagagagcccctcaggggcagcctcagatgttaacagccctgtggtaccgccgccagcgattgttggcaaggaccctcagactttggtttgagaaatctagcagggggcaggctaagctggagcagcggcgtcaggaggaagcacttgaaagaaagaaggaagaggctagacgcagacggagagaagtgaagaggaggctactggaagaattggcctcaactcccccacggaagagcgcccggctgctccttcacactccccgggacgctggcccagccgcctccaggccagcagctctcccaacctcgcgcagagtgccagccgccaccctgaaactccgacgacagcctgcaatggcccctggggtcactggcctacgcaacctaggcaatacctgttatatgaactccatcctgcaagttctctctcatctgcagaagtttcgtgagtgtttccttaacttagatccctccaaaaccgagcacctgttccccaaggcaacaaacggtaaaacacaattgtcaggaaaacccaccaacagcagcgctaccgagctgtctttaagaaacgatcgcgctgaggcgtgcgaacgtgagggattttgttggaatggccgggcctcgatatcacgttctttagaactgattcagaataaggagcccagctccaaacacattagcctatgtagggaactgcataccctgttccgggtgatgtggagtggaaagtgggccctggtgagccccttcgctatgctgcactccgtgtggagccttatccccgcttttaggggatatgatcagcaggatgcccaggaattcctgtgtgagctgcttcacaaggtgcagcaggaactggagagcgagggtacaacacggcggattctgataccattcagccaaagaaagctgacgaagcaggtgctgaaggtcgtgaatacaatcttccatgggcagctgctcagccaagtaacatgtatatcctgcaactacaagagtaacacaatcgaacctttctgggatctgtctttggagtttccggagcgttatcattgcattgaaaagggattcgtgcctttgaaccaaaccgaatgtctattgactgagatgttggcgaaattcaccgagaccgaggccctcgagggtcgtatttacgcttgtgatcaatgtaactccaagcggcggaaatcgaatccgaagcctcttgtactgtccgaagctcgcaagcagctcatgatctacagattgcctcaggtcctgagactgcacttaaagcgttttcggtggtcaggccgaaatcacagagagaagattggtgtacacgtcgtgttcgatcaggttctcacaatggaaccatattgttgtagggatatgctctcttccttggataaggaaaccttcgcatacgacttatccgccgtcgtgatgcaccatggcaaagggtttggaagcggacattacacagcttactgttacaacacagaggggggtgcatgtgctctgctgtgcggcgtgggcgacacggaacgtggctag

SEQ ID NO: 199087 - DNA, 1923 bp, Artificial Sequence
  derived and/or modified sequence
atggataggtgcaagcatgtgggcagactgcggctggcacaggaccactctattctgaaccctcaaaagtggtgctgtttggagtgcgctactaccgagagcgtgtgggcctgtcttaaatgttcccacgtggcttgcggccggtacatcgaggaccatgctctcaaacattttgaagagactggccaccccttagccatggaggtccgagatctgtacgtcttctgttacctgtgcaaagactatgtactgaacgataaccccgagggggaccttaagttgttgcgatcaagccttttggccgtcagaggacaaaaacaagatacaccagtgcgcaggggaagaacactgagaagcatggcaagtggcgaagacgtggtcctgccccagcgcgcgcctcagggtcaaccccagatgctcaccgccctgtggtatcggagacagagattgctcgcccgtaccctgcgcttatggtttgaaaaatctagccgcggacaggccaaactggagcaaaggcgacaggaggaagctctggaaaggaaaaaagaagaggccagaagacggcgacgtgaggtgaaaagacgtctgcttgaagagctcgcatctacacctccccgaaaatcggcacgcctgctccttcatacccccagagacgcagggcctgctgcatcccgccccgctgccctgccaacctccagacgcgtgcccgccgctacgctcaaactgcggaggcaacccgccatggctcctggggtaactgggttgcgcaacctgggcaacacgtgttatatgaacagcattctacaggtgctgtcacacctgcaaaaattcagggagtgtttccttaatctagatccgtcgaaaaccgagcatctcttcccaaaagccaccaatgggaagactcagctgagtggaaagccaaccaattcatcagcaactgagttatctctgaggaatgatcgtgccgaggcctgcgagagagagggtttctgctggaatggcagagctagcataagcagatctcttgagcttattcagaataaggagccaagcagcaaacacatcagcctgtgcagagaactgcatacccttttcagagtcatgtggtccggcaaatgggcgctcgtaagccctttcgctatgttacactcggtctggagtctcatccctgccttccgcggatacgatcagcaggacgcccaggagtttctctgtgagctgctgcacaaagtgcagcaggagctagaaagtgagggcaccaccagaagaatcctcattcccttctctcagaggaagctgaccaaacaggtgttgaaagtggtgaacacaatctttcacggacagctcctaagccaggtgacatgcataagttgtaattataaatcaaacaccatcgagcctttctgggacctctctttagaatttcctgaacggtaccactgtatagaaaaaggatttgtaccactgaatcagacggagtgtctcctgacggagatgctcgccaagttcaccgagacagaagcgctggaagggaggatctatgcctgcgatcaatgtaattccaaaaggcgaaagagcaatcctaaaccactggttcttagcgaagctcgaaaacaacttatgatataccgtttgccgcaagtgttacgccttcatctgaaacggttcagatggtccggtcgaaatcatagggagaagattggcgtgcatgttgtgttcgaccaagtcttgactatggagccttattgctgtcgagacatgctttcaagtctggacaaggagacttttgcatacgatctctctgcggtggttatgcatcacggcaagggcttcgggtcgggacactacaccgcctactgttacaatactgagggtggcgcctgtgccctgttatgtggtgtgggagacaccgagcgtggctag

SEQ ID NO: 199088 - DNA, 1923 bp, Artificial Sequence
  derived and/or modified sequence
atggaccgctgcaagcacgtgggccgcctgcggctggcccaggaccacagcatcctgaacccccagaagtggtgctgcctggagtgtgccaccacagagagcgtgtgggcctgcctgaagtgcagccacgtggcctgtggccgctacattgaagatcatgccctgaagcactttgaggagaccggccaccccctggccatggaggtgcgggacctgtatgtgttctgctacctgtgcaaggactatgtgctgaatgacaaccctgagggggacctgaagctgctgcggagcagcctgctggccgtgcggggccagaagcaggacacccctgtgcggcggggccgcaccctgcgctccatggccagcggggaggatgtggtgctgccccagagggccccccagggccagccccagatgctgacagccctgtggtaccgccggcagaggctgctggcccggaccctgcggctgtggtttgagaagagcagccggggccaggccaagctggagcagaggcggcaggaggaggccctggagaggaagaaggaggaggccaggagaagaagaagagaggtgaagaggcggctgctggaggagctggccagcaccccacccaggaagagcgcccggctgctgctgcacaccccaagagatgctggccctgctgccagcaggcctgctgccctgcccaccagcagaagagtgcctgctgccaccctgaagctgcggcggcagcctgccatggcccctggggtgacaggcctgaggaacctgggcaacacctgctacatgaacagcatcctgcaggtgctgagccacctgcagaagttccgggagtgcttcctgaacctggaccccagcaagacagagcacctgttccccaaggccaccaacgggaagacccagctgagcggcaagcccaccaacagcagcgccacagagctgagcctgagaaatgacagagctgaggcctgtgagcgggagggcttctgctggaatggccgggccagcatcagccgcagcctggagctgatccagaacaaggagcccagcagcaagcacatcagcctgtgccgggagctgcacaccctcttccgggtgatgtggagcggcaagtgggccctggtgagcccctttgccatgctgcacagcgtgtggagcctcatcccagccttccggggctatgaccagcaggatgcccaggagttcctgtgtgagctgctgcacaaggtgcagcaggagctggagagcgagggcaccacccggcgcatcctgatccccttcagccagaggaagctgaccaagcaggtgctgaaggtggtgaacaccatcttccacggccagctgctgagccaggtgacctgcatcagctgcaactacaagagcaacaccatcgagcccttctgggacctgagcctggagttccctgagcgctaccactgcatcgagaagggctttgtgcccctgaaccagacagaatgtctgctgacagagatgctggccaagttcacagaaacagaggccctggagggccgcatctatgcctgtgaccagtgcaacagcaagaggaggaagagcaaccccaagcccctggtgctgtctgaggccaggaagcagctgatgatctaccgcctgccccaggtgctgcggctgcacctgaagcgcttccgctggagcggcaggaaccaccgggagaagattggagtgcacgtggtgtttgaccaggtgctgaccatggagccctactgctgccgggacatgctgagcagcctggacaaggagacctttgcctatgacctgtctgctgtggtgatgcaccacggcaaaggatttggaagtggccactacacagcctactgctacaacacagaaggaggagcctgtgccctgctgtgtggggtgggggacacagagcggggctag

SEQ ID NO: 199089 - DNA, 1923 bp, Artificial Sequence
  derived and/or modified sequence
atggaccggtgcaagcacgtgggccggctgcggctggcccaggaccactccatccttaaccctcagaaatggtgctgtcttgaatgtgctacgacagaatccgtttgggcatgcctgaaatgctcccacgtcgcgtgcggacgttacatcgaggatcacgcgctgaagcacttcgaggagactgggcaccctctggccatggaggtgcgggatttatatgtgttctgctatctttgcaaagactatgtcctgaatgataatcctgagggcgacctgaagcttctgcggagtagtctgctggcagtcaggggtcagaagcaggacacccccgtaaggcgtgggcgaaccttaaggagcatggcctcaggggaagatgtcgtgctgccacaaagagccccgcagggccaaccacagatgctgactgctttgtggtacagacgacagagactgttggctcggactctgaggctgtggttcgagaagtcttctcgtgggcaagctaaattggagcaaagaaggcaagaggaggccctggaaaggaagaaggaagaagcccggcgcaggcgcagagaggtgaaaagaagactgctcgaggaactcgcctcaacgccgccccgcaaaagtgccagactcctactccacaccccccgagacgccgggccggccgcatctcggccggctgctctccctacgagccgtcgtgtgccagccgccacacttaagcttcggcggcagccggccatggcgccaggcgtgacaggcctccggaacctgggcaacacctgttatatgaacagtatcctccaggtgctgtcacacctccaaaagtttagagaatgttttctgaatttggacccatccaagactgaacacctcttccccaaggctacaaatggtaaaacgcagcttagcgggaagcctaccaattcatcggccactgagttgagcctccgtaatgacagagcagaggcgtgcgagcgcgagggcttttgctggaacggccgggccagcatcagccgatcactagagcttattcagaataaggaaccatccagcaaacatatttcactgtgtagggagctgcacacattgttccgcgtcatgtggtccggaaaatgggccctcgtatcccccttcgcaatgctacatagcgtgtggtctctgatccctgcttttcgcggctatgatcagcaggacgcacaggagtttctgtgcgagctgctgcacaaggtccagcaagagcttgagtccgaggggaccacaaggcgcatactcataccatttagtcagaggaaactcactaagcaggtgctgaaagtggtgaacaccatttttcatggacagctcctgtcgcaagtaacctgcatttcttgtaattacaaatccaatacaatcgagcctttttgggatctgtccctggagtttcctgaacggtaccactgtatagagaaagggttcgttcccctgaatcagacggaatgccttttgaccgaaatgttggcaaagttcacagagactgaggccctggaaggacgtatatacgcctgtgaccagtgcaattccaaaaggcgaaagtctaaccctaaaccacttgtgttgtccgaggcacgcaaacaactgatgatctacaggcttccgcaagtgctgaggcttcatcttaagagattccgttggtcaggacgcaaccaccgggaaaagataggtgtccacgtggtgttcgatcaggtgttaaccatggagccctactgctgcagggacatgttgagctctctggataaggagaccttcgcctacgatctatccgctgttgtcatgcatcacggaaaaggtttcggtagcgggcattacacagcttactgttataataccgagggcggggcgtgtgccctattgtgcggtgtcggcgacacagagcgtggatag

SEQ ID NO: 199090 - DNA, 1923 bp, Artificial Sequence
  derived and/or modified sequence
atggaccggtgcaagcacgtgggccggctgcggctggcccaggaccattctattctgaatccccagaagtggtgctgtctggagtgtgccaccacagaatctgtgtgggcttgtctcaagtgtagccacgtggcgtgcggacgatacattgaagatcatgctttgaaacatttcgaggagaccggccatccgcttgcgatggaggtgagagatctgtatgtgttctgctacctgtgcaaagactacgtgttgaatgataatcctgaaggagatctgaagctgctgcgctcatcactcctcgccgttaggggccagaaacaagacacccccgtccggcgcggcaggactctgcgaagcatggcttcaggtgaagacgtagttttgccacagcgggcaccgcaggggcaaccccagatgttgacagccctgtggtacaggaggcagcggttgcttgcacgtaccttgagactgtggtttgagaagtccagtcgcggtcaggctaagttggaacaacgaaggcaggaggaagccctggaaagaaaaaaggaggaggctagacggcgccgcagggaagtcaaacggcgactgctggaagagctggcaagtactccgccaaggaaatccgctaggcttcttttgcacaccccacgcgacgccggtcccgccgctagccgtccagcagccctgccgacatcaagacgggtcccagctgccacactgaaactgaggcggcaaccagctatggctcctggcgtgacagggctccgcaatttgggaaatacttgctacatgaatagcattctccaagtgctgtcccatctgcagaaatttagagaatgttttctgaatctcgacccaagcaagacagagcatcttttccccaaagcaacaaacggtaaaactcagctcagcgggaagcccaccaacagttcagccactgaactgtcactgaggaacgatagagccgaggcatgtgaaagagaaggtttctgttggaatgggagagcaagtatctcccggtctctcgagctcattcaaaacaaagagccttcctccaagcacatctcactttgtcgagaactccacactctcttccgcgtgatgtggtctggaaaatgggcactagtgtctccattcgcaatgctgcactcagtctggtccttgatccctgctttccgagggtatgatcagcaggacgcccaggagttcctgtgtgagctcctgcataaggtccagcaagagcttgaatccgagggcactactcgtagaatactaattcctttctcacagaggaagctgacgaaacaggtactgaaggtcgtgaataccatattccacggccagttgttgagccaggtcacatgcataagttgtaactataaatccaatacaatcgagccattttgggacttatcactcgaatttcccgagagataccactgtatagaaaaggggttcgtgcccttaaatcagaccgagtgtttgctcacagagatgttggcaaaattcacggaaactgaagccctcgaggggcggatatacgcgtgcgaccagtgcaatagcaagagaagaaaatccaaccccaagcctcttgtgctcagcgaagcccgaaaacagctgatgatatatcggctgccacaggtgctccgactgcacctgaagcgatttaggtggtccggtagaaatcatcgggaaaagataggcgtgcatgtggtgtttgaccaggttttaaccatggaaccctactgttgccgcgacatgctctcctctcttgataaagagaccttcgcctacgacctgtccgcggtcgtgatgcaccacggtaagggtttcggctcaggccattataccgcctattgctataacactgaaggaggagcctgcgccttactttgcggcgtgggtgatactgagcggggctag

SEQ ID NO: 199091 - DNA, 1923 bp, Artificial Sequence
  derived and/or modified sequence
atggataggtgtaaacacgtgggccgtcttcgccttgcacaagatcacagcatcctcaatcctcagaaatggtgctgcttggaatgtgccaccacagagtccgtctgggcatgcttaaaatgcagtcacgtcgcttgcgggagatacatcgaagatcatgcactgaagcattttgaggagactggtcaccccctggccatggaagtgagagacttatatgttttctgttacctgtgcaaagattacgttctgaatgacaatcccgagggagatctcaaacttctgaggagcagtttgctagcagtgcgcggtcaaaaacaagataccccggtgagaaggggcagaacattgcgatcaatggcctctggcgaggacgtcgtactgcctcagagggccccacagggccagcctcagatgctgaccgccctctggtatcgcagacaacggttgctggcaagaaccctgcgcctgtggttcgaaaagtccagccggggacaggccaaactagagcagcgacgtcaggaggaggcactcgagcgaaaaaaagaggaggcacggagacggagacgcgaggtgaaaagaaggttgctggaagaactcgctagcacgcccccacgcaagtccgcccgactcttacttcataccccaagggacgcaggcccagccgcatcacgcccagcagctcttcctacttctagacgcgttccggctgcaacactcaaactccggaggcaacccgctatggccccaggcgtgacaggcctacgcaacctgggcaacacctgctacatgaattccattctgcaggtgctgagccatttacagaagtttcgggagtgcttcttgaatctcgatccctccaaaactgaacatctcttccctaaagcaacaaatggtaagacgcagctgagcggaaaaccaactaactcgagcgcaaccgagctgtcgctccgaaacgaccgagccgaagcatgtgagcgcgaggggttttgctggaatgggagagcgtcaatcagccggtccctcgagctgattcagaacaaggaaccctccagcaaacacataagcctctgccgcgaattacacactttgtttagggttatgtggtccggtaagtgggccctagtgagccccttcgctatgctccattcggtgtggtctctgataccagcctttaggggctatgatcaacaggatgcacaggaatttctctgtgaacttttgcataaagtccagcaggagcttgagtctgagggaaccacgcgacgcatcctgatccccttctcacaaaggaaactgactaagcaagttctgaaagtggtaaatacaatctttcacgggcaactgctgtcccaggtgacctgtatatcttgtaactataaaagcaacactatcgaaccgttttgggacctctctctggaattccccgaacgataccattgcatagaaaaaggctttgtcccgttgaatcagacagagtgtttgcttaccgagatgctggccaagtttaccgagacagaggccctggaaggaaggatctatgcttgtgatcagtgcaattctaaacggcgtaagagcaaccctaagcctcttgtgctgtcagaggcaaggaagcagctcatgatctaccggctcccccaggtgctgaggttgcacctaaaacgcttcagatggagtggcaggaaccatcgtgagaaaattggcgtgcacgtggtatttgatcaggtgctgaccatggagccttattgctgccgagacatgctatcctctctggacaaggaaacctttgcttatgatttgtctgcagttgtaatgcaccatgggaaagggttcggttcaggccactatacggcctattgctacaacacagaaggaggagcttgtgccctgctgtgtggggtaggggacactgaaagaggctag

SEQ ID NO: 199092 - DNA, 1923 bp, Artificial Sequence
  derived and/or modified sequence
atggacagatgcaaacatgtgggtcgcctaaggttagcccaagaccattccatcctgaacccccagaagtggtgctgtctggagtgcgccaccacggaatcagtttgggcttgccttaaatgttctcacgtggcctgcggaagatatattgaggatcacgcactcaaacactttgaggagacgggacaccctctcgcgatggaggtgcgggacctatatgttttttgttacttgtgtaaagattacgtcctcaacgacaacccagagggagacctgaagttactgcgatccagcctgctggctgtgcgcggacaaaaacaggacactcctgtgcggcgagggaggaccttaaggtccatggccagcggcgaagacgtcgtgttaccacaacgcgctccgcaaggccaaccacagatgctgaccgctctgtggtatcgaaggcagcggcttctggccaggacgttgaggctgtggttcgagaaatcatcacgaggacaagcaaagctagagcagaggcgccaggaggaagccctggaaaggaagaaagaggaggccaggcgcagaaggagggaagtcaagaggcgcttgcttgaggaactggcgagcaccccccctcgcaaatctgcacggttacttctccatacacctagggatgccggtccagctgcatccagacctgccgctttgcctacatcccgtcgagtaccagctgcgaccttgaagctgcgcaggcaacccgcaatggctcctggtgtgaccggccttcggaacttgggcaatacatgctatatgaactccattctgcaggtattgtcccacttacagaaatttcgcgagtgtttccttaaccttgatccctccaagactgagcacttgttccctaaggccaccaacgggaaaacccagttgagcgggaagccaaccaactctagtgccactgagttgtcactccgtaacgacagagcggaagcttgcgaacgagaaggcttctgttggaacggtcgggcaagtatttcacgatccctggaacttattcaaaacaaagaaccatccagcaagcacatatccctgtgtagggaactgcacaccctcttcagagtgatgtggtcaggtaaatgggccctggttagtcccttcgccatgctgcattctgtgtggagcttaattccagcatttaggggctacgaccagcaggacgcccaggagtttctctgcgagctcctacataaggtgcagcaggaacttgagagcgaaggcacaactcggcgaatcttgatcccttttagtcagcgcaagctgacaaagcaggtcttaaaggtggtgaatacaatctttcacggacagctcctatcacaagtgacgtgcatcagctgtaattacaaatccaataccattgaacctttttgggatttgtccctagagttcccggaaaggtatcattgcattgagaaaggcttcgtgcccctaaaccagaccgagtgtctcctcactgagatgctggcaaaattcaccgaaaccgaagccctggagggcagaatatacgcatgcgaccagtgcaactccaaaagacgcaaatccaatccaaaaccactggtactgagtgaggccagaaaacagctaatgatttatcggctgcctcaggtcctgagactccatttaaaacgttttagatggtccggccgtaatcaccgggagaaaatcggcgtgcacgtggtcttcgatcaggtcttgaccatggagccatattgctgtcgggacatgctgtcttctctggacaaggagaccttcgcgtacgatctgtctgcagtggtgatgcatcacggcaaaggctttggcagcgggcactacaccgcgtactgctacaacacggaggggggagcatgcgcccttctgtgcggcgtcggtgatacagaacgcggatag

SEQ ID NO: 199093 - DNA, 3062 bp, Artificial Sequence
  derived and/or modified sequence
ttgtaggtaatagagaagaggaaacctaaccaatgactgtggaataatatggaagaagatggaaaaaacttgtttaatgggttgagaaagtggcgacttctataagacatggatagatgcaaacatgtagggcggttacggctcgcccaggaccactccatcctgaaccctcagaagtggtgctgcttagagtgtgccaccaccgagtccgtgtgggcctgcctcaagtgctcccacgtggcctgcggccgctatattgaggaccacgccctgaaacactttgaggagacgggacacccgctagccatggaagtccgggatctctacgtgttctgttacctgtgcaaggactacgtgctcaatgataacccagagggggacctgaagctgctaagaagctccctcctggcggtccggggccagaaacaggacacgccggtgagacgtgggcggacgctgcggtccatggcttcgggtgaggacgtggtcctgccgcagcgcgctcctcagggacagccgcagatgctcacggctctgtggtaccggcgtcagcgcctgctggccaggacgctgcggctgtggttcgagaagagctcccggggccaggcgaagctggagcagcggcggcaggaggaggccctggagcgcaagaaggaggaggcgcggaggcggcggcgcgaggtgaaacggcggctgctggaggagctggccagcacccctccgcgcaagagtgcacggctgctcctgcacacgccccgcgacgcgggcccggctgcctcgcgccccgccgccctccctacctcacgcagagtgcccgccgccacactcaagctgcgtcgccagccggccatggccccaggcgtcacgggcctgcgcaacctgggcaacacctgctacatgaactccatcctccaggtgctcagccacctccagaagttccgagaatgtttcctcaaccttgacccttccaaaacggaacatctgtttcccaaagccaccaacgggaagactcagctttctggcaagccaaccaacagctcggccacggagctgtccttgagaaatgacagggccgaggcatgcgagcgggagggcttctgctggaacggcagggcctccattagtcggagtctggagctcatccagaacaaggagccgagttcaaagcacatttccctctgccgtgaactgcacaccctcttccgagtcatgtggtccgggaagtgggccctagtgtcgcccttcgccatgctccactcagtgtggagcctgatccctgccttccgcggctacgaccaacaggacgcgcaggaatttctctgcgagctgctgcacaaggtgcagcaggaactcgagtctgagggcaccacacgccggatcctcatccccttctcccagaggaagctcaccaaacaggtcttaaaggtggtgaataccatatttcatgggcagctgctcagtcaggtcacatgtatatcatgcaattacaaatccaataccattgagcccttttgggacctatccctggaattccctgaacgctatcactgcatagaaaaggggtttgtccctttgaatcaaacagagtgcttgctcactgagatgctggccaaattcacagagacagaggccctggaagggagaatctacgcttgtgaccagtgtaacagcaaacgacgaaaatccaatcccaaaccccttgttctgagtgaagctagaaagcagttaatgatctacagactacctcaggttctccggctgcaccttaaaagattcaggtggtctggccgtaatcatcgagagaagattggggtccatgtcgtctttgaccaggtattaaccatggaaccttactgctgcagggacatgctctcctctcttgacaaagagacctttgcctatgatctctccgcagtggtcatgcatcacgggaaagggtttggctcaggacactacacagcctattgctacaacacagagggaggtgcgtgcgctttactctgtggggtgggggacacggaaaggggttgatttgtccacattttattgttttccttttatttccatcccatggattacctagagggaaattacatacatcaaaaatccagtggaaagaattgtgaaaattgggttgggcgccgtggctcacacctgtaatcctagcgctttgggaggccgcggtgggtggatcacctgaggtcaggagttcgagaccagcctggccaacatggttaaaccccgtctctactaaaatagtacaaaaattagccgggcgtggtggtgggcactggtaatcccaggtactcaagaggctgaggcaggagaatcgcttgaacctgggaggcagaggttgcagtgagccaagattatgccactgcacttcagcctgggtgacagagcaagactcttatctcaaaaaaaataaaaagaattatgaaagttggattcaaattttgggtatattactaagtaacaacatatggttgttctaagaattaaaaggaactgacatgtaaaagtgcttagaacaggacctaggccctgtgcaatggctcacacctgtaattccaacactttgggaggcagaggcgggaggattgcttgaggccgagggttcaagactagcctgggcaacatagcgagactgcatctctacaaaaaatttaaaaattatccaggtgtaatggtgtgcacctgtgatcctagctacttgggaggctgaggtgggagaattgctcaagcccaggagtttgaagttgcaatgagctatgatttcaccactgcattctagcctgggcaacagagtgagatcctgactcaaataaataaataagaagagcagttgcctaccacatagtacttattcagtcagtgttagaggatattgtagtattatcaaaagtattggttattgataatattactgttttgtggtaatgctacttctgcacaccccagtttccttcttggttatgcagaaacagtagaacctgtgtaacctcaaggagatattgtatgaatctcactagccgcagcttataataaagccgagaacattt

SEQ ID NO: 199094 - DNA, 3177 bp, Artificial Sequence
  derived and/or modified sequence
cgcgccctggtgacagctcgcgcgtgctgatgatggcgattctttggatgggaagagaccttgaaaggacctctagtttatcctgcaactccagtcaatatcccacttaaatcattccaggtaatagagaagaggaaacctaaccaatgactgtggaataatatggaagaagatggaaaaaacttgtttaatgggttgagaaagtggcgacttctataagacatggatagatgcaaacatgtagggcggttacggctcgcccaggaccactccatcctgaaccctcagaagtggtgctgcttagagtgtgccaccaccgagtccgtgtgggcctgcctcaagtgctcccacgtggcctgcggccgctatattgaggaccacgccctgaaacactttgaggagacgggacacccgctagccatggaagtccgggatctctacgtgttctgttacctgtgcaaggactacgtgctcaatgataacccagagggggacctgaagctgctaagaagctccctcctggcggtccggggccagaaacaggacacgccggtgagacgtgggcggacgctgcggtccatggcttcgggtgaggacgtggtcctgccgcagcgcgctcctcagggacagccgcagatgctcacggctctgtggtaccggcgtcagcgcctgctggccaggacgctgcggctgtggttcgagaagagctcccggggccaggcgaagctggagcagcggcggcaggaggaggccctggagcgcaagaaggaggaggcgcggaggcggcggcgcgaggtgaaacggcggctgctggaggagctggccagcacccctccgcgcaagagtgcacggctgctcctgcacacgccccgcgacgcgggcccggctgcctcgcgccccgccgccctccctacctcacgcagagtgcccgccgccacactcaagctgcgtcgccagccggccatggccccaggcgtcacgggcctgcgcaacctgggcaacacctgctacatgaactccatcctccaggtgctcagccacctccagaagttccgagaatgtttcctcaaccttgacccttccaaaacggaacatctgtttcccaaagccaccaacgggaagactcagctttctggcaagccaaccaacagctcggccacggagctgtccttgagaaatgacagggccgaggcatgcgagcgggagggcttctgctggaacggcagggcctccattagtcggagtctggagctcatccagaacaaggagccgagttcaaagcacatttccctctgccgtgaactgcacaccctcttccgagtcatgtggtccgggaagtgggccctagtgtcgcccttcgccatgctccactcagtgtggagcctgatccctgccttccgcggctacgaccaacaggacgcgcaggaatttctctgcgagctgctgcacaaggtgcagcaggaactcgagtctgagggcaccacacgccggatcctcatccccttctcccagaggaagctcaccaaacaggtcttaaaggtggtgaataccatatttcatgggcagctgctcagtcaggtcacatgtatatcatgcaattacaaatccaataccattgagcccttttgggacctatccctggaattccctgaacgctatcactgcatagaaaaggggtttgtccctttgaatcaaacagagtgcttgctcactgagatgctggccaaattcacagagacagaggccctggaagggagaatctacgcttgtgaccagtgtaacagcaaacgacgaaaatccaatcccaaaccccttgttctgagtgaagctagaaagcagttaatgatctacagactacctcaggttctccggctgcaccttaaaagattcaggtggtctggccgtaatcatcgagagaagattggggtccatgtcgtctttgaccaggtattaaccatggaaccttactgctgcagggacatgctctcctctcttgacaaagagacctttgcctatgatctctccgcagtggtcatgcatcacgggaaagggtttggctcaggacactacacagcctattgctacaacacagagggaggtgcgtgcgctttactctgtggggtgggggacacggaaaggggttgatttgtccacattttattgttttccttttatttccatcccatggattacctagagggaaattacatacatcaaaaatccagtggaaagaattgtgaaaattgggttgggcgccgtggctcacacctgtaatcctagcgctttgggaggccgcggtgggtggatcacctgaggtcaggagttcgagaccagcctggccaacatggttaaaccccgtctctactaaaatagtacaaaaattagccgggcgtggtggtgggcactggtaatcccaggtactcaagaggctgaggcaggagaatcgcttgaacctgggaggcagaggttgcagtgagccaagattatgccactgcacttcagcctgggtgacagagcaagactcttatctcaaaaaaaataaaaagaattatgaaagttggattcaaattttgggtatattactaagtaacaacatatggttgttctaagaattaaaaggaactgacatgtaaaagtgcttagaacaggacctaggccctgtgcaatggctcacacctgtaattccaacactttgggaggcagaggcgggaggattgcttgaggccgagggttcaagactagcctgggcaacatagcgagactgcatctctacaaaaaatttaaaaattatccaggtgtaatggtgtgcacctgtgatcctagctacttgggaggctgaggtgggagaattgctcaagcccaggagtttgaagttgcaatgagctatgatttcaccactgcattctagcctgggcaacagagtgagatcctgactcaaataaataaataagaagagcagttgcctaccacatagtacttattcagtcagtgttagaggatattgtagtattatcaaaagtattggttattgataatattactgttttgtggtaatgctacttctgcacaccccagtttccttcttggttatgcagaaacagtagaacctgtgtaacctcaaggagatattgtatgaatctcactagccgcagcttataataaagccgagaacattta

SEQ ID NO: 199095 - DNA, 752 bp, Artificial Sequence
  derived and/or modified sequence
attctgtaaagtgagggagggcaaatgagacctggactggaaccaggtggagtcaggaataagagtgtggtggaagggcgaaaggaaacagataagagatgggtgtctgtaggacgattctgggaccagaagagctgaaaggagactagagttagggtgtaagaagtgatggccatctgggacaaggataactgggtaattacgttaattgaagaggttcagcaagatccaaggtgaaaacagtgaggtaaagagacagggctaaaagcaaatggtgagaggagcaggaagagatgggccccagaatttaaaggatgagatggggagtaagggaagagagggggctaagagaagctgggggagtcctgatggatgtagaactggggtagactgcaggggggtgggaatcgaatgtgcgtgttatggggagttgctccagaaggtctgcaagggtcagggcagaaatgctgtagtgaaagatcaagtgtaagagagcctttggtgcagaagacgaggaaccatgattctttggatgggaagagaccttgaaaggacctctagtttatcctgcaactccagtcaatatcccacttaaatcattccaggtaatagagaagaggaaacctaaccaatgactgtggaataatatggaagaagatggaaaaaacttgtttaatgggttgagaaagtggcgacttctataagacatggatagatgcaaacatgtagggcggttacggctcgcccaggac

SEQ ID NO: 199096 - DNA, 553 bp, Artificial Sequence
  derived and/or modified sequence
atttgtgtgttttttcctgagtttcagattgtatgcaaatataatgtgtaatttttaagacctaaaacaaatgcagaagtgctttttttcaggaagtaaacctttaatacttccatttgtagatcagtctacccataagtgactgactctttggttactcttagctgaaaagaaagatcacagttttttttttactcttacatcagttttaaggacttgtagggagtttaatgcattgtaatttactggtccttttttgaatttgtattacaattaatgaaattgcttttttcttgccatgtattagcccaatcttacagattgtttcccacttgtaggtaatagagaagaggaaacctaaccaatgactgtggaataatatggaagaagatggaaaaaacttgtttaatgggttgagaaagtggcgacttctataagacatggatagatgcaaacatgtagggcggttacggctcgcccaggaccactccatcctgaaccctcagaagtggtgctgcttagagtgtgccaccaccgagtccgtgtgggcctg

SEQ ID NO: 199097 - protein, 302 aa, Artificial Sequence
  derived and/or modified sequence
MGNCCWTQCFGLLRKEAGRLQRVGGGGGSKYFRTCSRGEHLTIEFENLVESDEGESPGSSHRPLTEEEIVDLRERHYDSIAEKQKDLDKKIQKELALQEEKLRLEEEALYAAQREAARAAKQRKLLEQERQRIVQQYHPSNNGEYQSSGPEDDFESCLRNMKSQYEVFRSSRLSSDATVLTPNTESSCDLMTKTKSTSGNDDSTSLDLEWEDEEGMNRMLPMRERSKTEEDILRAALKYSNKKTGSNPTSASDDSNGLEWENDFVSAEMDDNGNSEYSGFVNPVLELSDSGIRHSDTDQQTR

SEQ ID NO: 199098 - DNA, 909 bp, Artificial Sequence
  derived and/or modified sequence
atggggaactgctgctggacccagtgttttgggcttctgaggaaagaggctggccgactgcagagggtaggcggcggcggaggcagtaaatacttcaggacctgttcaaggggggagcacctgactatcgaattcgagaatctggtggagagcgatgaaggagagtcacccggatctagtcatcgccctctgactgaggaggagatcgtcgatttgcgcgagcgccattatgattcgattgctgagaagcaaaaggacctggacaaaaagatccaaaaagaacttgccctgcaagaggagaagctgcggttggaggaagaagccctgtatgccgcacagcgggaagcagctcgcgctgctaaacagaggaagctgcttgaacaagagcgtcagcgcattgttcagcagtaccacccgagcaataatggagaatatcagagtagcggccctgaggacgattttgaaagctgtctaagaaatatgaagtcccagtacgaggtctttcgttcaagtagactgagcagcgacgccacagtgcttacaccgaatacagaaagttcgtgcgacctgatgacaaagactaaatccacatctgggaacgacgactctacttccctagatcttgagtgggaagatgaagaaggcatgaatcggatgttgcctatgagagaacggagtaaaaccgaagaggacatcctgagagctgctcttaaatactcgaacaagaaaacagggagtaatcccaccagcgccagtgatgactccaatggtctggagtgggagaacgattttgtgtccgctgagatggatgataacggcaactccgagtactctggcttcgtgaatccggtgctagagctgagcgattccggcatccggcacagtgacactgaccaacaaactcgatag

SEQ ID NO: 199099 - DNA, 909 bp, Artificial Sequence
  derived and/or modified sequence
atgggcaactgctgctggacccagtgcttcggcctgctgaggaaggaggccggccgcctgcagagggtgggcggcggcggcggcagcaagtacttccgcacctgcagcagaggagagcacctgaccattgaatttgagaacctggtggagagtgatgaaggagagagccctggcagcagccaccggcccctgacagaggaggagatcgtggacctgcgggagcggcactatgacagcattgctgagaagcagaaggacctggacaagaagatccagaaggagctggccctgcaggaggagaagctgcggctggaggaggaggccctgtatgctgcccagcgggaggccgcccgggccgccaagcagaggaagctgctggagcaggagcggcagagaattgtgcagcagtaccaccccagcaacaacggggagtaccagagcagcggcccagaagatgactttgagagctgcctgaggaacatgaagagccagtatgaggtgttccgcagcagccggctgagcagtgatgccaccgtgctgacccccaacacagagagcagctgtgacctgatgaccaagaccaagagcaccagcggaaatgatgacagcaccagcctggacctggagtgggaggatgaggagggcatgaacaggatgctgcccatgagggagaggagcaagacagaggaggacatcctgcgggccgccctgaagtacagcaacaagaagacaggcagcaaccccaccagcgccagtgatgacagcaatggcctggagtgggagaatgactttgtgtctgctgagatggatgacaatggaaattctgagtacagcggctttgtgaaccctgtgctggagctgagtgacagcggcatccgccacagcgacacagaccagcagaccaggtag

SEQ ID NO: 199100 - DNA, 909 bp, Artificial Sequence
  derived and/or modified sequence
atgggcaactgctgctggacccagtgcttcggcctgctgcggaaggaggctggtcggctacagagggtggggggggggggagggtccaaatatttccgcacatgttcccgcggagagcatttgactatcgagttcgaaaacctggtggaatctgacgagggcgagtcacctgggtcttctcatcgtccactgacagaggaagagattgtggatctgcgggaacggcattatgacagtatcgcagagaaacagaaggatttggataagaagatccaaaaggagcttgcccttcaggaagagaaactgagactggaagaagaggctctctacgcagcgcagcgagaggcggcaagagccgctaaacagaggaagctgcttgagcaggaaagacagagaattgtccagcagtaccaccccagtaacaatggcgaatatcaatcctcgggccctgaagacgacttcgagtcctgcttacgtaacatgaagagtcaatacgaagtgtttcgaagcagccggttgagctctgacgccactgtgttgaccccaaacacagagtcctcttgcgatctgatgaccaaaaccaagagtacctctgggaatgacgatagcacatccttagatctggagtgggaagacgaggagggtatgaatcggatgcttcccatgcgagagaggtctaaaacggaagaggatatcctccgtgctgcactcaagtactcaaataaaaaaaccggatctaatccaacttccgccagcgacgacagcaacgggctcgagtgggagaacgattttgttagtgccgagatggacgacaacgggaacagtgagtattccggctttgttaatcccgtgctggaactgagtgactctggcattagacactcggataccgaccagcagacacggtag

SEQ ID NO: 199101 - DNA, 909 bp, Artificial Sequence
  derived and/or modified sequence
atgggaaactgttgttggacccagtgtttcggccttctgcgaaaggaggccggacgacttcagcgtgtgggcggagggggaggcagcaagtattttcgcacctgtagcaggggagagcacttgacgattgagttcgagaacctggtagagtcggacgaaggcgagagtcctgggtcctcccataggcctttaaccgaggaggagatcgttgatctcagagaacgccactacgacagtattgctgagaaacagaaagatctggacaaaaagatccagaaagagctggccttacaggaagagaagttaagactggaagaagaggctctatacgctgcacagcgcgaagccgcacgtgctgcgaaacaacggaaactgctggagcaagagcggcaacgcattgtgcagcagtaccacccgtctaacaacggggagtatcagagttccggccctgaggatgactttgaatcatgcctccgtaacatgaagtcacagtatgaggtctttaggagctcacgcctgtcatccgacgccaccgtgcttacacctaataccgaaagcagctgtgatctgatgaccaaaaccaagagtacgtctggaaacgatgattctacctccctggatttagagtgggaagacgaagagggcatgaacaggatgctcccaatgagagagaggtccaagactgaggaggatattctacgcgcagccctgaaatatagtaacaagaagacaggctcaaatcccaccagcgcctcagatgactccaatggtctggagtgggagaacgatttcgtgagtgccgagatggacgacaacgggaatagtgagtattcaggctttgtcaatccggtgctcgaactgtcagattcagggatccggcattctgataccgatcagcaaacccgatag

SEQ ID NO: 199102 - DNA, 2902 bp, Artificial Sequence
  derived and/or modified sequence
agggtgctcggctcgcggggactggcctccttcggcagctggaggcggtcactcacgctgggctaggagctgaggcgagaagggccatgcggacggcgagggagtccagagccttgagcccggtgctcctccctcgcgcagcggtggctctgcggccgctggagtaaacactgcctttgttccctagcgcctcgtctttcgtcgccccgtgccctcacgccgccgggctctggccggcccgccctcggtccttgaaccccatttcggctcgtgccgtgcggatgcagctgccgggcctgggtttgggcattgagcgggaggaggaggaggagcggcggcgcctgggcggcatgcgatggggaactgctgctggacgcagtgcttcggactgcttcgcaaggaagcggggcggctgcagcgagtaggcggcggcggaggatccaagtattttagaacatgctcaagaggtgagcacttaacaatagagtttgagaatctagtagaaagtgatgaaggggagagcccaggaagcagtcataggcctcttactgaggaagaaattgttgacctaagagaaaggcattatgattccattgccgaaaaacaaaaagatcttgataagaaaattcaaaaagagttagccttacaagaagagaagttaagactagaagaagaagctttatacgctgcacagcgtgaagcagccagggcagcaaagcagcgaaagctcttggagcaagaaaggcagagaattgtgcagcaatatcatccttccaacaatggagaatatcaaagttcaggaccagaagatgacttcgaatcttgtttgagaaatatgaagtcacagtatgaagtttttcgaagtagtagactctcatcagatgctacagttttgacaccaaatacagaaagcagttgtgatttaatgaccaaaactaaatcaactagtggaaatgacgacagcacatccttagatctagagtgggaagatgaagaaggaatgaatagaatgcttccaatgagagaacgttccaaaacagaggaagacattctacgggcagcacttaagtatagcaacaagaagactggaagtaatcctacatcagcctctgatgattccaatgggctggagtgggaaaatgattttgttagtgccgaaatggatgataatggaaattccgagtattctggatttgtaaatcctgtattagaactgtctgattctggcataaggcattctgacacagatcaacagactcgatagggtaaaattgtgtgaccttgtttatcagttatgaccaaatgttaaaaaccaactagaatgtataagtgattgtgcttagcctttttgtaagggagatgtgtaagaaaccatgttgtaaatgcttattttattacaaaggagtagggatgataggatctgaattgatacagaattaagtgcaatttcatcatctgccttctgcttttcaagaccaatttaatggtcctgtcatgttactgattaaatttactttgtcttgtctttatagcatttctgtttactatggtagatttccactttcaatttttaaaattaattttactttgaatgatttatgaagcctatttcattgtctaactatgaaaatattaagacttttttgttaattctcagccgatgtgaaggaagcatgaggagggatcgtcagattcagatttagaatagtgttcccgtttccagcattatttatttctatgacttctttggattttattatctaatagtaagtacagttgatgtgggtagatgactctaagaaatgctgaagtatcggcattacatgtgtttatttacatgtcctagtatgataatgttgattcaatctgaacaaaagataatataaaaataacccttcagagtttggacatttcaagttggtaataataaaaaataatatttaagaagatatatatatatatatatttagttttttccacttcattttacatgccactatattgactttaattgatatacagtattaagtttttaggtgccattatttttaaaaaattctatatttccaatgaacgatgttagattttacacagaacatattctctgcatgatttcagaaaagaaaatctaaaaaggtaatacgggtatttcaaataaaatcctttctggtatgaaaggctccattgattttattaagccttcctttaccttgtagtacaaggtgctttaatgggatagaactaagcatatcaatatctataactgcattttgtgctagacaattactgttcttttctctaaaatgtatatgtcaatttacaaggccagggatagaaaacactccataattgctttccttgattttgctgaggatttggtatgattttagtaagcaaactgttttttggtttttccttaatgtttttaattttttttcctcttgcaacaatgacggtgcatgttcttataaatataggaaggtccagatataaatagtaacctaaagttcttgctgtgcttaaaaaaaaaaatcatgtggccctttcaatatttgaactgctaagcaatgacatctgtagttttatctccttttttatgtcatagaaattaatatgatactttaaatatgtaaatataatacattaggtaatgctattatttatatctgtcttaacataatttaagttgtagctgtgtcttggaaatatttttaaggtaatctatattcacattgcctgtgttaatgctttttaaagtttgtatacatcagatgtatatttttggtttggcataagctacgattgtaatttttcttggctttttgttcataaagaattttttgaaggaatggtaacaaatggtaatttacaaatggttgtgaataaacacatttttacactt

SEQ ID NO: 199103 - DNA, 909 bp, Artificial Sequence
  derived and/or modified sequence
atgggcaactgctgctggacccagtgcttcggcctgctgagaaaggaggccggcagactgcagagagtgggcggcggcggcggcagcaagtacttcagaacctgcagcagaggcgagcacctgaccatcgagttcgagaacctggtggagagcgacgagggcgagagccccggcagcagccacagacccctgaccgaggaggagatcgtggacctgagagagagacactacgacagcatcgccgagaagcagaaggacctggacaagaagatccagaaggagctggccctgcaggaggagaagctgagactggaggaggaggccctgtacgccgcccagagagaggccgccagagccgccaagcagagaaagctgctggagcaggagagacagagaatcgtgcagcagtaccaccccagcaacaacggcgagtaccagagcagcggccccgaggacgacttcgagagctgcctgagaaacatgaagagccagtacgaggtgttcagaagcagcagactgagcagcgacgccaccgtgctgacccccaacaccgagagcagctgcgacctgatgaccaagaccaagagcaccagcggcaacgacgacagcaccagcctggacctggagtgggaggacgaggagggcatgaacagaatgctgcccatgagagagagaagcaagaccgaggaggacatcctgagagccgccctgaagtacagcaacaagaagaccggcagcaaccccaccagcgccagcgacgacagcaacggcctggagtgggagaacgacttcgtgagcgccgagatggacgacaacggcaacagcgagtacagcggcttcgtgaaccccgtgctggagctgagcgacagcggcatcagacacagcgacaccgaccagcagaccagatag

SEQ ID NO: 199104 - protein, 418 aa, Artificial Sequence
  derived and/or modified sequence
MSLLDCFCTSRTQVESLRPEKQSETSIHQYLVDEPTLSWSRPSTRASEVLCSTNVSHYELQVEIGRGFDNLTSVHLARHTPTGTLVTIKITNLENCNEERLKALQKAVILSHFFRHPNITTYWTVFTVGSWLWVISPFMAYGSASQLLRTYFPEGMSETLIRNILFGAVRGLNYLHQNGCIHRSIKASHILISGDGLVTLSGLSHLHSLVKHGQRHRAVYDFPQFSTSVQPWLSPELLRQDLHGYNVKSDIYSVGITACELASGQVPFQDMHRTQMLLQKLKGPPYSPLDISIFPQSESRMKNSQSGVDSGIGESVLVSSGTHTVNSDRLHTPSSKTFSPAFFSLVQLCLQQDPEKRPSASSLLSHVFFKQMKEESQDSILSLLPPAYNKPSISLPPVLPWTEPECDFPDEKDSYWEF

SEQ ID NO: 199105 - protein, 280 aa, Artificial Sequence
  derived and/or modified sequence
LGYCSASQLLRTYFPEGMSETLIRNILFGAVRGLNYLHQNGCIHRSIKASHILISGDGLVTLSGLSHLHSLVKHGQRHRAVYDFPQFSTSVQPWLSPELLRQDLHGYNVKSDIYSVGITACELASGQVPFQDMHRTQMLLQKLKGPPYSPLDISIFPQSESRMKNSQSGVDSGIGESVLVSSGTHTVNSDRLHTPSSKTFSPAFFSLVQLCLQQDPEKRPSASSLLSHVFFKQMKEESQDSILSLLPPAYNKPSISLPPVLPWTEPECDFPDEKDSYWEF

SEQ ID NO: 199106 - DNA, 1257 bp, Artificial Sequence
  derived and/or modified sequence
atgagcctgctggactgcttctgcaccagcagaacccaggtggagagcctgagacccgagaagcagagcgagaccagcatccaccagtacctggtggacgagcccaccctgagctggagcagacccagcaccagagccagcgaggtgctgtgcagcaccaacgtgagccactacgagctgcaggtggagatcggcagaggcttcgacaacctgaccagcgtgcacctggccagacacacccccaccggcaccctggtgaccatcaagatcaccaacctggagaactgcaacgaggagagactgaaggccctgcagaaggccgtgatcctgagccacttcttcagacaccccaacatcaccacctactggaccgtgttcaccgtgggcagctggctgtgggtgatcagccccttcatggcctacggcagcgccagccagctgctgagaacctacttccccgagggcatgagcgagaccctgatcagaaacatcctgttcggcgccgtgagaggcctgaactacctgcaccagaacggctgcatccacagaagcatcaaggccagccacatcctgatcagcggcgacggcctggtgaccctgagcggcctgagccacctgcacagcctggtgaagcacggccagagacacagagccgtgtacgacttcccccagttcagcaccagcgtgcagccctggctgagccccgagctgctgagacaggacctgcacggctacaacgtgaagagcgacatctacagcgtgggcatcaccgcctgcgagctggccagcggccaggtgcccttccaggacatgcacagaacccagatgctgctgcagaagctgaagggccccccctacagccccctggacatcagcatcttcccccagagcgagagcagaatgaagaacagccagagcggcgtggacagcggcatcggcgagagcgtgctggtgagcagcggcacccacaccgtgaacagcgacagactgcacacccccagcagcaagaccttcagccccgccttcttcagcctggtgcagctgtgcctgcagcaggaccccgagaagagacccagcgccagcagcctgctgagccacgtgttcttcaagcagatgaaggaggagagccaggacagcatcctgagcctgctgccccccgcctacaacaagcccagcatcagcctgccccccgtgctgccctggaccgagcccgagtgcgacttccccgacgagaaggacagctactgggagttctag

SEQ ID NO: 199107 - DNA, 843 bp, Artificial Sequence
  derived and/or modified sequence
ctgggctactgcagcgccagccagctgctgagaacctacttccccgagggcatgagcgagaccctgatcagaaacatcctgttcggcgccgtgagaggcctgaactacctgcaccagaacggctgcatccacagaagcatcaaggccagccacatcctgatcagcggcgacggcctggtgaccctgagcggcctgagccacctgcacagcctggtgaagcacggccagagacacagagccgtgtacgacttcccccagttcagcaccagcgtgcagccctggctgagccccgagctgctgagacaggacctgcacggctacaacgtgaagagcgacatctacagcgtgggcatcaccgcctgcgagctggccagcggccaggtgcccttccaggacatgcacagaacccagatgctgctgcagaagctgaagggccccccctacagccccctggacatcagcatcttcccccagagcgagagcagaatgaagaacagccagagcggcgtggacagcggcatcggcgagagcgtgctggtgagcagcggcacccacaccgtgaacagcgacagactgcacacccccagcagcaagaccttcagccccgccttcttcagcctggtgcagctgtgcctgcagcaggaccccgagaagagacccagcgccagcagcctgctgagccacgtgttcttcaagcagatgaaggaggagagccaggacagcatcctgagcctgctgccccccgcctacaacaagcccagcatcagcctgccccccgtgctgccctggaccgagcccgagtgcgacttccccgacgagaaggacagctactgggagttctag

SEQ ID NO: 199108 - DNA, 1257 bp, Artificial Sequence
  derived and/or modified sequence
atgagccttttagactgcttttgtacttcccgcacgcaggtagagtcactgagaccagagaagcagtccgaaacgtcgatccatcagtacctggtagacgaaccgacgctgtcctggtctcgcccatctactagagcctcggaggttttgtgctccaccaatgtgagtcactatgagctgcaggtcgaaattgggcgaggttttgacaatctgacctctgtgcacttggcaaggcacacaccaaccggaactcttgtcactatcaagataaccaatctggaaaattgcaacgaggagcgcctcaaggcgctgcagaaagccgtcattctatcacacttttttaggcaccctaatattaccacttattggacagtgttcaccgtgggatcctggctttgggtcatatccccttttatggcctatgggtccgctagtcaactgctgcgtacatacttccccgaaggaatgagcgaaactttgataagaaatatactgtttggtgccgtgagaggcctgaactacctgcaccagaatgggtgtatccatcgaagtataaaagcaagccatattctcatatcaggagacgggctggtgaccttgagcggcctgtctcatctgcactcgttggttaagcatgggcagaggcacagggctgtgtatgactttccgcagttctccacatcagttcaaccgtggctatctcctgaacttctccgccaggatctccatggatataatgtcaagtccgacatatatagtgtgggcatcacagcctgcgagctggcgtctgggcaggtgccctttcaggatatgcaccggacacaaatgctcctgcagaagctgaaaggcccaccttacagtcctctggatatctcaatcttcccccagtctgaatcaagaatgaagaacagtcagtcgggtgtggactctggcattggagagagtgtgcttgtgtcctcaggcactcacacggttaactcagataggttgcataccccgtccagcaagactttttcccctgccttcttctcactcgtgcaactgtgcttgcagcaggatcctgagaaaagaccatccgcctccagtctgttgtctcacgttttcttcaaacagatgaaggaggagagtcaggacagtatcctgagcctactcccacctgcttataataagcccagtatatccctgccacctgttttgccatggactgaacccgagtgtgactttcctgacgaaaaggattcatactgggagttttag

SEQ ID NO: 199109 - DNA, 843 bp, Artificial Sequence
  derived and/or modified sequence
ctcggctactgcagcgcatcacaattgctccgcacttactttcctgaaggtatgagtgaaacgctcatcaggaatatccttttcggagctgttagaggactgaattacctgcatcagaacggatgtattcaccggtccatcaaggcttctcacatcctcatttctggcgacgggcttgtcaccctgagcggtttgagccatctgcacagtttggtgaaacacggccagaggcacagagctgtgtacgatttcccccagttttccacatcagtgcaaccatggctaagtcctgagctgctccgccaggatctgcacggctacaatgtgaagtcagacatttactcagtgggtattaccgcctgtgagctggcttctgggcaggtgcccttccaggatatgcatagaactcaaatgttgctccagaagttaaagggacctccttattctccactagatataagtatcttcccacagagcgaaagcaggatgaaaaattcccagagtggagtcgacagtgggattggcgagagcgtgcttgtgtcaagcgggacccacactgttaattccgacaggctgcacacaccctccagtaaaacattcagcccagcattcttcagcctggtccagttatgcttacagcaggaccccgaaaaacgaccatctgcatcctcattgctgtcccatgtattttttaaacagatgaaagaggaatctcaggattccatactgagccttttaccacctgcctataataaacccagtattagtcttccccctgtccttccatggactgaaccggagtgtgattttcctgacgagaaggacagttactgggagttctag

SEQ ID NO: 199110 - DNA, 1257 bp, Artificial Sequence
  derived and/or modified sequence
atgagtctgctcgactgcttttgcaccagccgaactcaagtggagtccctcagacctgagaaacagtccgaaacctctatccatcagtacctggtggatgagcctaccctatcctggtcccgcccctccacccgcgcttcagaggtgctgtgctctacaaatgtaagccactacgaactgcaagtggaaattggtcgtgggttcgataatcttacttcagtgcacttggctcgccatacacccactggaacccttgtcactattaaaattacgaatcttgagaactgtaatgaagagaggctcaaggccctgcagaaagcagtgattctgagtcactttttccggcaccccaatattaccacttattggaccgtttttacagtaggctcttggctctgggtgatctctccattcatggcctacgggagtgcctctcagctcttgaggacatacttccctgagggcatgtctgaaacccttatccgaaatatcctttttggcgctgttcgtggacttaactatctgcaccagaatggatgtatacacagatctatcaaagctagccacatcttgatctctggcgacggtctggtcacactgagcgggctttcgcatctgcactctcttgttaagcacggccagcggcatagggctgtgtacgactttcctcagttttctacaagtgtgcaaccgtggctcagccctgagctgctgcgtcaagacctccatggttacaacgtaaagtctgacatttactctgtggggatcaccgcttgcgaactggccagcgggcaggtgccctttcaggatatgcatagaacccagatgctcttgcaaaaactcaaaggacctccatattccccgctggatatatcgattttcccacagagcgaaagtcggatgaaaaactcgcagagtggcgtcgattcaggcattggggagtccgtgctggtttccagtggaacgcataccgtgaacagcgaccgactccacactccctctagtaagacattctcaccagcattttttagccttgtccagctctgtcttcaacaagaccccgagaagagacctagtgcctcaagtttgctgtctcacgtcttctttaaacaaatgaaggaagagagccaagattctatacttagcttattgcctccggcctacaacaagccgagtatctcactgccgcccgttctaccctggaccgaacccgagtgcgacttcccagacgaaaaggattcatactgggagttctag

SEQ ID NO: 199111 - DNA, 1257 bp, Artificial Sequence
  derived and/or modified sequence
atgagcctgctggactgcttctgcaccagcaggacccaggtggagagcctgcggcctgagaagcagagcgagaccagcatccaccagtacctggtggatgagcccaccctgtcctggagccggcccagcacccgggccagcgaggtgctgtgcagcaccaacgtgagccactatgagctgcaggtggagatcggccggggctttgacaacctgacctctgtgcacctggcccggcacacccccaccggcaccctggtgaccatcaagatcaccaacctggagaactgcaatgaggagcggctgaaggccctgcagaaggctgtgatcctgagccacttcttccgccaccccaacatcaccacctactggacagtgttcaccgtgggctcctggctgtgggtgatcagccccttcatggcctacggcagcgccagccagctgctgcggacctacttccctgagggcatgtctgagaccctcatccggaacatcctgtttggagctgtgcggggcctgaactacctgcaccagaatggctgcatccacaggagcatcaaggccagccacatcctgatctctggagatggcctggtgaccctgagcggcctgagccacctgcacagcctggtgaagcacggccagaggcacagagctgtgtatgacttcccccagttcagcacctctgtgcagccctggctgagccctgagctgctgcggcaggacctgcacggctacaacgtgaagagtgacatctacagcgtgggcatcacagcctgtgagctggccagcggccaggtgcccttccaggacatgcacaggacccagatgctgctgcagaagctgaagggccccccctacagccccctggacatcagcatcttcccccagagcgagagcaggatgaagaacagccagagcggcgtggacagcggcatcggggagagcgtgctggtgagcagcggcacccacacagtgaacagcgaccggctgcacacccccagcagcaagaccttcagccctgccttcttcagcctggtgcagctgtgcctgcagcaggaccctgagaagaggccttctgccagcagcctgctgagccacgtgttcttcaagcagatgaaggaggagagccaggacagcatcctgagcctgctgcccccagcctacaacaagcccagcatcagcctgccccctgtgctgccctggacagagccagaatgtgacttcccagatgagaaggacagctactgggagttctag

SEQ ID NO: 199112 - DNA, 843 bp, Artificial Sequence
  derived and/or modified sequence
ctgggctactgcagcgccagccagctgctgcggacctacttccctgagggcatgtctgagaccctcatccggaacatcctgtttggagctgtgcggggcctgaactacctgcaccagaatggctgcatccacaggagcatcaaggccagccacatcctgatctctggagatggcctggtgaccctgagcggcctgagccacctgcacagcctggtgaagcacggccagaggcacagagctgtgtatgacttcccccagttcagcacctctgtgcagccctggctgagccctgagctgctgcggcaggacctgcacggctacaacgtgaagagtgacatctacagcgtgggcatcacagcctgtgagctggccagcggccaggtgcccttccaggacatgcacaggacccagatgctgctgcagaagctgaagggccccccctacagccccctggacatcagcatcttcccccagagcgagagcaggatgaagaacagccagagcggcgtggacagcggcatcggggagagcgtgctggtgagcagcggcacccacacagtgaacagcgaccggctgcacacccccagcagcaagaccttcagccctgccttcttcagcctggtgcagctgtgcctgcagcaggaccctgagaagaggccttctgccagcagcctgctgagccacgtgttcttcaagcagatgaaggaggagagccaggacagcatcctgagcctgctgcccccagcctacaacaagcccagcatcagcctgccccctgtgctgccctggacagagccagaatgtgacttcccagatgagaaggacagctactgggagttctag

SEQ ID NO: 199113 - DNA, 1257 bp, Artificial Sequence
  derived and/or modified sequence
atgagcctgctggactgcttctgcaccagccggacccaggtggagtcactgaggccagagaagcagagtgagaccagcatacaccagtacctagttgacgagcccacactttcatggagcaggccttctactcgcgcatctgaagtactctgtagcacaaacgtgtcacactacgagcttcaagtggaaatcggcaggggcttcgataatttgaccagtgtgcatttagcccgacatacccctaccggcaccctagtgactataaaaataaccaacctagagaattgtaacgaagagaggctgaaggcacttcagaaggccgtgatcttgagccacttcttccgccatcctaacattacaacttattggacggtgtttactgttggaagctggttgtgggtgatttctccttttatggcgtacggttctgctagccagctcctcagaacctatttccctgaaggtatgtccgaaacactgataaggaatattctgtttggagctgttaggggcctaaattatctgcaccagaacgggtgcattcacagaagcattaaagctagccacatcctgatcagtggtgacggtctggttactctgtccggtctctcccatctccattccttggtgaaacatggacagagacacagggcggtatatgatttcccgcagttcagcacctctgtgcaaccgtggctgagtccggaactgctaagacaggacctgcatggatacaacgtcaagtcagacatctatagcgtaggtatcacagcatgcgagctggcttcaggacaagtgccctttcaagacatgcatcgcactcaaatgttgctccagaagcttaagggaccaccatactccccgctggacatcagcatattccctcagtccgaaagtcgtatgaagaattcccaaagcggggtggactctggcatcggagaatccgtgctcgtgagcagtgggacccacaccgtgaattccgaccggctgcacaccccctcaagcaaaaccttcagccccgccttcttcagcctcgtgcagctgtgcctccagcaggaccccgagaagcggccttctgccagttcgcttctcagtcacgtcttttttaaacagatgaaggaagaaagccaggactccatactctcgctgttgcctcccgcctacaacaagccttctatatccctgccccccgtactcccctggactgaacccgaatgtgacttcccagacgaaaaggattcatactgggagttttag

SEQ ID NO: 199114 - DNA, 843 bp, Artificial Sequence
  derived and/or modified sequence
ctgggctactgcagcgccagccagctgctgcggacctacttccccgaaggtatgtctgaaacccttatacgcaatattctcttcggagcagtcagaggccttaactacctacaccaaaacgggtgcatccataggtcaatcaaggcatctcacatcctgatctccggcgacgggctcgtcaccctctctgggctgtcccacctacactccctcgtaaagcatggacagcgacatagggctgtgtacgatttcccgcagttctccacaagtgtccagccttggctgtcgcccgagctactgcgccaggacctgcatgggtacaatgtcaagtctgacatttactctgtgggcatcacggcttgtgagctggctagcgggcaggtcccatttcaagacatgcaccgaacccagatgctcctacagaagctgaagggccccccgtattcccctttagacatttccatcttccctcagtctgagagtaggatgaagaattcccagtccggggtcgattcgggcattggcgagtccgtgctggtgtcatctggcacccacaccgtgaatagcgaccggctgcataccccctcaagtaaaacttttagtcctgctttcttctccttggttcagctctgcctgcagcaggacccagagaaaaggccctcagcatcctctttactcagccacgtgttcttcaagcagatgaaggaagaatctcaggacagcattctttcacttcttcccccagcatacaataagccgtctatttcccttcctccagtgctcccttggaccgaaccagaatgtgatttccccgacgagaaggacagttattgggagttctag

SEQ ID NO: 199115 - DNA, 1257 bp, Artificial Sequence
  derived and/or modified sequence
atgagcctgctggactgcttctgcaccagccggacccaggtggagtcgctgcggcccgagaaacaaagcgagacctctatacaccaatacctcgtggacgaaccgacacttagttggagtcgaccttctaccagggcttccgaggtactgtgcagtacaaatgtgtcccattatgaacttcaggttgagatcgggagggggttcgacaatctgacatcggtccatctggctcggcatacccctacaggcactttagtgacaatcaagatcaccaacctagagaattgcaacgaggagcggctgaaggcgctacagaaggcggtgattctcagccatttctttcgccatcctaatattaccacatattggacggtgtttactgttggaagttggctctgggttatttcgcccttcatggcatatggtagcgcatctcaactgttgaggacatacttcccagaggggatgtccgagactctgataaggaatattctgtttggagcggtgagaggcctgaattatctccatcagaacggatgtattcaccgcagtatcaaggcctctcatatcctgatatccggcgatgggctggtgaccctttccggcctcagccacctgcactcactggtcaagcacggacagaggcaccgtgcggtgtacgactttccacagttctctacctctgtgcagccctggctgagtcccgagctgcttcgacaggacctgcacgggtacaatgtcaagtccgatatttacagtgttggcataactgcatgtgaactggcctctggacaggtgcccttccaggatatgcatagaacccagatgctgttgcagaagctgaaaggacctccttactctccactggatatcagcatctttccacagtcagaatcacggatgaaaaacagccagtcaggtgtagattctggcattggggaatctgttctggtgtctagcggaacacacacagttaactccgatcgcctgcataccccgtctagcaagaccttttcccctgcatttttttcccttgttcagctttgtctccagcaagaccctgagaagagaccctctgctagctcccttttatctcatgtcttcttcaaacagatgaaggaggagagccaggacagcattcttagcctgctgccccccgcgtacaataaaccatccatcagcctgccacccgttctgccttggactgagcccgagtgcgacttcccagatgaaaaagactcatactgggagttctag

SEQ ID NO: 199116 - DNA, 1257 bp, Artificial Sequence
  derived and/or modified sequence
atgagtctgcttgattgtttttgcacttcccgcacgcaggtggagtcattgagaccggaaaaacagtctgagactagtatccatcagtatttggttgacgaacctactttgtcatggtcgcgcccaagcaccagagcctctgaggtgctgtgtagcactaacgtttcacattatgagcttcaggtggaaatcgggaggggcttcgataacctcacaagtgtgcacttggccagacacacccctactggcaccctggtgacaatcaaaatcaccaacctggaaaactgcaatgaagagagattgaaggcacttcaaaaggctgttattctcagccacttcttccggcatccaaatatcaccacgtactggaccgttttcacagtgggctcctggctttgggttataagcccgttcatggcttatggctcagcgtcccagcttttaaggacctactttccagagggaatgagcgaaactctgatccggaatatccttttcggcgctgtgcgaggactaaattatcttcaccagaatggatgcattcacagatcaatcaaagccagccatattttgatctctggggatggacttgtcacattatccggcctcagccacctgcacagtttagttaagcacggccagcgccaccgggctgtatacgacttcccccagtttagcacgtctgtgcaaccatggctgtcacccgagcttttgcgtcaggaccttcacgggtataatgtcaagtcagatatttacagcgttggcattaccgcgtgtgagctggcctccggccaagttccattccaggacatgcatcggacacagatgctcctgcagaagctgaaagggccaccctatagcccattggacatttctatcttccctcagtccgagtctaggatgaagaatagccagagcggagtggactccgggatcggggaaagtgttctggtgtcctcgggaacccacacggtgaatagcgataggctccatactccttctagcaagacattctcgcccgctttcttctctttagtacagctctgcctgcagcaggaccccgagaagagaccatccgcttccagcctgcttagccatgtgttctttaaacaaatgaaagaggagtcccaagattctattctgtcgctgttgccccctgcttataataagcctagcatctcacttccccctgtgctcccatggacagaacccgagtgcgattttcctgatgagaaagatagttactgggagttttag

SEQ ID NO: 199117 - DNA, 843 bp, Artificial Sequence
  derived and/or modified sequence
ctcggatattgttccgcatcccaactcctccgcacctatttccctgaagggatgtctgaaacactgattcggaacatcttgttcggcgcagtcagggggcttaattacctccatcagaatggttgtattcaccgctccataaaggccagccatattttaataagcggagacgggttagtcactctttctggcctctctcaccttcatagcctggtaaagcacggccaacgtcacagagccgtctacgacttcccgcagttctctacatccgtccagccctggctgtctcctgagctccttaggcaggacctccacgggtacaatgtaaaaagcgacatctacagcgtaggaatcaccgcttgtgaattagcatcaggccaggtgccattccaggacatgcataggacccagatgcttctgcagaaactcaaaggccctccgtactctccgttggacatatcaattttccctcagtccgaaagtaggatgaagaactcccagagtggggtggatagcggaatcggggagtctgtattggtgagctccgggacacacaccgtcaactcagaccggctgcacacaccatcatctaaaacgtttagccctgcctttttttcactggtacagctttgtctgcaacaagatcccgaaaaacggccttccgcttctagcttgctgagccacgtgttcttcaagcagatgaaagaagaatcccaagattctatattgagtctattgcctcccgcttacaataaaccatctatctcgctgccccctgtactgccgtggaccgaacccgaatgcgacttccccgacgagaaggacagctactgggaattttag

SEQ ID NO: 199118 - DNA, 1257 bp, Artificial Sequence
  derived and/or modified sequence
atgagcctgctggattgcttttgcaccagccgtacccaagtggaaagcctccggcctgagaaacagagtgaaaccagtatccatcagtatctcgttgatgagccaaccttgagctggagtcggccaagtacgcgtgcatccgaggtcctgtgttctacaaacgtgtctcattatgagctgcaggttgagatcggaagaggttttgacaatctgacaagcgtccacctcgccaggcacactcccacaggcactctcgtgactatcaagatcaccaatctcgagaattgtaatgaggaacggctcaaagcactccagaaggccgtcatcttgtctcatttctttagacacccaaatatcaccacatattggaccgtgttcaccgtggggagctggctgtgggtgatcagtccttttatggcctatggttcggcaagtcagcttcttagaacgtacttccccgaaggcatgtcagaaacactaattaggaatattttattcggggcagtgagggggctcaattacctgcaccaaaacgggtgtattcatcggtctatcaaggcaagccatatcttaatatctggcgacggattagtgacactctccggcttaagccatttgcacagtctggtaaagcatggccaaagacaccgcgctgtttatgactttcctcagtttagtactagtgtgcagccttggttatccccagagctgctgcgccaggatctccacggctataacgtaaagagtgacatatatagcgttggaattacggcctgtgagctggcgtccgggcaagtgccgttccaggatatgcatcggacccagatgctgctccagaagttaaaaggcccaccatacagccctctcgacatcagcatattcccacaaagcgagtcaaggatgaaaaatagccagtccggcgtggacagtggcatcggagagtcagtgctggtgagctcaggaactcacactgtcaacagcgacaggctgcatacgcccagtagtaaaaccttcagccctgcattcttctccttggtgcaactctgcttgcaacaagaccctgagaaaagaccttctgctagttctctgctctctcacgtgttcttcaagcaaatgaaggaagaatctcaggactccattcttagcctccttccccctgcctataacaagcctagcatctctctccctccggtgctgccatggacagagcctgagtgtgactttcctgacgagaaagacagctactgggaattttag

SEQ ID NO: 199119 - DNA, 2293 bp, Artificial Sequence
  derived and/or modified sequence
ccccgccttctcgctgcccagccccggggagggaggcggggccgcgaccccggcgcgggtggggcgaatgcgttcccagcgggtagcctgggactggtgcagagttccaagcccacggccccggtcgcggcctcgccgccctcccgcgccccgcgccgggagcgggcctagagcgctcgcctcgcccctccgcgagcagggctctggcgcccgcccctgtccgcaccgctggcagcctgaagagagtcgctggccgtggtcgccgctaggtaggatatatctgcatcttgaaaggaagataaaacaaaagccttctttggaatagatggatttttgtcactttctgtgtgaactaaagtgattcaatgtctcttttggattgcttctgcacttcaagaacacaagttgaatcactcagacctgaaaaacagtctgaaaccagtatccatcaatacttggttgatgagccaaccctttcctggtcacgtccatccactagagccagtgaagtactatgttccaccaacgtttctcactatgagctccaagtagaaataggaagaggatttgacaacttgacttctgtccatcttgcacggcatactcccacaggaacactggtaactataaaaattacaaatctggaaaactgcaatgaagaacgcctgaaagctttacagaaagccgtgattctatcccactttttccggcatcccaatattacaacttattggacagttttcactgttggcagctggctttgggttatttctccatttatggcctatggttcagcaagtcaactcttgaggacctattttcctgaaggaatgagtgaaactttaataagaaacattctctttggagccgtgagagggttgaactatctgcaccaaaatggctgtattcacaggagtattaaagccagccatatcctcatttctggtgatggcctagtgaccctctctggcctgtcccatctgcatagtttggttaagcatggacagaggcatagggctgtgtatgatttcccacagttcagcacatcagtgcagccgtggctgagtccagaactactgagacaggatttacatgggtataatgtgaagtcagatatttacagtgttgggattacagcatgtgaattagccagtgggcaggtgcctttccaggacatgcatagaactcagatgctgttacagaaactgaaaggtcctccttatagcccattggatatcagtattttccctcaatcagaatccagaatgaaaaattcccagtcaggtgtagactctgggattggagaaagtgtgcttgtctccagtggaactcacacagtaaatagtgaccgattacacacaccatcctcaaaaactttctctcctgccttctttagcttggtacagctctgtttgcaacaagatcctgagaaaaggccatcagcaagcagtttattgtcccatgttttcttcaaacagatgaaagaagaaagccaggattcaatactttcactgttgcctcctgcttataacaagccatcaatatcattgcctccagtgttaccttggactgagccagaatgtgattttcctgatgaaaaagactcatactgggaattctagggctgccaaatcattttatgtcctatatacttgacactttctccttgctgctttttcttctgtatttctaggtacaaataccagaattatacttgaaaatacagttggtgcactggagaatctattatttaaaaccactctgttcaaaggggcaccagtttgtagtccctctgtttcgcacagagtactatgacaaggaaacatcagaattactaatctagctagtgtcatttattctggaatttttttctaagctgtgactaactctttttatctctcaatataatttttgagccagttaatttttttcagtattttgctgtcccttgggaatgggccctcagaggacagtgcttccaagtacatcttctcccagattctctggcctttttaatgagctattgttaaaccaacaggctagtttatcttacatcagacccttttctggtagagggaaaatgtttgtgctttccctttttcttctgttaatacttatggtaacacctaactgagcctcactcacattaaatgattcacttgaaatatatacagaaattgtaatttgcttttttttaaacaagggggctaaagtaacactttcctacttatgtaaattatagatcctaaattcacgcaccccgtgggagctcaataaagatttactgaattga

SEQ ID NO: 199120 - DNA, 2190 bp, Artificial Sequence
  derived and/or modified sequence
cggcctcgccgccctcccgcgccccgcgccgggagcgggcctagagcgctcgcctcgcccctccgcgagcagggctctggcgcccgcccctgtccgcaccgctggcagcctgaagagagtcgctggccgtggtcgccgctaggtaggatatatctgcatcttgaaaggaagataaaacaaaagccttctttggaatagatggatttttgtcactttctgtgtgaactaaagtgattcaatgtctcttttggattgcttctgcacttcaagaacacaagttgaatcactcagacctgaaaaacagtctgaaaccagtatccatcaatacttggttgatgagccaaccctttcctggtcacgtccatccactagagccagtgaagtactatgttccaccaacgtttctcactatgagctccaagtagaaataggaagaggatttgacaacttgacttctgtccatcttgcacggcatactcccacaggaacactggtaactataaaaattacaaatctggaaaactgcaatgaagaacgcctgaaagctttacagaaagccgtgattctatcccactttttccggcatcccaatattacaacttattggacagttttcactgttggcagctggctttgggttatttctccatttatggcctatggttcagcaagtcaactcttgaggacctattttcctgaaggaatgagtgaaactttaataagaaacattctctttggagccgtgagagggttgaactatctgcaccaaaatggctgtattcacaggagtattaaagccagccatatcctcatttctggtgatggcctagtgaccctctctggcctgtcccatctgcatagtttggttaagcatggacagaggcatagggctgtgtatgatttcccacagttcagcacatcagtgcagccgtggctgagtccagaactactgagacaggatttacatgggtataatgtgaagtcagatatttacagtgttgggattacagcatgtgaattagccagtgggcaggtgcctttccaggacatgcatagaactcagatgctgttacagaaactgaaaggtcctccttatagcccattggatatcagtattttccctcaatcagaatccagaatgaaaaattcccagtcaggtgtagactctgggattggagaaagtgtgcttgtctccagtggaactcacacagtaaatagtgaccgattacacacaccatcctcaaaaactttctctcctgccttctttagcttggtacagctctgtttgcaacaagatcctgagaaaaggccatcagcaagcagtttattgtcccatgttttcttcaaacagccttattttgagtttctttaacagatgaaagaagaaagccaggattcaatactttcactgttgcctcctgcttataacaagccatcaatatcattgcctccagtgttaccttggactgagccagaatgtgattttcctgatgaaaaagactcatactgggaattctagggctgccaaatcattttatgtcctatatacttgacactttctccttgctgctttttcttctgtatttctaggtacaaataccagaattatacttgaaaatacagttggtgcactggagaatctattatttaaaaccactctgttcaaaggggcaccagtttgtagtccctctgtttcgcacagagtactatgacaaggaaacatcagaattactaatctagctagtgtcatttattctggaatttttttctaagctgtgactaactctttttatctctcaatataatttttgagccagttaatttttttcagtattttgctgtcccttgggaatgggccctcagaggacagtgcttccaagtacatcttctcccagattctctggcctttttaatgagctattgttaaaccaacaggctagtttatcttacatcagacccttttctggtagagggaaaatgtttgtgctttccctttttcttctgttaatacttatggtaacacctaactgagcctcactcacattaaatgattcacttgaaatatatacagaaattgtaatttgcttttttttaaacaagggggctaaagtaacactttcctacttatgtaaattatagatcctaaattcacgcaccccgtgggagctcaataaagatttactgaattga

SEQ ID NO: 199121 - DNA, 1519 bp, Artificial Sequence
  derived and/or modified sequence
cttggctattgttcagcaagtcaactcttgaggacctattttcctgaaggaatgagtgaaactttaataagaaacattctctttggagccgtgagagggttgaactatctgcaccaaaatggctgtattcacaggagtattaaagccagccatatcctcatttctggtgatggcctagtgaccctctctggcctgtcccatctgcatagtttggttaagcatggacagaggcatagggctgtgtatgatttcccacagttcagcacatcagtgcagccgtggctgagtccagaactactgagacaggatttacatgggtataatgtgaagtcagatatttacagtgttgggattacagcatgtgaattagccagtgggcaggtgcctttccaggacatgcatagaactcagatgctgttacagaaactgaaaggtcctccttatagcccattggatatcagtattttccctcaatcagaatccagaatgaaaaattcccagtcaggtgtagactctgggattggagaaagtgtgcttgtctccagtggaactcacacagtaaatagtgaccgattacacacaccatcctcaaaaactttctctcctgccttctttagcttggtacagctctgtttgcaacaagatcctgagaaaaggccatcagcaagcagtttattgtcccatgttttcttcaaacagatgaaagaagaaagccaggattcaatactttcactgttgcctcctgcttataacaagccatcaatatcattgcctccagtgttaccttggactgagccagaatgtgattttcctgatgaaaaagactcatactgggaattctagggctgccaaatcattttatgtcctatatacttgacactttctccttgctgctttttcttctgtatttctaggtacaaataccagaattatacttgaaaatacagttggtgcactggagaatctattatttaaaaccactctgttcaaaggggcaccagtttgtagtccctctgtttcgcacagagtactatgacaaggaaacatcagaattactaatctagctagtgtcatttattctggaatttttttctaagctgtgactaactctttttatctctcaatataatttttgagccagttaatttttttcagtattttgctgtcccttgggaatgggccctcagaggacagtgcttccaagtacatcttctcccagattctctggcctttttaatgagctattgttaaaccaacaggctagtttatcttacatcagacccttttctggtagagggaaaatgtttgtgctttccctttttcttctgttaatacttatggtaacacctaactgagcctcactcacattaaatgattcacttgaaatatatacagaaattgtaatttgcttttttttaaacaagggggctaaagtaacactttcctacttatgtaaattatagatcctaaattcacgcaccccgtgggagctcaataaagatttactgaattgagttta

SEQ ID NO: 199122 - DNA, 1974 bp, Artificial Sequence
  derived and/or modified sequence
gaatgcgttcccagcgggtagcctgggactggtgcagagttccaagcccacggccccggtcgcggcctcgccgccctcccctgtccgcaccgctggcagcctgaagagagtcgctggccgtggtcgccgctaggtaggatatatctgcatcttgaaaggaagataaaacaaaagccttctttggaatagatggatttttgtcactttctgtgtgaactaaagtgattcaatgtctcttttggattgcttctgcacttcaagaacacaagttgaatcactcagacctgaaaaacagtctgaaaccagtatccatcaatacttggttgatgagccaaccctttcctggtcacgtccatccactagagccagtgaagtactatgttccaccaacgtttctcactatgagctccaagtagaaataggaagaggatttgacaacttgacttctgtccatcttgcacggcatactcccacaggaacactggtaactataaaaattacaaatctggaaaactgcaatgaagaacgcctgaaagctttacagaaagccgtgattctatcccactttttccggcatcccaatattacaacttattggacagttttcactgttggcagctggctttgggttatttctccatttatggcctatggttcagcaagtcaactcttgaggacctattttcctgaaggaatgagtgaaactttaataagaaacattctctttggagccgtgagagggttgaactatctgcaccaaaatggctgtattcacaggagtattaaagccagccatatcctcatttctggtgatggcctagtgaccctctctggcctgtcccatctgcatagtttggttaagcatggacagaggcatagggctgtgtatgatttcccacagttcagcacatcagtgcagccgtggctgagtccagaactactgagacaggatttacatgggtataatgtgaagtcagatatttacagtgttgggattacagcatgtgaattagccagtgggcaggtgcctttccaggacatgcatagaactcagatgctgttacagaaactgaaaggtcctccttatagcccattggatatcagtattttccctcaatcagaatccagaatgaaaaattcccagtcaggtgtagactctgggattggagaaagtgtgcttgtctccagtggaactcacacagtaaatagtgaccgattacacacaccatcctcaaaaactttctctcctgccttctttagcttggtacagctctgtttgcaacaagatcctgagaaaaggccatcagcaagcagtttattgtcccatgttttcttcaaacagatgaaagaagaaagccaggattcaatactttcactgttgcctcctgcttataacaagccatcaatatcattgcctccagtgttaccttggactgagccagaatgtgattttcctgatgaaaaagactcatactgggaattctagggctgccaaatcattttatgtcctatatacttgacactttctccttgctgctttttcttctgtatttctaggtacaaataccagaattatacttgaaaatacagttggtgcactggagaatctattatttaaaaccactctgttcaaaggggcaccagtttgtagtccctctgtttcgcacagagtactatgacaaggaaacatcagaattactaatctagctagtgtcatttattctggaatttttttctaagctgtgactaactctttttatctctcaatataatttttgagccagttaatttttttcagtattttgctgtcccttgggaatgggccctcagaggacagtgcttccaagtacatcttctcccagattctctggcctttttaatgagctattgttaaaccaacaggctagtttatcttacatcagacccttttctggtagagggaaaatgtttgtgctttccctttttcttctgtta

SEQ ID NO: 199123 - protein, 542 aa, Artificial Sequence
  derived and/or modified sequence
MPRRGLILHTRTHWLLLGLALLCSLVLFMYLLECAPQTDGNASLPGVVGENYGKEYYQALLQEQEEHYQTRATSLKRQIAQLKQELQEMSEKMRSLQERRNVGANGIGYQSNKEQAPSDLLEFLHSQIDKAEVSIGAKLPSEYGVIPFESFTLMKVFQLEMGLTRHPEEKPVRKDKRDELVEVIEAGLEVINNPDEDDEQEDEEGPLGEKLIFNENDFVEGYYRTERDKGTQYELFFKKADLTEYRHVTLFRPFGPLMKVKSEMIDITRSIINIIVPLAERTEAFVQFMQNFRDVCIHQDKKIHLTVVYFGKEGLSKVKSILESVTSESNFHNYTLVSLNEEFNRGRGLNVGARAWDKGEVLMFFCDVDIYFSAEFLNSCRLNAEPGKKVFYPVVFSLYNPAIVYANQEVPPPVEQQLVHKKDSGFWRDFGFGMTCQYRSDFLTIGGFDMEVKGWGGEDVHLYRKYLHGDLIVIRTPVPGLFHLWHEKRCADELTPEQYRMCIQSKAMNEASHSHLGMLVFREEIETHLHKQAYRTNSEAVG

SEQ ID NO: 199124 - DNA, 3730 bp, Artificial Sequence
  derived and/or modified sequence
cggcggcgggcccaaggcgtgaggcgccgcccgggtgtccccgcggcgcaggaggcggtggagcgcagagcgggcgagcgcgaaaaatcactaccaatataatggattttatatatcagattgctttattctggatatcatggtaacaatacagaaagtatacataatttcccatttctgcaagtagtcatgactgctgaagaaagaaaaacttaaagctacggcagaattattttatggaaattctgattttgtttttaatttttgataactttttactaaaggtatgaacacacaaagagcttattttgttaggcaaatacacattaataagaatgcctagaagaggactgattcttcacacccggacccactggttgctgttgggccttgctttgctctgcagtttggtattatttatgtacctcctggaatgtgccccccagactgatggaaatgcatctcttcctggtgttgttggggaaaattatggtaaagagtattatcaagccctcctacaggaacaagaagaacattatcagaccagggcaaccagtctgaaacgccaaattgcccaactaaaacaagaattacaagaaatgagtgagaagatgcggtcactgcaagaaagaaggaatgtaggggctaatggcataggctatcagagcaacaaagagcaagcacctagtgatcttttagagtttcttcattcccaaattgacaaagctgaagttagcataggggccaaactacccagtgagtatggggtcattccctttgaaagttttaccttaatgaaagtatttcaattggaaatgggtctcactcgccatcctgaagaaaagccagttagaaaagacaaacgagatgaattggtggaagttattgaagcgggcttggaggtcattaataatcctgatgaagatgatgaacaagaagatgaggagggtccccttggagagaaactgatatttaatgaaaatgacttcgtagaaggttattatcgcactgagagagataagggcacacagtatgaactcttttttaagaaagcagaccttacggaatatagacatgtgaccctcttccgcccttttggacctctcatgaaagtgaagagtgagatgattgacatcactagatcaattattaatatcattgtgccacttgctgaaagaactgaagcatttgtacaatttatgcagaacttcagggatgtttgtattcatcaagacaagaagattcatctcacagtggtgtattttggtaaagaaggactgtctaaagtcaagtctatcctagaatctgtcaccagtgagtctaattttcacaattacaccttggtctcattgaatgaagaatttaatcgtggacgaggactaaatgtgggtgcccgagcttgggacaagggagaggtcttgatgtttttctgtgatgttgatatctatttctcagccgaattccttaacagctgccggttaaatgctgagccaggtaagaaggtgttttaccctgtggtgttcagtctttacaatcctgccattgtttatgccaaccaggaagtgccaccacctgtggagcagcagctggttcacaaaaaggattctggcttttggcgagattttggctttggaatgacttgtcagtatcgttcagatttcctgaccattggtggatttgacatggaagtgaaaggttggggtggagaagatgttcatctttatcgaaaatacttacatggtgacctcattgtgattcggactccggttcctggtcttttccacctctggcatgaaaagcgctgtgctgatgagctgacccccgagcagtaccgcatgtgcatccagtctaaagccatgaatgaggcctctcactcccacctgggaatgctggtcttcagggaggaaatagagacgcatcttcataaacaggcatacaggacaaacagtgaagctgttggttgaaatcataattaatgcgttactgtatgaaccacaaaacagcactatttatttagccttacttctacttccagatgcagtgcctcttttggagaagacatgtttatttttcatgttctttctgacattactttagcaattcaacttgatgtgagaagaaaaaacaaatgtttcaacacaaaatctctgttttgtgagaatactgcactatggaataattgacaaattgaaatctcatatttgtcccaaaagttgttttgagttagttctacctggtgcccatgttctgattgtgtgtgggattgcatggtgtcctgattgcatctaggtggagcggatggaatgtgctgggccactgttgggtggagagcagcacattcttacagaggagatggagcgttatgagcatagtatgtggataggtatcttcacctgcccgcccctgagtcagcctccttgacttgatagcttgaagaatccttttccactgaaatagaggataattaattgacacatctgaaatccccaatcaatcaatcaagagaaaggtagaactaaaaactccttaacttactgttgcttacacccctgaaagtctgtttttaagcaaatgggtaatagtagaaaataggttagaatctatggcttgattaaaaatatgttattacattatcatgttcaggattaggattagtagtcagttgctgtaaactattttgaacaaacagaaaagaacacggaaacatttttaacagagcatttaattatgttggaatacaggatcctagctctgtctgggaacattagtttatttgagccagctctatcagggtcttcccatggtggttcagaatagatgagcatagcatggttttgtttgtttttgctttcaattttctaatttggcatggatccatatgtatttactatcctttttctaatatattaatatatgctacatttgtatttgcattactataatactttgagttgaaaaagagtttcattgtggagagaaaaagcaaatggtatgccacaagatcactctgatttgagaaaagggaggaggggaagatagtctgaatggaaatctgaaatacggaatgttttagagaaatatgtcacttgcatatagaatgttttaattgaggtataaattaatgagacaaagtgaaaaagaaattatattcagataggactgcactacattatttgtcacacatggatctgttaccatcaggtcaattcctagtatgcataaattttttaacccttttaaaagagacctatgttgaaaacccctgaaaattcactgaagaaaaatcattactctttttctcagtaaatcatatcatctgaaatattacaaatttcaaatttctaggtgctatattaattcaatattacaataactcttacctaattattcttacaagttttaagttgtggtagtttagtgatttttttaaaagatgtgtgaaatgttctctgcaaaataattcaggccactgtctccttttatatattattataattatttattatgaagaccagtgaattacgatatttaaagtgagagaacttaattatttgcaaaggtaagttacagcttgttttttgagagaatcaaatgagtttacttttgttcctgttgtttttaactagctttaagtttaaagatggaagctaagcaatggaaatgctatacgtttttgacatttattaaatggtaccaataaagtattttattaccaaaagttaaatgaaaa

SEQ ID NO: 199125 - DNA, 1629 bp, Artificial Sequence
  derived and/or modified sequence
atgcccagaagaggcctgatcctgcacaccagaacccactggctgctgctgggcctggccctgctgtgcagcctggtgctgttcatgtacctgctggagtgcgccccccagaccgacggcaacgccagcctgcccggcgtggtgggcgagaactacggcaaggagtactaccaggccctgctgcaggagcaggaggagcactaccagaccagagccaccagcctgaagagacagatcgcccagctgaagcaggagctgcaggagatgagcgagaagatgagaagcctgcaggagagaagaaacgtgggcgccaacggcatcggctaccagagcaacaaggagcaggcccccagcgacctgctggagttcctgcacagccagatcgacaaggccgaggtgagcatcggcgccaagctgcccagcgagtacggcgtgatccccttcgagagcttcaccctgatgaaggtgttccagctggagatgggcctgaccagacaccccgaggagaagcccgtgagaaaggacaagagagacgagctggtggaggtgatcgaggccggcctggaggtgatcaacaaccccgacgaggacgacgagcaggaggacgaggagggccccctgggcgagaagctgatcttcaacgagaacgacttcgtggagggctactacagaaccgagagagacaagggcacccagtacgagctgttcttcaagaaggccgacctgaccgagtacagacacgtgaccctgttcagacccttcggccccctgatgaaggtgaagagcgagatgatcgacatcaccagaagcatcatcaacatcatcgtgcccctggccgagagaaccgaggccttcgtgcagttcatgcagaacttcagagacgtgtgcatccaccaggacaagaagatccacctgaccgtggtgtacttcggcaaggagggcctgagcaaggtgaagagcatcctggagagcgtgaccagcgagagcaacttccacaactacaccctggtgagcctgaacgaggagttcaacagaggcagaggcctgaacgtgggcgccagagcctgggacaagggcgaggtgctgatgttcttctgcgacgtggacatctacttcagcgccgagttcctgaacagctgcagactgaacgccgagcccggcaagaaggtgttctaccccgtggtgttcagcctgtacaaccccgccatcgtgtacgccaaccaggaggtgcccccccccgtggagcagcagctggtgcacaagaaggacagcggcttctggagagacttcggcttcggcatgacctgccagtacagaagcgacttcctgaccatcggcggcttcgacatggaggtgaagggctggggcggcgaggacgtgcacctgtacagaaagtacctgcacggcgacctgatcgtgatcagaacccccgtgcccggcctgttccacctgtggcacgagaagagatgcgccgacgagctgacccccgagcagtacagaatgtgcatccagagcaaggccatgaacgaggccagccacagccacctgggcatgctggtgttcagagaggagatcgagacccacctgcacaagcaggcctacagaaccaacagcgaggccgtgggctag

SEQ ID NO: 199126 - DNA, 1629 bp, Artificial Sequence
  derived and/or modified sequence
atgccccgacgcggactgatacttcatactcggacccattggttattactcgggctggccctcctgtgtagcctggtgttgttcatgtacttactcgaatgcgccccgcagaccgatgggaacgcatcgttgccgggagtggtgggagagaactacggtaaggaatattatcaggccctcctgcaggaacaggaggaacactaccagacgagagcaaccagtctgaaacgccaaattgcacagctgaaacaggagctgcaggagatgtcagagaaaatgagatcattgcaggaaaggcggaacgtcggggctaatggcattggctatcagtctaataaagaacaagcgccctccgacctgctcgagttcttacattcccaaatcgacaaggctgaggtgtctattggtgccaaactgcctagcgaatatggggtgattccttttgaatcatttactctcatgaaggtgtttcagttagaaatgggactgacacggcatcccgaggaaaaacccgtgagaaaggataaaagggacgagctcgtggaagtgattgaggcgggtctagaggtcatcaacaaccccgatgaggatgatgagcaagaggatgaggaggggccacttggcgaaaagctgattttcaatgagaacgattttgtggagggctattacaggaccgagcgagacaaaggaacccagtatgaattgttcttcaagaaggccgacttgactgagtatcgccacgtaacacttttcagacccttcgggcccctgatgaaagtcaaatcagagatgatagacatcacccggagtattataaacataattgtcccacttgctgagcggacagaagcattcgttcagtttatgcagaacttcagagatgtgtgtatccatcaggacaagaagatccacctgactgtcgtgtactttggaaaagaaggcctcagtaaagttaaatctatattagaatctgttacctcagagtccaacttccacaactataccctggtctctctcaacgaggaattcaatcgcggacgtgggctgaatgtgggggccagagcatgggacaaaggcgaagtcctaatgtttttttgtgacgtggacatctacttttctgccgagttcctaaactcctgcaggctgaacgccgagcccggtaaaaaggtcttctacccggtggtgttttccctttataaccctgctatcgtatatgccaaccaggaggttccccctccggtagaacagcaacttgtgcataagaaggactctggattctggagggatttcgggttcggcatgacatgtcagtaccgctcagacttcctcaccattggcgggtttgatatggaggtcaaaggatggggaggagaggatgtgcatctttaccggaaatacttgcacggggacctcatcgtaatccgcacccccgttcctggactgttccacttatggcacgaaaagcggtgcgccgatgagctgacccccgagcagtaccgcatgtgtattcagtccaaagcgatgaatgaagctagccactcacatttaggcatgctggtattcagagaggagatcgagactcatctgcataaacaggcatacaggacaaatagcgaagccgtgggatag

SEQ ID NO: 199127 - DNA, 1629 bp, Artificial Sequence
  derived and/or modified sequence
atgccccggcggggcctcatcctgcacaccaggacccactggctgctgctgggcctggccctgctgtgcagcctggtgctcttcatgtacctgctggagtgtgccccccagacagatggaaatgccagcctgcccggggtggtgggggagaactacggcaaggagtactaccaggccctgctgcaggagcaggaggagcactaccagacccgggccaccagcctgaagaggcagatcgcccagctgaagcaggagctgcaggagatgtctgagaagatgaggagcctgcaggagaggagaaatgtgggcgccaatggaattggctaccagagcaacaaggagcaggcccccagcgacctgctggagttcctgcacagccagattgacaaggccgaggtgtccattggagccaagctgcccagtgaatatggagtcatcccctttgagagcttcaccctgatgaaggtgttccagctggagatgggcctgaccaggcaccctgaggagaagcctgtgaggaaggacaagagagatgagctggtggaggtgattgaggccggcctggaggtgatcaacaacccagatgaagatgatgagcaggaggatgaggagggccccctgggggagaagctgatcttcaatgaaaatgactttgtggagggctactacagaacagagcgggacaagggcacccagtatgagctgttcttcaagaaggctgacctgacagagtacagacatgtgaccctcttccggcccttcggccccctgatgaaggtgaagtctgagatgattgacatcaccaggagcatcatcaacatcatcgtgcccctggccgagaggacagaggcctttgtgcagttcatgcagaacttcagagatgtgtgcatccaccaggacaagaagatccacctgactgtggtgtactttgggaaggagggcctgagcaaggtgaagagcatcctggagagcgtgaccagcgagagcaacttccacaactacaccctggtgtccctgaatgaggagttcaacagaggccggggcctgaatgtgggcgcccgggcctgggacaagggggaggtgctgatgttcttctgtgatgtggacatctacttctctgctgagttcctgaacagctgccgcctgaatgctgagcccgggaagaaggtgttctaccctgtggtgttcagcctgtacaacccagccatcgtgtatgccaaccaggaggtgcccccacctgtggagcagcagctggtgcacaagaaggacagcggcttctggagggactttggcttcggcatgacctgccagtacagaagtgacttcctgaccatcggcggctttgacatggaggtgaagggctggggcggggaggatgtgcacctgtacaggaagtacctgcacggggacctgattgtcatccgcacccctgtgcccggcctcttccacctgtggcatgagaagagatgtgctgatgagctgaccccagagcagtacaggatgtgcatccagagcaaggccatgaatgaggccagccacagccacctgggcatgctggtgttccgggaggagattgagacccacctgcacaagcaggcctaccgcaccaacagcgaggccgtgggctag

SEQ ID NO: 199128 - DNA, 1629 bp, Artificial Sequence
  derived and/or modified sequence
atgccccggcggggcctgatcctgcacacccggacccactggctgctgctcggcttggcgcttctctgctctctggtgctgtttatgtacctgctggagtgcgccccacagaccgatggaaatgcgtcgttgcctggcgttgtgggcgagaattacgggaaggagtactatcaagccctactgcaagaacaggaagaacactaccagactcgggctacctctctcaagcgccaaatcgcacaactcaagcaggagttgcaggagatgagcgagaaaatgcggtccctgcaggagcgccggaacgtgggagccaacggcattggttatcagagcaataaggagcaggccccctccgatctcttagaattccttcatagccaaattgataaagcggaagtgagcatcggcgccaaactcccctctgagtacggggtgatcccgttcgaatcctttaccctcatgaaggtgtttcagttggaaatggggcttacaagacatcctgaagaaaagcccgtaagaaaggataagcgcgatgagctcgtggaggttatcgaggccggtctggaggtgatcaacaatcccgacgaggacgacgagcaggaggacgaggagggcccgcttggtgagaaactcatctttaatgaaaatgattttgtcgagggctactataggacggaacgcgacaaagggacccagtacgaattgttcttcaagaaggcagatctcactgagtaccggcacgtgacacttttccgccccttcggtcctttaatgaaggttaagtcagagatgattgatatcaccagatctatcatcaacatcattgttcctctcgccgagcgaacagaagccttcgtgcagtttatgcagaatttccgcgacgtctgtattcaccaggacaagaaaatccatcttacagtggtgtacttcgggaaggaaggtctgagcaaggtcaagtcaatcctcgaatccgtcacttccgagagtaacttccacaactataccctggtctccctgaacgaagagttcaaccgcgggaggggtctcaacgtgggggcccgtgcctgggataagggcgaggtgctcatgtttttttgtgatgtggacatctacttctctgccgagttcttgaattcctgccggctcaatgcggaaccaggaaaaaaggtgttttatcccgtagtgttctcgctatataatcctgccatcgtgtacgctaatcaggaggtgcctcccccagtagaacaacagctggtgcacaagaaggactctggcttctggagagatttcggcttcggaatgacatgccagtaccgatccgatttcttaactatcggcggcttcgacatggaagtcaaaggttggggaggagaggatgtgcacttgtacaggaagtatttacacggggatctgattgtgattagaacccccgtaccggggctgtttcacctgtggcatgagaaaagatgtgcagatgaactgacacctgagcagtaccggatgtgtattcagtccaaggcaatgaacgaggcctcccatagtcacctcgggatgctggtgtttcgagaagaaatcgagacccatctccacaaacaggcctatcggacaaatagtgaggcagtgggatag

SEQ ID NO: 199129 - DNA, 1629 bp, Artificial Sequence
  derived and/or modified sequence
atgcctcggagggggttaatcttgcacactcgcactcattggctgcttctgggtctagcactgctttgctcgctggtattgtttatgtatctgttggagtgcgcaccccagacagacggaaatgctagtttgcccggtgtcgtgggcgaaaattacggcaaggaatattaccaggcactgctgcaagagcaggaggaacattaccagacgcgagccacatccctcaaaagacagatcgcgcaactgaagcaggaattacaagagatgagtgagaagatgaggagcttacaggaaagacgcaatgttggtgctaatggtattggatatcagtcaaataaggaacaggccccttctgacctgcttgagttcctccactcgcagattgacaaggccgaggtgtcgatcggcgcaaaactaccatctgaatatggcgttatacccttcgaatcatttactctgatgaaggtgttccagcttgagatgggactgacaaggcatcctgaggagaagccagtcagaaaagataagcgagatgagctggtcgaagtaatcgaggcgggactcgaagttatcaacaatccagacgaggacgacgagcaggaagatgaagaaggtccgttgggcgagaagctaatattcaacgagaatgacttcgtggaaggatattatcggacagagagggacaagggaacgcagtacgagcttttcttcaaaaaggctgacctgactgagtatcggcatgtcacgctgtttagaccttttggacctctgatgaaggtgaaaagtgaaatgattgatatcactagatcaatcatcaatatcattgtgcccctggccgaacggactgaagcatttgtgcagttcatgcagaattttagagatgtgtgcatacaccaagataaaaagatccacctgactgttgtatacttcggaaaggagggactgagcaaggttaaaagcatcctggaatctgtgacaagcgagagcaattttcataactacaccctggtgagcctgaatgaggagtttaacagaggcagaggcctgaatgttggggctcgagcctgggacaagggggaggtgctcatgttcttttgtgacgttgatatctacttcagcgcggaatttctaaacagttgtcggcttaacgccgagcccggaaaaaaagtgttctaccccgtagtttttagcctctataatcccgctatcgtgtatgcaaatcaggaggtgccgcctcctgtagaacagcagctggtgcataagaaggatagcgggttttggagggatttcggcttcggaatgacgtgtcagtacaggagtgacttcctaacaattggcggtttcgacatggaagttaaaggctggggcggagaagacgttcatctatatcgcaagtatctccacggcgatctgattgtgatccgcacaccggtgcccggactgttccacttgtggcatgagaaacgatgcgctgatgagctgacacccgagcagtatcggatgtgcattcagagcaaagcaatgaatgaggcctctcattcccatctgggcatgttagttttcagggaagaaatcgaaactcatctacacaagcaggcctacagaacgaacagcgaagccgttgggtag

SEQ ID NO: 199130 - protein, 201 aa, Artificial Sequence
  derived and/or modified sequence
MKHVNERFQDEKNKEVVLMCIGVTSGVGRLLFGRIADYVPGVKKVYLQVLSFFFIGLMSMMIPLCSIFGALIAVCLIMGLFDGCFISIMAPIAFELVGAQDVSQAIGFLLGFMSIPMTVGPPIAGLLRDKLGSYDVAFYLAGVPPLIGGAVLCFIPWIHSKKQREISKTTGKEKMEKMLENQNSLLSSSSGMFKKESDSII

SEQ ID NO: 199131 - protein, 515 aa, Artificial Sequence
  derived and/or modified sequence
MVLSQEEPDSARGTSEAQPLGPAPTGAAPPPGPGPSDSPEAAVEKVEVELAGPATAEPHEPPEPPEGGWGWLVMLAAMWCNGSVFGIQNACGVLFVSMLETFGSKDDDKMVFKTAWVGSLSMGMIFFCCPIVSVFTDLFGCRKTAVVGAAVGFVGLMSSSFVSSIEPLYLTYGIIFACGCSFAYQPSLVILGHYFKKRLGLVNGIVTAGSSVFTILLPLLLRVLIDSVGLFYTLRVLCIFMFVLFLAGFTYRPLATSTKDKESGGSGSSLFSRKKFSPPKKIFNFAIFKVTAYAVWAVGIPLALFGYFVPYVHLMKHVNERFQDEKNKEVVLMCIGVTSGVGRLLFGRIADYVPGVKKVYLQVLSFFFIGLMSMMIPLCSIFGALIAVCLIMGLFDGCFISIMAPIAFELVGAQDVSQAIGFLLGFMSIPMTVGPPIAGLLRDKLGSYDVAFYLAGVPPLIGGAVLCFIPWIHSKKQREISKTTGKEKMEKMLENQNSLLSSSSGMFKKESDSII

SEQ ID NO: 199132 - DNA, 606 bp, Artificial Sequence
  derived and/or modified sequence
atgaaacatgtaaacgaacggtttcaggacgagaagaataaggaagtggtgttaatgtgcattggggtgaccagcggcgtgggcagactgctattcggacgtatcgccgactatgtgccaggcgtgaagaaggtctatctgcaagtactctcttttttttttattgggctcatgtcaatgatgatacctctgtgcagcatcttcggggcgctgattgcggtctgcttgataatgggactatttgatgggtgtttcatatcgataatggcgcccattgcctttgaactggtgggagcccaggatgtctctcaggcgatcggattcctgctgggcttcatgtccatccccatgactgtgggaccccccattgcagggctactgcgagacaagcttggaagctatgacgtcgcgttctatctggctggtgtacccccactaatcgggggcgccgttctctgttttatcccctggattcactctaaaaaacagcgggagatctccaaaacaaccggcaaggagaaaatggaaaagatgctcgagaaccagaatagtttactgagcagtagcagcggaatgtttaaaaaggagtctgacagtattatctag

SEQ ID NO: 199133 - DNA, 1548 bp, Artificial Sequence
  derived and/or modified sequence
atggttctatcccaagaggagcctgacagcgctaggggtacaagtgaggcacagcctctcggaccagctccaaccggtgccgcgccacctcctgggcccggcccctcagactcacccgaagcagcagtggagaaggtggaggttgagctagccgggcctgctacggcagagccccacgaacccccggagccgccagaagggggctggggctggctggtaatgctggctgccatgtggtgcaatggaagcgtgttcggaatccagaatgcttgcggggttctatttgtcagtatgctggaaacatttggtagtaaggacgacgacaagatggtatttaaaactgcttgggtcggaagcctctccatgggtatgattttcttttgctgccctattgtgtcagtgttcacagatctttttggttgccgtaagaccgcagtcgttggcgctgctgtgggctttgtgggcttgatgtcatcttccttcgtgagctccattgaacctctctacttaacttatggcattattttcgcctgtgggtgtagtttcgcatatcagccgtccctggttatactgggccactacttcaagaaacgattgggtctggtgaacggtatcgtgactgctggctcatctgtgttcactatcctgctgcccctgctgctccgggtgctcatcgattccgtgggtttattctacactctgcgcgtgctgtgtatctttatgtttgtgctcttcctcgccggattcacataccgccctcttgcaacaagtactaaagataaagagtccggcgggtccgggtcctcactcttcagccggaagaagttttcaccgccaaagaaaatctttaacttcgctatcttcaaggtgacggcttacgctgtgtgggctgtgggtattcccctggcccttttcggctacttcgtcccatacgtgcacctcatgaagcacgtcaacgaacgttttcaagacgaaaagaacaaagaggtggtgctgatgtgcatcggggtcacctctggtgtgggccgccttttgttcgggcgcattgctgactatgtgcctggcgtcaaaaaagtgtacctgcaggtcctctctttcttcttcattgggctgatgagcatgatgattcctttgtgctcgatttttggagctttaatcgccgtatgtcttatcatgggcctctttgacggatgttttatctccatcatggcgccaatcgcctttgaactcgtaggcgctcaggacgtcagtcaagcaatcggtttcctcctgggctttatgtccattcccatgactgtcggaccccctattgctggcctcctgcgggataaactcggcagttatgacgttgccttctaccttgcgggtgttcccccactcatcggcggtgccgtgctgtgctttatcccctggattcatagtaagaagcagagagagatctcaaagaccactggcaaggagaaaatggaaaaaatgctggaaaatcaaaactcgctgcttagtagtagcagtgggatgtttaaaaaagaaagcgacagtattatctag

SEQ ID NO: 199134 - DNA, 606 bp, Artificial Sequence
  derived and/or modified sequence
atgaagcacgtgaatgaacgcttccaggatgagaagaacaaggaggtggtgctgatgtgcattggagtgaccagcggcgtgggccgcctgctgtttggaagaattgctgactatgtgcctggggtgaagaaggtgtacctgcaggtgctgtccttcttcttcatcggcctgatgtccatgatgatccccctgtgcagcatctttggagccctgattgctgtgtgcctgatcatgggcctgtttgatggctgcttcatcagcatcatggcccccatcgcctttgagctggtgggcgcccaggatgtgtcccaggccatcggcttcctgctgggcttcatgagcatccccatgacagtgggcccccccatcgccggcctgctgcgggacaagctgggcagctatgatgtggccttctacctggccggcgtgccccccctgattggaggagctgtgctgtgcttcatcccctggatccacagcaagaagcagcgggagatcagcaagaccaccgggaaggagaagatggagaagatgctggagaaccagaacagcctgctgagcagcagcagcggcatgttcaagaaggagagtgacagcatcatctag

SEQ ID NO: 199135 - DNA, 1548 bp, Artificial Sequence
  derived and/or modified sequence
atggtgctgagccaggaggagccagacagcgcccggggcaccagcgaggcccagcccctgggccctgcccccactggagctgcccctcctcctggccctggccccagcgacagccctgaggccgctgtggagaaggtggaggtggagctggccggccctgccacagctgagccccatgagcccccagagcccccagagggcggctggggctggctggtgatgctggccgccatgtggtgcaatggatctgtgtttggcatccagaatgcctgtggggtgctgtttgtgtccatgctggagaccttcggcagcaaggatgatgacaagatggtgttcaagacagcctgggtgggcagcctgtccatgggcatgatcttcttctgctgccccatcgtgtctgtgttcacagacctgtttggctgcaggaagacagctgtggtgggcgctgctgtgggctttgtgggcctgatgagcagcagctttgtgagcagcattgagcccctgtacctgacctacggcatcatctttgcctgtggctgcagctttgcctaccagcccagcctggtgatcctgggccactacttcaagaagaggctgggcctggtgaatggaattgtgacagctggcagctctgtgttcaccatcctgctgcccctgctgctgcgggtgctgattgattctgtgggcctcttctacaccctgcgggtgctgtgcatcttcatgtttgtgctcttcctggccggcttcacctaccggcccctggccaccagcaccaaggacaaggagagcggcggcagcggcagcagcctcttcagcaggaagaagttcagcccccccaagaagatcttcaactttgccatcttcaaggtgacagcctatgctgtgtgggccgtgggcatccccctggccctgtttggctactttgtgccctacgtgcacctgatgaagcacgtgaatgaacgcttccaggatgagaagaacaaggaggtggtgctgatgtgcattggagtgaccagcggcgtgggccgcctgctgtttggaagaattgctgactatgtgcctggggtgaagaaggtgtacctgcaggtgctgtccttcttcttcatcggcctgatgtccatgatgatccccctgtgcagcatctttggagccctgattgctgtgtgcctgatcatgggcctgtttgatggctgcttcatcagcatcatggcccccatcgcctttgagctggtgggcgcccaggatgtgtcccaggccatcggcttcctgctgggcttcatgagcatccccatgacagtgggcccccccatcgccggcctgctgcgggacaagctgggcagctatgatgtggccttctacctggccggcgtgccccccctgattggaggagctgtgctgtgcttcatcccctggatccacagcaagaagcagcgggagatcagcaagaccaccgggaaggagaagatggagaagatgctggagaaccagaacagcctgctgagcagcagcagcggcatgttcaagaaggagagtgacagcatcatctag

SEQ ID NO: 199136 - DNA, 606 bp, Artificial Sequence
  derived and/or modified sequence
atgaagcacgtgaacgagcggttccaggacgagaagaacaaggaggtggtcctgatgtgtatcggggtgacaagcggagtcggaagactcctgttcggcaggattgcagattacgtccccggcgtcaaaaaagtctaccttcaggtgcttagcttttttttcattgggttaatgagcatgatgattcctttgtgtagcatattcggcgcactcatcgcagtgtgtctgattatgggcctctttgatggctgttttatctctattatggcacccatcgcctttgaactggtgggagcgcaggacgtctcacaggccatcggcttccttctcggctttatgtctataccgatgaccgtggggccacctatagcggggcttctgagggataagctgggatcttacgatgttgctttttacctggccggcgtgccaccattgattggtggcgccgtactatgttttatcccttggattcattccaaaaaacagagagaaatctccaaaacgactggcaaggaaaaaatggagaagatgctcgagaatcaaaactcgctgctatcaagctctagcgggatgtttaagaaggagagcgactcaatcatctag

SEQ ID NO: 199137 - DNA, 1548 bp, Artificial Sequence
  derived and/or modified sequence
atggtgctgagccaggaggagcccgacagcgcccggggcaccagcgaggcccagccactcggacccgcacccacaggtgccgcacctccgccgggtcctggaccaagcgattcaccagaggccgcagttgagaaagtggaggttgaactcgcggggccagccaccgcagaacctcacgaaccccccgaacctccagagggcggctggggttggctggtcatgcttgctgccatgtggtgcaatggctccgtcttcggcatccagaacgcttgtggggtcctgttcgttagcatgctcgaaaccttcggatctaaggatgatgataaaatggtttttaaaactgcctgggtcggttccctttcaatggggatgatttttttttgttgtcctatcgtgtccgtgttcaccgatttgtttggatgtcgcaagaccgcagtagtaggggccgcagtgggcttcgttgggctcatgtcctcctccttcgtctcttccattgaaccgttgtacttaacttacggtataatcttcgcatgtggctgttcgtttgcctatcagccctctctcgtgattttgggccattactttaaaaaacgcttgggtctcgtcaacgggattgtcacagccggctccagtgtttttactatcttgttacccctgctgttgcgggtgttaatcgattcagtaggcctcttctacaccctgagagtcctttgtatcttcatgttcgtgctgttcctggccggatttacgtaccgccctttggccacttctaccaaagacaaagagtccgggggctccggaagttcactcttcagccgcaagaaatttagccctcccaagaagatcttcaactttgctatcttcaaggtaacagcctatgccgtgtgggctgttggcatccccctggcactgttcggctactttgtgccctacgttcacctcatgaagcacgttaacgaaagatttcaggatgaaaaaaacaaggaggtcgtccttatgtgtatcggagtgacctctggagtggggcggcttttgttcggtcggatcgcagactacgtgcccggtgtcaaaaaggtgtatctacaggtcttatcctttttctttatcggcctcatgtctatgatgattccgttgtgcagtatctttggggccctcatagccgtgtgtctgattatgggtctttttgacggctgctttatttcaatcatggctcccattgcgtttgagctggtcggggctcaagatgtgtcccaggctattggtttcctcctgggtttcatgagcatccccatgaccgtaggacctccgattgccggactacttcgcgacaagctgggcagctatgacgttgctttttacctagcaggcgtcccaccacttataggcggagctgtactgtgtttcatcccatggattcattccaaaaaacagcgagagatctctaagaccaccggaaaagaaaagatggaaaagatgttggagaatcagaactccctgctcagtagcagcagcggaatgttcaagaaggagtcagactcaataatctag

SEQ ID NO: 199138 - DNA, 606 bp, Artificial Sequence
  derived and/or modified sequence
atgaagcatgtgaacgagcgcttccaagacgaaaagaacaaagaagtcgtgctgatgtgcataggggtgacttccggcgttggacgacttttattcgggaggatagccgattacgtccccggagtcaagaaagtgtacctccaggtgctgtctttttttttcattggcctgatgagtatgatgataccactgtgcagtatattcggagcactgatagcagtctgtctgattatgggactcttcgacggttgttttatatccatcatggccccaatagcttttgaattggttggggctcaggatgtgtcacaagccattggatttctgctaggcttcatgagcataccgatgacagtggggccacctattgccggacttctgcgcgataagcttggatcctacgacgtggccttctatctggctggcgttcctcccctaatagggggagctgtgctttgcttcatcccctggatccactctaaaaagcagcgcgagatcagcaagaccacgggcaaagagaagatggagaagatgctcgagaatcaaaacagcctcctgtcgtctagctccggcatgttcaagaaggaatccgactcgattatctag

SEQ ID NO: 199139 - DNA, 1548 bp, Artificial Sequence
  derived and/or modified sequence
atggttctgtcccaggaggaacccgacagtgcccgtggtacctccgaggctcaaccattgggaccggcaccaaccggggctgcgcctcctcccggtcctggtccttccgatagccccgaggccgcagtggagaaagtggaggtggaattggccggaccagccacagccgagcctcacgaaccgccagagccgcctgagggaggctggggttggcttgttatgttagctgcgatgtggtgcaacggttccgtgttcggaatccagaacgcctgtggcgtattattcgtatctatgcttgaaactttcggtagcaaggatgatgacaaaatggtgtttaaaaccgcctgggtaggttcactgagtatgggcatgatcttcttctgttgcccgattgtgagtgtgttcacagatcttttcggttgcagaaagacagctgtcgtaggagcagcagtaggattcgtcggacttatgtctagtagtttcgtgtccagcatcgagcctctgtacctgacctacgggattattttcgcctgcgggtgttctttcgcctaccagccaagcctcgtgattttagggcattactttaagaagagacttggcctggtgaatgggattgtgacagcaggctcgtcagtgttcaccatcctcctccccctgttactccgggtcttaatcgacagcgtgggattgttttacacattgagggtgctctgcatctttatgtttgtcctgtttctggccggtttcacatataggccactcgccacaagtacaaaggacaaggagtctgggggatcaggaagtagcctgttcagtcgtaaaaaattcagcccacccaaaaagattttcaacttcgctatttttaaggttacagcatacgccgtgtgggccgtgggcatcccactcgcattatttggatatttcgttccatatgtgcatctgatgaagcacgtcaacgaacggtttcaggatgaaaaaaacaaggaagtggttctgatgtgtatcggtgtcacatcgggcgtcggccgacttctgtttggcaggattgccgactacgtgccgggagttaagaaggtgtacttgcaagtcctgtcgttctttttcattggtctgatgagcatgatgattcccctctgttctatctttggagccttgatcgccgtctgtttgataatgggcctgttcgatggttgttttattagcattatggccccaatcgcctttgagctggtgggagctcaggacgtgtcacaggccatcgggtttctccttgggtttatgagcataccgatgactgttggcccaccaattgccggattactgagggacaagctcgggtcctacgacgtcgctttctatctggcaggagtccctccacttatcggcggagccgtcctctgcttcatcccctggattcacagtaaaaagcagcgggagatctctaagaccaccggcaaggaaaagatggaaaaaatgcttgagaaccagaacagcctgctgtcatcatctagcggaatgttcaagaaagagagcgatagcataatctag

SEQ ID NO: 199140 - DNA, 2799 bp, Artificial Sequence
  derived and/or modified sequence
ttccatcgagcctctgtaccttacctatggaatcatatttgcctgcggctgctcctttgcataccagccttcattggtcattttgggacactatttcaagaagcgccttggactggtgaatggcattgtcactgctggcagcagtgtcttcacaatcctgctgcctttgctcttaagggttctgattgacagcgtgggcctcttttacacattgagggtgctctgcatcttcatgtttgttctctttctggctggctttacttaccgacctcttgctaccagtaccaaagataaagagagtggaggtagcggatcctccctcttttccaggaaaaagttcagtcctccaaaaaaaattttcaattttgccatcttcaaggtgacagcttatgcagtgtgggcagttggaataccacttgcactttttggatactttgtgccttatgttcacttgatctcaacatctgctgcaatttgactgttcagatgaaacatgtaaatgaaagatttcaagatgaaaaaaataaagaggttgttctcatgtgcattggcgtcacttcaggagttggacgactgctctttggccggattgcagattatgtgcctggtgtgaagaaggtttatctacaggtactctcctttttcttcattggtctgatgtccatgatgattcctctgtgtagcatctttggggccctcattgctgtgtgcctcatcatgggtctcttcgatggatgcttcatttccattatggctcccatagcctttgagttagttggtgcccaggatgtctcccaagcaattggatttctgctcggattcatgtctatacccatgactgttggcccacccattgcagggttacttcgtgacaaactgggctcctatgatgtggcattctacctcgctggagtccctccccttattggaggtgctgtgctttgttttatcccgtggatccatagtaagaagcaaagagagatcagtaaaaccactggaaaagaaaagatggagaaaatgttggaaaaccagaactctctgctgtcaagttcatctggaatgttcaagaaagaatctgactctattatttaatatcttacatacctccaccagactggacttgctttttgaattttaagcaagtttcctttccttttatacaaattgcaaatttcatatttttttaatcacatcctaggaatagcacaataattgggaaatagaacccttatcactagaagaaccattttctgccactaaatatctctgatgtttccatgagtctgagggcagagactctggtatatgaaaacgtctgaaagtcacatattgtgaaaatttgaagctatctcagtaaaaagcagctttggaaactgtgaatgatctttagcttgtacaaatgtttaaaaatacctcaggctatactgaaagggttgcagtttggttaggagtggaaatattttgtttgttaatgatgtcttcagttctggtacctctgttttactttcttatgctctttggaaactttttgcaaaatttaagcctgggttctagataataccagatctacctaaacctcaagtctatgttaaagttgctttcctgctgttaaataagctatgatattaagatattctgacttgctccagtgtcaagggaccttctgggagcaggtgctaacatagtgttcagaatcaatatgtgagatgaaaaggatcccctccaggaggatcctgagctgttcagaaatcatttaagtttacagcgttgttccctttgcgtttgcagtgcgttttactcaagtagccagaaacaccccacgtttctgaatttgtttaaactgtaacaataaagtaaaatagaatgcatgaaagatattctggcgattgtaacttagaatttttctgacttctggatttgttggcactagaacctgatatttaaagtcttactgagcagctatcaagtggcagttacaggcacaaattggtggaggctggaggatggggaggggagcaaaaccctttatatttgtgaagaaaatatctgtagctgatagaaataattgcttaaattggtttatgaaattaatgagtctgaaaaggttaaaagcacttataaaaagaaccaagtcctacatttccagaactttctggcaaaaatttgcactcatattatttatcctatgaacattcccattgtttttttttgctatttatatacagattatcataagaaagctctcagtttgaggacccaaaataaaaccaaagtcatgccatgacccatactcatttacaaaaacaagaacactttcctctatccctaaaattatgctttagtacttgaggcctttaaaagttagtgcttttgattgtgaagacattcagcaacttactttgtcatacatgcagttgcaccttaccacttctaatagtgtcatatttcatattcaggggacttagataatttgcctgtggatggttcttttgcaggaaaaaaaatctacattttgaccatactaccctttcatgtccttattataagcttttagaaaatgatttcattcagtcatgtccagttatataaaacgttactttctcatttttgagaagttcaacaaaacatactactaagaccaatcatcaaacccactattataaatgttaattttggctgggtaaggtggcttgcgcctataatcccagcactttgggaggctgaggagggaagattgcttgagcccaggagtttgagaccagcctgggcaacatagcaagatcctgtctctactaaaaa

SEQ ID NO: 199141 - DNA, 3430 bp, Artificial Sequence
  derived and/or modified sequence
gcggccgcctgcgcgctggccgcctgcgcgctgccagcccgcccgcccgccaggggctccgccgccctcgcctcggcctcgttagcccgccaggagccccgcagctcctccgggagcccgctggtaactcgcgtccctcgcgcttctccggcgcctgaggggcccgcctcgggccatggtgctctcccaggaggagccggactccgcgcggggcacgagcgaggcgcagccgctcggccccgcgcccacgggggccgctccgccgcccggcccgggaccctcggacagccccgaggcggctgtcgagaaggtggaggtggagctggcggggccggcgaccgcggagccccatgagccccccgaaccccccgagggcggctggggctggctggtgatgctggcggccatgtggtgcaacgggtcggtgttcggcatccagaacgcttgcggggtgctcttcgtgtccatgctggaaaccttcggctccaaagacgatgacaagatggtctttaagacagcatgggtaggttctctctccatggggatgattttcttttgctgcccaatagtcagcgtcttcacagacctatttggttgtcggaaaacagctgtcgtgggtgctgctgttggatttgttgggctcatgtccagttcttttgtaagttccatcgagcctctgtaccttacctatggaatcatatttgcctgcggctgctcctttgcataccagccttcattggtcattttgggacactatttcaagaagcgccttggactggtgaatggcattgtcactgctggcagcagtgtcttcacaatcctgctgcctttgctcttaagggttctgattgacagcgtgggcctcttttacacattgagggtgctctgcatcttcatgtttgttctctttctggctggctttacttaccgacctcttgctaccagtaccaaagataaagagagtggaggtagcggatcctccctcttttccaggaaaaagttcagtcctccaaaaaaaattttcaattttgccatcttcaaggtgacagcttatgcagtgtgggcagttggaataccacttgcactttttggatactttgtgccttatgttcacttgatgaaacatgtaaatgaaagatttcaagatgaaaaaaataaagaggttgttctcatgtgcattggcgtcacttcaggagttggacgactgctctttggccggattgcagattatgtgcctggtgtgaagaaggtttatctacaggtactctcctttttcttcattggtctgatgtccatgatgattcctctgtgtagcatctttggggccctcattgctgtgtgcctcatcatgggtctcttcgatggatgcttcatttccattatggctcccatagcctttgagttagttggtgcccaggatgtctcccaagcaattggatttctgctcggattcatgtctatacccatgactgttggcccacccattgcagggttacttcgtgacaaactgggctcctatgatgtggcattctacctcgctggagtccctccccttattggaggtgctgtgctttgttttatcccgtggatccatagtaagaagcaaagagagatcagtaaaaccactggaaaagaaaagatggagaaaatgttggaaaaccagaactctctgctgtcaagttcatctggaatgttcaagaaagaatctgactctattatttaatatcttacatacctccaccagactggacttgctttttgaattttaagcaagtttcctttccttttatacaaattgcaaatttcatatttttttaatcacatcctaggaatagcacaataattgggaaatagaacccttatcactagaagaaccattttctgccactaaatatctctgatgtttccatgagtctgagggcagagactctggtatatgaaaacgtctgaaagtcacatattgtgaaaatttgaagctatctcagtaaaaagcagctttggaaactgtgaatgatctttagcttgtacaaatgtttaaaaatacctcaggctatactgaaagggttgcagtttggttaggagtggaaatattttgtttgttaatgatgtcttcagttctggtacctctgttttactttcttatgctctttggaaactttttgcaaaatttaagcctgggttctagataataccagatctacctaaacctcaagtctatgttaaagttgctttcctgctgttaaataagctatgatattaagatattctgacttgctccagtgtcaagggaccttctgggagcaggtgctaacatagtgttcagaatcaatatgtgagatgaaaaggatcccctccaggaggatcctgagctgttcagaaatcatttaagtttacagcgttgttccctttgcgtttgcagtgcgttttactcaagtagccagaaacaccccacgtttctgaatttgtttaaactgtaacaataaagtaaaatagaatgcatgaaagatattctggcgattgtaacttagaatttttctgacttctggatttgttggcactagaacctgatatttaaagtcttactgagcagctatcaagtggcagttacaggcacaaattggtggaggctggaggatggggaggggagcaaaaccctttatatttgtgaagaaaatatctgtagctgatagaaataattgcttaaattggtttatgaaattaatgagtctgaaaaggttaaaagcacttataaaaagaaccaagtcctacatttccagaactttctggcaaaaatttgcactcatattatttatcctatgaacattcccattgtttttttttgctatttatatacagattatcataagaaagctctcagtttgaggacccaaaataaaaccaaagtcatgccatgacccatactcatttacaaaaacaagaacactttcctctatccctaaaattatgctttagtacttgaggcctttaaaagttagtgcttttgattgtgaagacattcagcaacttactttgtcatacatgcagttgcaccttaccacttctaatagtgtcatatttcatattcaggggacttagataatttgcctgtggatggttcttttgcaggaaaaaaaatctacattttgaccatactaccctttcatgtccttattataagcttttagaaaatgatttcattcagtcatgtccagttatataaaacgttactttctcatttttgagaagttcaacaaaacatactactaagaccaatcatcaaacccactattataaatgttaattttggctgggtaaggtggcttgcgcctataatcccagcactttgggaggctgaggagggaagattgcttgagcccaggagtttgagaccagcctgggcaacatagcaagatcctgtctctactaaaaa

SEQ ID NO: 199142 - DNA, 606 bp, Artificial Sequence
  derived and/or modified sequence
atgaagcacgtgaacgagagattccaggacgagaagaacaaggaggtggtgctgatgtgcatcggcgtgaccagcggcgtgggcagactgctgttcggcagaatcgccgactacgtgcccggcgtgaagaaggtgtacctgcaggtgctgagcttcttcttcatcggcctgatgagcatgatgatccccctgtgcagcatcttcggcgccctgatcgccgtgtgcctgatcatgggcctgttcgacggctgcttcatcagcatcatggcccccatcgccttcgagctggtgggcgcccaggacgtgagccaggccatcggcttcctgctgggcttcatgagcatccccatgaccgtgggcccccccatcgccggcctgctgagagacaagctgggcagctacgacgtggccttctacctggccggcgtgccccccctgatcggcggcgccgtgctgtgcttcatcccctggatccacagcaagaagcagagagagatcagcaagaccaccggcaaggagaagatggagaagatgctggagaaccagaacagcctgctgagcagcagcagcggcatgttcaagaaggagagcgacagcatcatctag

SEQ ID NO: 199143 - DNA, 1548 bp, Artificial Sequence
  derived and/or modified sequence
atggtgctgagccaggaggagcccgacagcgccagaggcaccagcgaggcccagcccctgggccccgcccccaccggcgccgcccccccccccggccccggccccagcgacagccccgaggccgccgtggagaaggtggaggtggagctggccggccccgccaccgccgagccccacgagccccccgagccccccgagggcggctggggctggctggtgatgctggccgccatgtggtgcaacggcagcgtgttcggcatccagaacgcctgcggcgtgctgttcgtgagcatgctggagaccttcggcagcaaggacgacgacaagatggtgttcaagaccgcctgggtgggcagcctgagcatgggcatgatcttcttctgctgccccatcgtgagcgtgttcaccgacctgttcggctgcagaaagaccgccgtggtgggcgccgccgtgggcttcgtgggcctgatgagcagcagcttcgtgagcagcatcgagcccctgtacctgacctacggcatcatcttcgcctgcggctgcagcttcgcctaccagcccagcctggtgatcctgggccactacttcaagaagagactgggcctggtgaacggcatcgtgaccgccggcagcagcgtgttcaccatcctgctgcccctgctgctgagagtgctgatcgacagcgtgggcctgttctacaccctgagagtgctgtgcatcttcatgttcgtgctgttcctggccggcttcacctacagacccctggccaccagcaccaaggacaaggagagcggcggcagcggcagcagcctgttcagcagaaagaagttcagcccccccaagaagatcttcaacttcgccatcttcaaggtgaccgcctacgccgtgtgggccgtgggcatccccctggccctgttcggctacttcgtgccctacgtgcacctgatgaagcacgtgaacgagagattccaggacgagaagaacaaggaggtggtgctgatgtgcatcggcgtgaccagcggcgtgggcagactgctgttcggcagaatcgccgactacgtgcccggcgtgaagaaggtgtacctgcaggtgctgagcttcttcttcatcggcctgatgagcatgatgatccccctgtgcagcatcttcggcgccctgatcgccgtgtgcctgatcatgggcctgttcgacggctgcttcatcagcatcatggcccccatcgccttcgagctggtgggcgcccaggacgtgagccaggccatcggcttcctgctgggcttcatgagcatccccatgaccgtgggcccccccatcgccggcctgctgagagacaagctgggcagctacgacgtggccttctacctggccggcgtgccccccctgatcggcggcgccgtgctgtgcttcatcccctggatccacagcaagaagcagagagagatcagcaagaccaccggcaaggagaagatggagaagatgctggagaaccagaacagcctgctgagcagcagcagcggcatgttcaagaaggagagcgacagcatcatctag

SEQ ID NO: 199144 - protein, 379 aa, Artificial Sequence
  derived and/or modified sequence
MAWRGWAQRGWGCGQAWGASVGGRSCEELTAVLTPPQLLGRRFNFFIQQKCGFRKAPRKVEPRRSDPGTSGEAYKRSALIPPVEETVFYPSPYPIRSLIKPLFFTVGFTGCAFGSAAIWQYESLKSRVQSYFDGIKADWLDSIRPQKEGDFRKEINKWWNNLSDGQRTVTGIIAANVLVFCLWRVPSLQRTMIRYFTSNPASKVLCSPMLLSTFSHFSLFHMAANMYVLWSFSSSIVNILGQEQFMAVYLSAGVISNFVSYVGKVATGRYGPSLGASGAIMTVLAAVCTKIPEGRLAIIFLPMFTFTAGNALKAIIAMDTAGMILGWKFFDHAAHLGGALFGIWYVTYGHELIWKNREPLVKIWHEIRTNGPKKGGGSK

SEQ ID NO: 199145 - DNA, 1140 bp, Artificial Sequence
  derived and/or modified sequence
atggcctggagaggatgggcccaaagaggatgggggtgtggccaagcatggggggcttcagtcggaggaagatcgtgcgaggaactgacagccgtcctcaccccccctcagctcctgggcaggcggttcaacttctttattcaacagaagtgtggcttccgcaaagctcctagaaaggtagagccacgcagatctgatcctgggacctctggcgaggcatataaacgatcggctctcatccctcccgtcgaggaaactgtattctatccttccccctaccccattaggtcactaatcaagccccttttttttacagtgggcttcaccggctgcgcattcgggtccgccgctatctggcaatacgagtctctgaagtcccgcgtgcaaagctatttcgatggcattaaagcagactggctggatagtatccgcccacagaaggaaggggatttcaggaaggagattaataagtggtggaacaatctgagtgacggccaacgcactgtcaccggcatcatcgccgcgaatgtgctagtgttctgtctgtggagggtgccgagtctgcagaggacgatgattcgctacttcacaagtaatccggccagcaaggtcctttgtagcccaatgctgctatctacattttcacactttagtctgttccacatggcggctaatatgtatgtgctgtggtctttttcatcatcaattgttaatatactgggccaggagcaattcatggctgtatatctgagtgccggcgtgataagcaatttcgtcagttatgtgggcaaggtcgcaactggccggtacggacccagcttaggtgcaagcggtgcaatcatgactgtcttagcggccgtgtgcaccaagattccagaggggaggctggccattatcttccttccgatgttcactttcactgctggaaacgctctcaaggccattatagctatggataccgcaggcatgattctgggctggaaatttttcgaccacgccgcacaccttggaggcgcactattcggaatctggtatgttacttacggacacgagcttatctggaagaacagggagcctctggtgaagatttggcacgagatcagaacgaacgggcctaaaaagggtggggggtcgaagtag

SEQ ID NO: 199146 - DNA, 1140 bp, Artificial Sequence
  derived and/or modified sequence
atggcctggaggggctgggcccagaggggctggggctgcggccaggcctggggcgcctctgtgggcggccgcagctgtgaggagctgacagctgtgctgaccccaccccagctgctgggccgccgcttcaacttcttcatccagcagaagtgtggcttcaggaaggcccccaggaaggtggagcccaggagaagtgaccccggcaccagcggggaggcctacaagaggtctgccctgatcccccctgtggaggagaccgtcttctaccccagcccctaccccatccgcagcctcatcaagcccctcttcttcaccgtgggcttcaccggctgtgcctttggatctgctgccatctggcagtatgagagcctgaagagccgggtgcagagctactttgatggcatcaaggctgactggctggacagcatccggccccagaaggagggggacttcaggaaggagatcaacaagtggtggaacaacctgagtgatggccagaggacagtgacaggcatcatcgccgccaacgtgctggtgttctgcctgtggagggtgcccagcctgcagaggaccatgatccgctacttcaccagcaacccagccagcaaggtgctgtgcagccccatgctgctgagcaccttcagccacttcagcctcttccacatggccgccaacatgtatgtgctgtggagcttcagcagcagcatcgtgaacatcctgggccaggagcagttcatggctgtgtacctgtctgctggggtcatcagcaactttgtgtcctatgtgggcaaggtggccaccggccgctatggccccagcctgggcgccagcggggccatcatgacagtgctggccgctgtgtgcaccaagatccctgagggccgcctggccatcatcttcctgcccatgttcaccttcaccgctggaaatgccctgaaggccatcatcgccatggacacagctggcatgatcctgggctggaagttctttgaccatgctgcccacctgggcggggccctgtttggcatctggtacgtgacctacggccacgagctgatctggaagaaccgggagcccctggtgaagatctggcatgagatccgcaccaacggccccaagaagggcggcggcagcaagtag

SEQ ID NO: 199147 - DNA, 1140 bp, Artificial Sequence
  derived and/or modified sequence
atggcctggcggggctgggcccagcggggctggggctgcggccaggcttggggcgcaagtgtgggggggagaagttgcgaagaactgacagccgtacttaccccacctcaactgctcggcaggaggttcaacttcttcattcagcagaagtgtggatttcgaaaagcgccccgcaaggtggagcctaggcgctccgatccaggcacttcaggggaggcttacaagagaagcgccctaataccacctgtggaggagacggtgttttacccctcaccctaccccattagatcgcttattaagcccctgttcttcacagtcggctttactgggtgtgcatttggctccgctgcaatttggcagtatgaaagtctgaaaagccgtgtacaatcctactttgatgggatcaaagcagattggctagattcaattagacctcagaaggaaggcgattttcgcaaagaaatcaacaagtggtggaacaacctctccgatggccagcggacggtgacagggattatcgcggccaacgtgcttgtgttttgtttgtggagagtaccatcactccagagaactatgatccggtacttcacaagcaaccccgcttctaaagtgctgtgttcccccatgctgctgtctacattcagccatttctcgctctttcacatggcagctaacatgtacgttctgtggtctttctcgagctcaatcgtgaacattctgggacaagagcaattcatggctgtctaccttagcgctggtgtcattagtaactttgttagctacgtcggaaaggtggctactgggcgctacgggcccagtttgggggcttcaggcgcaatcatgactgtgctggctgccgtgtgtacaaagatccccgaagggcgactcgccatcatctttctgccaatgtttacgttcaccgccggcaacgcattaaaggccattatcgccatggacacagctggcatgatactcgggtggaagttctttgatcatgccgctcacctgggcggcgcactcttcggtatttggtatgtgacgtacgggcatgagctgatttggaaaaatagggaaccacttgtcaagatatggcacgaaattagaaccaatggtcctaagaagggcggtggatccaaatag

SEQ ID NO: 199148 - DNA, 1414 bp, Artificial Sequence
  derived and/or modified sequence
ggaagtagttgcgcagctggggttggtaaggtcgggccatggtggggcagaggttgggaagatggcgtggcgaggctgggcgcagagaggctggggctgcggccaggcgtggggtgcgtcggtgggcggccgcagctgcgaggagctcactgcggtcctaaccccgccgcagctcctcggacgcaggtttaacttctttattcaacaaaaatgcggattcagaaaagcacccaggaaggttgaacctcgaagatcagacccagggacaagtggtgaagcatacaagagaagtgctttgattcctcctgtggaagaaacagtcttttatccttctccctatcctataaggagtctcataaaacctttattttttactgttgggtttacaggctgtgcatttggatcagctgctatttggcaatatgaatcactgaaatccagggtccagagttattttgatggtataaaagctgattggttggatagcataagaccacaaaaagaaggagacttcagaaaggagattaacaagtggtggaataacctaagtgatggccagcggactgtgacaggtattatagctgcaaatgtccttgtattctgtttatggagagtaccttctctgcagcggacaatgatcagatatttcacatcgaatccagcctcaaaggtcctttgttctccaatgttgctgtcaacattcagtcatttctccttatttcacatggcagcaaatatgtatgttttgtggagcttctcttccagcatagtgaacattctgggtcaagagcagttcatggcagtgtacctatctgcaggtgttatttccaattttgtcagttacgtgggtaaagttgccacaggaagatatggaccatcacttggtgcatctggtgccatcatgacagtcctcgcagctgtctgcactaagatcccagaagggaggcttgccattattttccttccgatgttcacgttcacagcagggaatgccctgaaagccattatcgccatggatacagcaggaatgatcctgggatggaaattttttgatcatgcggcacatcttgggggagctctttttggaatatggtatgttacttacggtcatgaactgatttggaagaacagggagccgctagtgaaaatctggcatgaaataaggactaatggccccaaaaaaggaggtggctctaagtaaaactgggattggacagtagtggtgcatctggtccttgccgcctgagagccccaggagacatcggctagagtgaccatggctatgctcccgtctggaagatgccagcatctggcctcccactgttttcagctgtgtcccccagtccgtgtctttttagaatgtgaatgatgataaagttgtgaaataaaggtttctatctagtttgtaagcaga

SEQ ID NO: 199149 - DNA, 1140 bp, Artificial Sequence
  derived and/or modified sequence
atggcttggcggggttgggcacagcggggatgggggtgtggacaagcttggggagcgagcgtggggggtaggagctgcgaggagcttaccgcagtgctgacacccccacagttgctcggaagaagatttaacttcttcattcaacagaagtgtggcttccggaaggccccaaggaaagtcgaacctcggaggtccgaccctgggacgagcggtgaggcatataaacgatccgccctgataccccctgttgaggagacagttttttacccgtcaccctatcccatccggtctttaattaagccactgttcttcaccgtgggcttcactggatgtgcgtttggcagtgccgctatctggcaatacgagtccctgaagagccgcgtccagtcctatttcgatggcatcaaggctgattggttggacagcatacggcctcagaaggagggagactttagaaaagagatcaataaatggtggaacaatctgtcagatgggcaaaggactgtgactggtataattgctgccaatgtgctcgttttttgtttgtggcgagtgccaagcctgcaacgaacaatgatcaggtacttcacctcaaacccggcaagtaaggtgttgtgttctcctatgctgctgtccacttttagccatttttctctgttccacatggccgctaacatgtatgtcctctggtctttctcatcatcgatagtcaatattctgggccaggagcaattcatggccgtgtatctgtctgccggtgtgatctccaactttgtgagctacgttggaaaggtggccaccgggaggtatggcccaagtctgggtgccagcggcgctatcatgactgtgttggcagccgtgtgtactaaaattcccgaggggcgattggccataatatttcttcccatgttcaccttcactgctggcaatgcattaaaggcaatcatcgcaatggatacagcaggtatgatcttggggtggaaatttttcgatcatgctgcccaccttggaggggcactgttcggcatttggtatgtaacatacggccatgagctgatatggaaaaaccgggaaccactggtcaagatttggcatgaaattcgaacgaacggcccaaagaaagggggtgggtcaaaatag

SEQ ID NO: 199150 - DNA, 1140 bp, Artificial Sequence
  derived and/or modified sequence
atggcctggagaggctgggcccagagaggctggggctgcggccaggcctggggcgccagcgtgggcggcagaagctgcgaggagctgaccgccgtgctgacccccccccagctgctgggcagaagattcaacttcttcatccagcagaagtgcggcttcagaaaggcccccagaaaggtggagcccagaagaagcgaccccggcaccagcggcgaggcctacaagagaagcgccctgatcccccccgtggaggagaccgtgttctaccccagcccctaccccatcagaagcctgatcaagcccctgttcttcaccgtgggcttcaccggctgcgccttcggcagcgccgccatctggcagtacgagagcctgaagagcagagtgcagagctacttcgacggcatcaaggccgactggctggacagcatcagaccccagaaggagggcgacttcagaaaggagatcaacaagtggtggaacaacctgagcgacggccagagaaccgtgaccggcatcatcgccgccaacgtgctggtgttctgcctgtggagagtgcccagcctgcagagaaccatgatcagatacttcaccagcaaccccgccagcaaggtgctgtgcagccccatgctgctgagcaccttcagccacttcagcctgttccacatggccgccaacatgtacgtgctgtggagcttcagcagcagcatcgtgaacatcctgggccaggagcagttcatggccgtgtacctgagcgccggcgtgatcagcaacttcgtgagctacgtgggcaaggtggccaccggcagatacggccccagcctgggcgccagcggcgccatcatgaccgtgctggccgccgtgtgcaccaagatccccgagggcagactggccatcatcttcctgcccatgttcaccttcaccgccggcaacgccctgaaggccatcatcgccatggacaccgccggcatgatcctgggctggaagttcttcgaccacgccgcccacctgggcggcgccctgttcggcatctggtacgtgacctacggccacgagctgatctggaagaacagagagcccctggtgaagatctggcacgagatcagaaccaacggccccaagaagggcggcggcagcaagtag

SEQ ID NO: 199151 - protein, 452 aa, Artificial Sequence
  derived and/or modified sequence
MLCGRPRSSSDNRNFLRERAGLSSAAVQTRIGNSAASRRSPAARPPVPAPPALPRGRPGTEGSTSLSAPAVLVVAVAVVVVVVSAVAWAMANYIHVPPGSPEVPKLNVTVQDQEEHRCREGALSLLQHLRPHWDPQEVTLQLFTDGITNKLIGCYVGNTMEDVVLVRIYGNKTELLVDRDEEVKSFRVLQAHGCAPQLYCTFNNGLCYEFIQGEALDPKHVCNPAIFRLIARQLAKIHAIHAHNGWIPKSNLWLKMGKYFSLIPTGFADEDINKRFLSDIPSSQILQEEMTWMKEILSNLGSPVVLCHNDLLCKNIIYNEKQGDVQFIDYEYSGYNYLAYDIGNHFNEFAGVSDVDYSLYPDRELQSQWLRAYLEAYKEFKGFGTEVTEKEVEILFIQVNQFALASHFFWGLWALIQAKYSTIEFDFLGYAIVRFNQYFKMKPEVTALKVPE

SEQ ID NO: 199152 - DNA, 1359 bp, Artificial Sequence
  derived and/or modified sequence
atgctctgtggccggcccaggagttcctcagacaataggaactttctgcgagaaagagccggtctcagctctgctgcagtccagacccggatagggaactccgcagcctctcggaggtcccccgcggcccgtcccccagtgccagcgccccctgcccttcctcggggtcgcccgggaactgaaggaagcacttcacttagcgcccctgccgtcctggttgtcgctgtagcagtcgtggtcgttgtggtgagcgctgtggcatgggctatggccaactacatccacgtgccacccggatccccagaggtgcccaaactgaatgtgactgttcaagaccaggaagagcatcgatgtcgcgaaggcgccctgtcattattgcagcatctacgccctcattgggatccgcaggaggtgactttacagctgtttacagatggaattaccaacaagttgattggttgttacgttggtaatactatggaagacgtcgttctcgttaggatatatggtaacaagaccgaactcctggtagaccgagacgaagaggtgaagtcattccgagtactgcaggcccatggctgcgctccgcagctgtactgtacgtttaacaacggactgtgttatgagttcatccagggcgaagctttagatccaaagcatgtctgcaatcctgcaatctttagactaattgcccgtcaactggctaaaatccacgctattcacgcccacaatggttggatccccaagtctaacctctggctcaagatggggaagtatttctccctgatccccaccgggtttgcagacgaggatattaacaagcgtttcctaagcgacatcccttctagccagatactacaggaagagatgacgtggatgaaagagatcctgtcgaacctgggatctccagtcgtgctatgccacaatgacctgttgtgtaagaatataatttataacgagaaacagggtgatgtgcaatttattgattacgagtacagcgggtacaattatctggcgtacgatataggaaaccacttcaatgagtttgcgggggtctccgacgtggactatagtctttatcctgacagggagctgcagagccagtggctccgggcgtacctggaggcctacaaggaattcaaagggttcgggaccgaggttaccgagaaagaagtggagatcctcttcattcaggtgaatcagttcgccctggcatcacattttttctggggactgtgggctctcatccaagcaaagtactcaaccatcgagttcgattttctgggatatgctattgtgcgattcaaccagtacttcaagatgaagcccgaggtgaccgctcttaaggtgcccgaatag

SEQ ID NO: 199153 - DNA, 1359 bp, Artificial Sequence
  derived and/or modified sequence
atgctgtgtggccggcccaggagcagcagtgacaacagaaacttcctgcgggagcgggccggcctgagcagcgctgctgtgcagaccagaattggcaacagcgctgccagccgccgcagccctgctgcccggccccctgtgcctgcccccccagccctgccccggggccggcccggcacagagggcagcaccagcctgagcgccccagctgtgctggtggtggccgtggccgtggtggtggtggtggtgtctgctgtggcctgggccatggccaactacatccacgtgcccccaggcagccctgaggtgcccaagctgaatgtgacagtgcaggaccaggaggagcaccgctgccgggagggcgccctgagcctgctgcagcacctgcggccccactgggacccccaggaggtgaccctgcagctgttcacagatggcatcaccaacaagctgattggctgctacgtgggcaacaccatggaggatgtggtgctggtgcgcatctacggcaacaagacagagctgctggtggacagagatgaggaggtgaagagcttccgggtgctgcaggcccacggctgtgccccccagctgtactgcaccttcaacaacggcctgtgctatgagttcatccagggcgaggccctggaccccaagcacgtgtgcaacccagccatcttccgcctcatcgcccggcagctggccaagatccacgccatccacgcccacaacggctggatccccaagagcaacctgtggctgaagatgggcaagtacttcagcctcatccccactggatttgctgatgaggacatcaacaagcgcttcctgagtgacatccccagcagccagatcctgcaggaggagatgacctggatgaaggagatcctgagcaacctgggcagccctgtggtgctgtgccacaatgacctgctgtgcaagaacatcatctacaatgagaagcagggagatgtgcagttcatcgactatgagtacagcggctacaactacctggcctatgacatcggcaaccacttcaatgaatttgctggggtgtctgatgtggactacagcctgtacccagaccgggagctgcagagccagtggctgcgggcctacctggaggcctacaaggagttcaagggctttggaacagaggtgacagagaaggaggtggagatcctcttcatccaggtgaaccagtttgccctggccagccacttcttctggggcctgtgggccctgatccaggccaagtacagcaccattgaatttgacttcctgggctacgccatcgtgcgcttcaaccagtacttcaagatgaagccagaggtgacagccctgaaggtgcctgagtag

SEQ ID NO: 199154 - DNA, 1359 bp, Artificial Sequence
  derived and/or modified sequence
atgctgtgcggccggccccggagcagcagcgacaaccggaacttcctaagagagcgggcaggactatcctccgccgccgtgcagacacgtattgggaatagcgccgcatcccgaagaagccctgcggcacgtccacccgtgccggctcctccagcattgcccaggggcagaccgggcaccgagggaagcacatccctcagcgcgcccgctgtgctggtggtggccgttgcggtggtggttgtcgtcgtcagcgcagtcgcgtgggctatggctaattatatacatgttcctccaggctcccccgaggtgcccaaactgaacgtcacagtccaggatcaggaagagcatcgatgccgggaaggcgccctatccctgctgcagcacttacggccgcactgggacccacaggaagtaaccctccaactctttaccgatggcatcactaacaaattgattggatgctatgtaggcaacaccatggaggacgtggtgcttgtccgtatctacgggaacaagactgaattgctggtggatagggatgaagaagttaagagctttcgcgtcctccaagctcatggctgcgcaccacagctgtattgcacatttaacaatggactgtgctatgaatttatccagggcgaagcgttggatcccaagcacgtgtgcaaccccgctatcttcaggctgatcgcccggcagctggccaagatccatgcgatccacgcgcataacgggtggattcccaagtcaaacctctggctgaaaatgggaaagtacttcagcctgatccctacagggttcgccgacgaggacatcaataagcgattcctgagtgacatcccctcatcccagatcctgcaggaagagatgacttggatgaaagaaatcctgtccaacttgggcagtccagttgtcctctgtcataatgacctcttgtgcaagaatataatctataatgagaagcagggagatgtccagttcatcgattacgagtactctggctacaattacctggcctatgacattggaaaccattttaatgagtttgctggcgtgagcgacgtggactatagcttgtaccccgatcgcgagctgcagtcacagtggctgcgagcctacctggaagcctacaaggagttcaaaggctttggaacagaagtcacagagaaagaagtcgaaatacttttcatccaggttaaccagttcgctctggcgagccacttcttctggggactctgggccttgatccaggcgaagtattcaaccatcgaatttgactttctgggttatgccatagttcgatttaaccagtactttaagatgaagcctgaggtgaccgcactgaaggttcctgagtag

SEQ ID NO: 199155 - DNA, 1359 bp, Artificial Sequence
  derived and/or modified sequence
atgttatgcggtcgtccgcgttcatcctccgataaccggaattttctgcgcgagagggccggactgtccagtgctgccgtgcagactcggatcggtaactccgcggctagtcgcagaagtccggcagcaagaccgccagttcctgcacctcctgccctgcccaggggtcgcccaggaaccgagggatccaccagtctatctgcaccggcagtacttgtagtagcggtggcagttgtggtggttgttgtctctgcagtggcgtgggccatggctaattatattcatgtgccacctggcagtcctgaagtgcctaagctgaatgtgaccgtgcaggatcaggaagaacatcgatgtcgggagggcgcactctcactcctgcagcatctccggcctcactgggaccctcaggaggtgaccctgcagctattcaccgacgggatcacaaataagctgatcggatgctatgttggaaacacaatggaggatgtggtcctagtccggatatatggaaataagactgagttgctggtggaccgtgatgaggaggtgaagagcttcagagtcctccaggcgcatggctgtgcccctcaactctattgtacattcaataacggcctttgctatgagttcatccagggcgaagctctggatccaaaacacgtgtgcaacccggctatttttaggctgatcgcaaggcaactagctaagattcacgctatccacgcacacaacgggtggattcctaagagcaatctctggctcaaaatggggaaatacttttccctgatacccaccggctttgccgacgaagacataaacaagaggttcctgagcgacatcccatcatcacaaattttgcaggaggaaatgacttggatgaaagaaatattaagtaatttagggagcccggtcgtgttgtgccacaatgacttgctctgcaaaaacattatttataatgagaaacagggggatgtgcagtttatagactatgagtactcgggatacaactatctggcgtatgatatcggcaaccactttaacgagtttgcgggtgttagcgacgtcgactacagcctgtatccggacagagagttgcaatcccaatggctgagagcttatcttgaagcatataaagaatttaaggggttcggcaccgaggtgacggagaaagaggtggagatcctgtttatccaggttaatcagttcgccctggcttctcatttcttttggggcttatgggccctgatccaggccaagtacagtactatagagtttgattttctaggatatgcgattgttcgattcaatcagtacttcaagatgaaacctgaggtgaccgccttgaaggtcccagaatag

SEQ ID NO: 199156 - DNA, 1359 bp, Artificial Sequence
  derived and/or modified sequence
atgctgtgcggcagacccagaagcagcagcgacaacagaaacttcctgagagagagagccggcctgagcagcgccgccgtgcagaccagaatcggcaacagcgccgccagcagaagaagccccgccgccagaccccccgtgcccgccccccccgccctgcccagaggcagacccggcaccgagggcagcaccagcctgagcgcccccgccgtgctggtggtggccgtggccgtggtggtggtggtggtgagcgccgtggcctgggccatggccaactacatccacgtgccccccggcagccccgaggtgcccaagctgaacgtgaccgtgcaggaccaggaggagcacagatgcagagagggcgccctgagcctgctgcagcacctgagaccccactgggacccccaggaggtgaccctgcagctgttcaccgacggcatcaccaacaagctgatcggctgctacgtgggcaacaccatggaggacgtggtgctggtgagaatctacggcaacaagaccgagctgctggtggacagagacgaggaggtgaagagcttcagagtgctgcaggcccacggctgcgccccccagctgtactgcaccttcaacaacggcctgtgctacgagttcatccagggcgaggccctggaccccaagcacgtgtgcaaccccgccatcttcagactgatcgccagacagctggccaagatccacgccatccacgcccacaacggctggatccccaagagcaacctgtggctgaagatgggcaagtacttcagcctgatccccaccggcttcgccgacgaggacatcaacaagagattcctgagcgacatccccagcagccagatcctgcaggaggagatgacctggatgaaggagatcctgagcaacctgggcagccccgtggtgctgtgccacaacgacctgctgtgcaagaacatcatctacaacgagaagcagggcgacgtgcagttcatcgactacgagtacagcggctacaactacctggcctacgacatcggcaaccacttcaacgagttcgccggcgtgagcgacgtggactacagcctgtaccccgacagagagctgcagagccagtggctgagagcctacctggaggcctacaaggagttcaagggcttcggcaccgaggtgaccgagaaggaggtggagatcctgttcatccaggtgaaccagttcgccctggccagccacttcttctggggcctgtgggccctgatccaggccaagtacagcaccatcgagttcgacttcctgggctacgccatcgtgagattcaaccagtacttcaagatgaagcccgaggtgaccgccctgaaggtgcccgagtag

SEQ ID NO: 199157 - DNA, 2206 bp, Artificial Sequence
  derived and/or modified sequence
gtgaccggaggcgagaaaccccgcctcggcaccctgacgcagcgcaggacccgccccgcgcgtgacgccagcgtcaggccagccccggcatgctctgcggccgcccgcggtccagctccgacaacaggaattttctccgagagcgggccgggctcagttcagctgctgtccagacccggatcggcaacagtgccgcctccagacgttctcctgccgctcgcccgcccgtcccagcgcccccagccctcccgcgagggcgccccgggacggaaggatccaccagtctgtcggcgcccgccgttctcgtggtcgccgtcgccgtcgtcgtggtggtagtctccgccgtcgcctgggccatggccaattacatccacgtccctcccggctccccggaggtgcccaagctgaacgtcaccgttcaggatcaggaggagcatcgctgccgggagggggccctgagcctcctgcaacacctgcggcctcactgggacccccaggaggtgaccctgcagctcttcacagatggaatcacaaataaacttattggctgttacgtgggaaacaccatggaggatgtagtcctggtgagaatttatggcaataagactgagttattagtcgatcgagatgaggaagtaaagagttttcgagtgttgcaggctcatgggtgtgcaccacaactctactgtaccttcaataatggactatgctatgaatttatacaaggagaagcactggatccaaagcatgtctgcaacccagccattttcaggctaatagctcgtcagcttgctaaaatccatgctattcatgcacacaatggctggatccccaaatctaatctttggctaaagatgggaaagtatttctctctcattcccacaggatttgcagatgaagacattaataaaaggttcctaagtgatatcccaagctctcagattctccaggaagagatgacttggatgaaggagattctttccaacctgggctcacctgttgtgctttgccataatgacctattgtgtaagaatataatctacaatgagaaacaaggtgatgtacagttcattgattatgaatattctggatacaactacctggcatatgatattggaaatcatttcaatgaatttgcaggtgtgagtgatgtagactatagtctgtatccagatagagaactacagagtcagtggctgcgtgcttaccttgaagcctacaaagaatttaagggctttgggactgaagttactgaaaaggaggtagaaatactcttcattcaagtcaatcagtttgcattggcttctcatttcttttggggattgtgggctttgattcaagccaaatactccactattgagtttgatttccttgggtatgcaattgttcgttttaaccagtactttaaaatgaagcctgaggttactgcattaaaagtgcctgagtaaagaagagatttaattattctccagtagctgagcaatgcttgtgaatcttttcttaagaaatcccaaaaagccaatattagttaaaattctgttgtttaatttggttatcttgctttataaattatgcctctaaacaatcaaatctatttttgaaatagactgaatgatgtcaagaaatatacctactgctatccgtatgtggtggattagaaatgtgttaaatctgcaaaaggtataaagatgtcagtttaatttctttgataatttaacctatgttgtatgtgaattatttattataaacttagcacgattctgtgactgtttttctctgtttcacgttcgttgagtgtaagcaatgaaaatgtcccaaataagttttttaagttttactttaataagattaatttcagtaaacattctagttgttcagtgtaacctttttatcttgatgcattgtaagtaaaatgaatcatttactcttgaaatgccagtcattgactgatgtagataatttaggattttcatataaaaatagctgtttaggaaggtgaaatacattcactgtctctgttggtggtacatcttgttgaattcaatattagaaagtatttctttttggggtaatataacttagaattaaatccctgtttctctatgtagtctggcagtataaatataaatatttaccatataatcttggaataagtattagttaatgttaccaaaatctgtattaaataatgttttcaaatgctaaa

SEQ ID NO: 199158 - protein, 234 aa, Artificial Sequence
  derived and/or modified sequence
MRKTRLWGLLWMLFVSELRAATKLTEEKYELKEGQTLDVKCDYTLEKFASSQKAWQIIRDGEMPKTLACTERPSKNSHPVQVGRIILEDYHDHGLLRVRMVNLQVEDSGLYQCVIYQPPKEPHMLFDRIRLVVTKGFSGTPGSNENSTQNVYKIPPTTTKALCPLYTSPRTVTQAPPKSTADVSTPDSEINLTNVTDIIRVPVFNIVILLAGGFLSKSLVFSVLFAVTLRSFVP

SEQ ID NO: 199159 - DNA, 705 bp, Artificial Sequence
  derived and/or modified sequence
atgagaaagaccagactgtggggcctgctgtggatgctgttcgtgagcgagctgagagccgccaccaagctgaccgaggagaagtacgagctgaaggagggccagaccctggacgtgaagtgcgactacaccctggagaagttcgccagcagccagaaggcctggcagatcatcagagacggcgagatgcccaagaccctggcctgcaccgagagacccagcaagaacagccaccccgtgcaggtgggcagaatcatcctggaggactaccacgaccacggcctgctgagagtgagaatggtgaacctgcaggtggaggacagcggcctgtaccagtgcgtgatctaccagccccccaaggagccccacatgctgttcgacagaatcagactggtggtgaccaagggcttcagcggcacccccggcagcaacgagaacagcacccagaacgtgtacaagatcccccccaccaccaccaaggccctgtgccccctgtacaccagccccagaaccgtgacccaggccccccccaagagcaccgccgacgtgagcacccccgacagcgagatcaacctgaccaacgtgaccgacatcatcagagtgcccgtgttcaacatcgtgatcctgctggccggcggcttcctgagcaagagcctggtgttcagcgtgctgttcgccgtgaccctgagaagcttcgtgccctag

SEQ ID NO: 199160 - DNA, 705 bp, Artificial Sequence
  derived and/or modified sequence
atgcgcaagactagactgtggggccttttgtggatgctgtttgtgtcagagctgcgagccgcaactaaattgaccgaggaaaagtacgaactcaaggaggggcaaacgctcgacgttaaatgcgattatacgcttgagaagtttgctagcagccagaaagcgtggcagatcattagggatggcgaaatgcctaaaaccttggcctgtaccgaacgacccagtaagaattcacatcccgttcaggtgggccgcataatcctggaggattaccacgatcatgggctcctaagagtgagaatggttaacctgcaagtcgaggatagtggcctttatcaatgtgtaatctatcagccaccaaaggagccgcacatgctatttgatcgaattcgccttgttgtaactaaaggattttcagggactcccggttctaacgaaaacagtacccagaacgtctataaaatccctcctactaccaccaaggcattatgtcccctatatacctctccaagaacagtcactcaggctccccccaagagcaccgctgacgtgagcacccccgactccgaaattaacctcactaacgtcaccgatataatcagagtgcccgtgtttaacattgtgatcttgttagcagggggctttctcagtaagtccctggtgttctcggtgctgttcgctgtaacactgcgctccttcgtgccctag

SEQ ID NO: 199161 - DNA, 705 bp, Artificial Sequence
  derived and/or modified sequence
atgaggaagacccggctgtggggcctgctgtggatgctgtttgtgtctgagctgcgggccgccaccaagctgacagaggagaagtatgagctgaaggagggccagaccctggatgtgaagtgtgactacaccctggagaagtttgccagcagccagaaggcctggcagatcatcagagatggagagatgcccaagaccctggcctgcacagagcggcccagcaagaacagccaccctgtgcaggtgggccgcatcatcctggaggactaccatgaccacggcctgctgcgggtgaggatggtgaacctgcaggtggaggacagcggcctgtaccagtgtgtgatctaccagccccccaaggagccccacatgctgtttgaccgcatccggctggtggtgaccaagggcttcagcggcaccccaggcagcaatgaaaacagcacccagaatgtgtacaagatcccccccaccaccaccaaggccctgtgccccctgtacaccagccccaggacagtgacccaggccccacccaagagcacagcagatgtgtccaccccagacagcgagatcaacctgaccaacgtgacagacatcatccgggtgcctgtgttcaacatcgtcatcctgctggccggcggcttcctgagcaagagcctggtgttttctgtgctgtttgctgtgaccctgcggagctttgtgccctag

SEQ ID NO: 199162 - DNA, 705 bp, Artificial Sequence
  derived and/or modified sequence
atgcggaagacccggctgtggggcctgctgtggatgctgttcgtgagcgaattacgcgcggccacaaagctcacggaggagaagtacgagctcaaagaagggcagaccttagatgtaaagtgcgactataccctcgagaagttcgcttctagtcagaaggcctggcagatcattagagacggcgagatgcccaagacactagcatgtactgagcgccccagcaagaactcacatcccgtgcaggtcggcaggatcattctggaagattaccatgaccatgggctgctgcgcgtcagaatggtgaacctgcaggtggaagactccggcttgtaccagtgtgtgatctaccagcccccgaaagaaccacacatgctgttcgaccgcatcaggctggtggtcacaaagggattctccggaacgcctggatctaatgagaacagtactcagaacgtgtataagattcctcctacaactacgaaggccctctgcccgttgtacacatcgccgagaaccgttactcaggccccccctaagtccacagcagacgtatcgactcccgacagcgagatcaatttaaccaatgtgaccgatatcatcagggttccggtgttcaatattgttatactcctcgccggaggcttcctctcgaagtcactggtgtttagtgtcttatttgctgtgaccctcagatcctttgtaccctag

SEQ ID NO: 199163 - DNA, 705 bp, Artificial Sequence
  derived and/or modified sequence
atgcggaagacgcgactttggggtctgttatggatgctgttcgtctctgagctgagagccgcaacgaagctgaccgaggaaaagtatgagctgaaggagggccaaaccttggacgtaaaatgcgattacacattagaaaagttcgcgtcttcccaaaaggcatggcaaattatccgtgatggagagatgcccaaaacattggcatgtactgagcggccttccaaaaactctcaccccgtgcaggtgggcagaattatcctggaagattatcacgaccacgggctgctacgtgtgcgtatggtgaatctccaggtcgaagattccggactgtatcagtgcgtcatttaccagccaccaaaggagccccacatgttgtttgatagaatcagactggttgtgactaaggggtttagcgggacgcccggatcaaacgaaaactcaacgcagaatgtgtacaagattccaccgacaacaacgaaggccctttgtcccctttatacctctcccagaacagttacccaagcgcctcccaagtcaactgctgacgtttccacacccgacagtgagatcaacctaaccaacgtcacggatatcatccgagtccccgtcttcaatatcgtgatcctgctcgccggagggtttttgagcaaatccttggtgtttagcgttctctttgcagtgacattgcgctctttcgtcccctag

SEQ ID NO: 199164 - DNA, 920 bp, Artificial Sequence
  derived and/or modified sequence
attgtggtgccttgtagctgtcccgggagccctcagcagcagttggagctggtgcacaggaaggatgaggaagaccaggctctgggggctgctgtggatgctctttgtctcagaactccgagctgcaactaaattaactgaggaaaagtatgaactgaaagaggggcagaccctggatgtgaaatgtgactacacgctagagaagtttgccagcagccagaaagcttggcagataataagggacggagagatgcccaagaccctggcatgcacagagaggccttcaaagaattcccatccagtccaagtggggaggatcatactagaagactaccatgatcatggtttactgcgcgtccgaatggtcaaccttcaagtggaagattctggactgtatcagtgtgtgatctaccagcctcccaaggagcctcacatgctgttcgatcgcatccgcttggtggtgaccaagggtttttcagggacccctggctccaatgagaattctacccagaatgtgtataagattcctcctaccaccactaaggccttgtgcccactctataccagccccagaactgtgacccaagctccacccaagtcaactgccgatgtctccactcctgactctgaaatcaaccttacaaatgtgacagatatcatcagggttccggtgttcaacattgtcattctcctggctggtggattcctgagtaagagcctggtcttctctgtcctgtttgctgtcacgctgaggtcatttgtaccctaggcccacgaacccacgagaatgtcctctgacttccagccacatccatctggcagttgtgccaagggaggagggaggaggtaaaaggcagggagttaataacatgaattaaatctgtaatcaccggctatttctaaagtcagcgtctcacctt

SEQ ID NO: 199165 - protein, 224 aa, Artificial Sequence
  derived and/or modified sequence
MAPPAAPGRDRVGREDEDGWETRGDRKARKPLVEKKRRARINESLQELRLLLAGAEVQAKLENAEVLELTVRRVQGVLRGRAREREQLQAEASERFAAGYIQCMHEVHTFVSTCQAIDATVAAELLNHLLESMPLREGSSFQDLLGDALAGPPRAPGRSGWPAGGAPGSPIPSPPGPGDDLCSDLEEAPEAELSQAPAEGPDLVPAALGSLTTAQIARSVWRPW

SEQ ID NO: 199166 - protein, 214 aa, Artificial Sequence
  derived and/or modified sequence
MAPPAAPGRDRVGREDEDGWETRGDRKARKPLVEKKRRARINESLQELRLLLAGAEVQAKLENAEVLELTVRRVQGVLRGRARGEWRRGGRGRRPRAPVTPARRRTSLPAPLSCRRRGLPPEQGAPPRLLGEPRPRGPGGLGHAVAAHRAGRGSLPPTLGPRARAAAGGSERALRCRLHPVHARGAHVRVHVPGHRRYRRCRAPEPSARVHAAA

SEQ ID NO: 199167 - DNA, 1386 bp, Artificial Sequence
  derived and/or modified sequence
ggaagccgcgaggagcgcggacggctgggctgctgctgggcggccgcggggcagcggagggcgccggcactccggtccccgccgctccccgtccccgctgctcctagcccctgccgcgtccccggcggagcgggcatggcgccacccgcggcgcctggccgggaccgtgtgggccgtgaggatgaggacggctgggagacgcgaggggaccgcaaggcccggaagcccctggtggagaagaagcggcgcgcgcggatcaacgagagcctgcaggagctgcggctgctgctggcgggcgccgaggtgcaggccaagctggagaacgccgaagtgctggagctgacggtgcggcgggtccagggtgtgctgcggggccgggcgcgcgagcgcgagcagctgcaggcggaagcgagcgagcgcttcgctgccggctacatccagtgcatgcacgaggtgcacacgttcgtgtccacgtgccaggccatcgacgctaccgtcgctgccgagctcctgaaccatctgctcgagtccatgccgctgcgtgagggcagcagcttccaggatctgctgggggacgccctggcggggccacctagagcccctggacggagtggctggcctgcggggggcgctccgggatccccaatacccagccccccgggtcctggggacgacctgtgctccgacctggaggaggcccctgaggctgaactgagtcaggctcctgctgaggggcccgacttggtgcccgcagccctgggcagcctgaccacagcccaaattgcccggagtgtctggaggccttggtgaccaatgccagccagagtcctgcgggggtgggcccggccctccctggatctcctccctcctcccaggggttcagatgtggtggggtagggccctggaagtctcccaggtcttccctccctcctctgatggatggcttgcagggcagcccctggtaaccagcccagtcaggccccagccccgtttcttaagaaacttttagggaccctgcagctctggagtgggtggagggagggagctacgggcaggaggaagaattttgtagagctgccagcgctctcccaggttcacccacccaggcttcaccagccctgtgcgggctctgggggcagaggtggcagaaatggtgctgggcactagtgttccaggcagccctgggctaaacaaaagcttgaacttgccacttcagcggggagatgagaggcaggtgcactgagctgcactgcccagagctgtgatgctctgtacatcttgtttgtagcacacttgagtttgtgtattccattgacatcaaatgtgacaattttactaaataaagaattttggagttagttacccttgaaaaaaaaaaaaaaaaaa

SEQ ID NO: 199168 - DNA, 675 bp, Artificial Sequence
  derived and/or modified sequence
atggcaccaccagcggcacctggaagagaccgcgtgggaagggaagacgaggatggctgggagactagaggggataggaaggcccgaaaaccactggttgaaaaaaaacggcgggccagaattaacgaaagtctccaggaactcaggctcctactggcgggggccgaggtccaggctaagttggagaatgcagaggttctcgaactcacggtgaggagggtccaaggcgtcttgaggggcagggccagagagagggagcagctgcaggccgaggcgtcagaacgattcgctgcaggatacatacagtgcatgcatgaggtgcatacttttgtatccacgtgccaggcaatcgatgcaaccgtggcagcagaactgttgaaccacttgttagaaagtatgccactcagagagggctcgagctttcaggatcttctgggcgatgccctggccggcccacctagagcacctgggagatccggctggcccgcagggggtgctcccggctcaccgatcccgagccccccagggcccggagacgacctgtgctcagacttagaggaggcccccgaggcagaacttagccaggcgccagccgagggcccagatctcgtgcctgcagctctcggttcattgacaacagcccagatcgccaggtccgtgtggagaccctggtag

SEQ ID NO: 199169 - DNA, 645 bp, Artificial Sequence
  derived and/or modified sequence
atggctccccctgctgctccgggtagggacagagtcgggcgcgaggatgaggatgggtgggaaactagaggggaccgcaaggctcgaaaacccctagtggaaaagaagcgccgcgcgcgaattaatgaatcattgcaggagcttcgcctgttgctggccggtgctgaagtacaggctaagctggaaaacgccgaggttcttgaacttactgtgagaagggtccaaggtgtgctgcgtgggcgcgcccgtggggagtggcggcgcggtggacgcgggaggagaccccgggctccagtgacacccgcccgccgccgtacatctctccccgcccccctgtcatgccggaggcgagggctgcctcccgaacagggggctccacctcggctgctgggcgaaccaagaccacgtggacccgggggccttggccacgccgtcgctgcccaccgagccggacgcggtagcctgccaccgacactcggcccccgggctagggctgctgcgggaggatctgaacgcgcacttaggtgtcgactccatcctgtgcatgccaggggagcccatgtaagagtccacgtgcctggccataggcgataccgccgatgcagagctcccgaacctagcgcccgtgtgcacgctgctgcctag

SEQ ID NO: 199170 - DNA, 1454 bp, Artificial Sequence
  derived and/or modified sequence
gtcggccgccccgggcccgcgcggccaatcggcgcattgagatgcaaataagcggctataaaaggggcgggaccgcggcgggccggaagccgcgaggagcgcggacggctgggctgctgctgggcggccgcggggcagcggagggcgccggcactccggtccccgccgctccccgtccccgctgctcctagcccctgccgcgtccccggcggagcgggcatggcgccacccgcggcgcctggccgggaccgtgtgggccgtgaggatgaggacggctgggagacgcgaggggaccgcaaggcccggaagcccctggtggagaagaagcggcgcgcgcggatcaacgagagcctgcaggagctgcggctgctgctggcgggcgccgaggtgcaggccaagctggagaacgccgaagtgctggagctgacggtgcggcgggtccagggtgtgctgcggggccgggcgcgcgagcgcgagcagctgcaggcggaagcgagcgagcgcttcgctgccggctacatccagtgcatgcacgaggtgcacacgttcgtgtccacgtgccaggccatcgacgctaccgtcgctgccgagctcctgaaccatctgctcgagtccatgccgctgcgtgagggcagcagcttccaggatctgctgggggacgccctggcggggccacctagagcccctggacggagtggctggcctgcggggggcgctccgggatccccaatacccagccccccgggtcctggggacgacctgtgctccgacctggaggaggcccctgaggctgaactgagtcaggctcctgctgaggggcccgacttggtgcccgcagccctgggcagcctgaccacagcccaaattgcccggagtgtctggaggccttggtgaccaatgccagccagagtcctgcgggggtgggcccggccctccctggatctcctccctcctcccaggggttcagatgtggtggggtagggccctggaagtctcccaggtcttccctccctcctctgatggatggcttgcagggcagcccctggtaaccagcccagtcaggccccagccccgtttcttaagaaacttttagggaccctgcagctctggagtgggtggagggagggagctacgggcaggaggaagaattttgtagagctgccagcgctctcccaggttcacccacccaggcttcaccagccctgtgcgggctctgggggcagaggtggcagaaatggtgctgggcactagtgttccaggcagccctgggctaaacaaaagcttgaacttgccacttcagcggggagatgagaggcaggtgcactgagctgcactgcccagagctgtgatgctctgtacatcttgtttgtagcacacttgagtttgtgtattccattgacatcaaatgtgacaattttactaaataaagaattttggagttagttacccttgaa

SEQ ID NO: 199171 - DNA, 675 bp, Artificial Sequence
  derived and/or modified sequence
atggcccctcctgctgcccctggccgggacagagtgggcagagaagatgaagatggctgggagaccaggggggacaggaaggccaggaagcccctggtggagaagaagagaagagcccgcatcaatgaaagcctgcaggagctgcggctgctgctggccggggctgaggtgcaggccaagctggagaatgctgaggtgctggagctgactgtgcggcgggtgcagggcgtgctgcggggccgggcccgggagcgggagcagctgcaggccgaggccagcgagagatttgctgctggctacatccagtgcatgcatgaggtgcacacctttgtgtccacctgccaggccattgatgccaccgtggccgctgagctgctgaaccacctgctggagagcatgcccctgcgggagggcagcagcttccaggacctgctgggagatgccctggccggccccccccgggcccctggccgcagcggctggccagctggaggagcccctggcagccccatccccagccccccaggccctggagatgacctgtgcagcgacctggaggaggcccctgaggccgagctgagccaggccccagctgagggccctgacctggtgcctgctgccctgggcagcctgaccacagcccagatcgcccggtctgtgtggaggccctggtag

SEQ ID NO: 199172 - DNA, 645 bp, Artificial Sequence
  derived and/or modified sequence
atggcccctcctgctgcccctggccgggacagagtgggcagagaagatgaagatggctgggagaccaggggggacaggaaggccaggaagcccctggtggagaagaagagaagagcccgcatcaatgaaagcctgcaggagctgcggctgctgctggccggggctgaggtgcaggccaagctggagaatgctgaggtgctggagctgactgtgcggcgggtgcagggcgtgctgcggggccgggcccggggggagtggaggagaggaggccggggcagaagaccccgggcccctgtgaccccagcccggcggaggaccagcctgcctgcccccctgagctgcagaagaagaggcctgcccccagagcagggcgccccaccccggctgctgggggagccccggccccggggccctgggggcctgggccatgctgtggccgcccaccgggccggccggggcagcctgccccccaccctgggcccccgggcccgggctgctgctgggggcagcgagcgggccctgcgctgccgcctgcaccctgtgcacgcccggggggcccacgtgcgggtgcacgtgcccggccaccggcgctaccgccgctgccgggcccctgagcccagcgcccgggtgcacgccgccgcctag

SEQ ID NO: 199173 - DNA, 675 bp, Artificial Sequence
  derived and/or modified sequence
atggccccccccgccgcccccggccgggaccgggtgggccgggaggatgaagacggatgggagacccgcggagacaggaaagcaaggaagcccctggtcgaaaagaagcgcagggctcgcattaacgagtccctgcaggaattgcgcttgctcttagctggcgccgaggtgcaggccaagttggaaaacgcagaagttctggagctgaccgtgaggagagtgcagggcgttctgcgggggcgagcccgagaacgtgaacagttacaggcagaggcatctgagcggtttgcagccggctacattcagtgcatgcacgaggtgcacacattcgtgagcacctgtcaggcgattgacgctactgttgccgctgaactcttgaaccacctgctcgaatctatgcccctcagggagggctcctcattccaggatctgttgggggacgccttggccgggccacctagagctccagggcgctcaggttggcctgccgggggggccccgggcagccctattcccagcccccctggcccaggggacgacttgtgctccgacttggaggaagcccctgaggccgaattatcccaggccccggctgaagggcctgacctggtcccggctgccctcggtagcttgactactgctcaaatcgctagatccgtttggaggccttggtag

SEQ ID NO: 199174 - DNA, 645 bp, Artificial Sequence
  derived and/or modified sequence
atggccccccccgccgcccccggccgggaccgggtgggccgggaggacgaggacggttgggagaccagaggcgacagaaaggccaggaagcctctagtagaaaaaaaaagacgggcccgcatcaatgagagtcttcaagagcttcggctacttctcgctggggcggaagttcaggctaagctcgagaacgccgaggtgctcgagcttaccgtgcgtcgggtgcagggagtgcttcgtggcagagcccggggtgagtggaggcgagggggacgcgggagacgcccccgagcccctgtgacacccgcgagaagacgcacatctctacccgctccactgagctgcaggcgcagaggtctgccacctgaacagggtgcacccccaaggctgctgggggagccacgaccacgggggcccggggggttgggccacgccgtggccgcccatcgcgcggggcgcggatcactccctccaacactgggcccgcgcgctcgcgcggctgccggcggcagcgagagagccttgcgctgcagactccacccagtccatgcccgcggcgcgcatgtgcgggttcatgtaccagggcaccggaggtacagaaggtgtagagcacccgagccttcagctcgggtccacgccgcagcctag

SEQ ID NO: 199175 - DNA, 675 bp, Artificial Sequence
  derived and/or modified sequence
atggcaccccctgccgctcctggacgcgatcgagtgggccgagaagatgaagatggatgggaaaccaggggcgatagaaaggcaaggaagccactggtcgagaagaagaggcgcgcacgcattaacgagtctctccaggagctgaggcttctactagccggagccgaggtccaggcaaaactggaaaatgcagaggtgctcgagctgacagtgaggcgagtgcaaggagtgctccgcggacgggctcgcgagagagagcagctgcaggccgaagcttctgagcgcttcgccgctgggtatattcagtgcatgcacgaggtccatacattcgtctcgacttgtcaggccatagacgcaacggttgcggcagagttgctaaatcacctcctcgaatccatgccattgagggaggggagttcttttcaagatctcctgggcgatgcactggccggacctccacgcgcaccaggaagaagcgggtggcctgcaggcggagctccgggttccccgatcccatcaccgcctggacctggcgacgacctgtgcagtgacctggaggaggcccctgaggccgaactgtcccaggccccagcagaaggccctgatctcgtgccagctgcccttggatccctcactacagcacagatagccaggagcgtttggcggccttggtag

SEQ ID NO: 199176 - DNA, 645 bp, Artificial Sequence
  derived and/or modified sequence
atggcccctcccgcagccccaggccgtgatcgtgtaggccgagaggatgaggatggatgggagacacggggagaccgcaaagccaggaaaccactagtcgagaagaaaaggcgtgcacgcataaacgaatctcttcaagagttgagattgctgctggcaggagccgaagttcaggccaaactggagaacgcagaggtgcttgaactgactgtgaggagagttcaaggcgtcctgcggggaagggcccgtggtgagtggcgccgtgggggaagaggcagaagacctcgcgcacctgtcacacccgctcgtaggcgtacatcgttaccagcccctctgagctgtcggagacggggtttgccgccagaacagggagcccctcccaggcttctaggagagccacgaccccgtggtccaggcggacttgggcatgccgtggccgcacacagagcaggacgtggatctctgccccctacccttggacccagagcaagggctgccgcagggggaagtgagagagccttgaggtgtagactgcatccagtgcacgctaggggtgcacacgtgcgggtgcacgtgccaggacatcgacgctaccgccgttgtagggcccctgagcctagtgccagagtgcacgccgctgcttag

SEQ ID NO: 199177 - DNA, 675 bp, Artificial Sequence
  derived and/or modified sequence
atggccccccccgccgcccccggcagagacagagtgggcagagaggacgaggacggctgggagaccagaggcgacagaaaggccagaaagcccctggtggagaagaagagaagagccagaatcaacgagagcctgcaggagctgagactgctgctggccggcgccgaggtgcaggccaagctggagaacgccgaggtgctggagctgaccgtgagaagagtgcagggcgtgctgagaggcagagccagagagagagagcagctgcaggccgaggccagcgagagattcgccgccggctacatccagtgcatgcacgaggtgcacaccttcgtgagcacctgccaggccatcgacgccaccgtggccgccgagctgctgaaccacctgctggagagcatgcccctgagagagggcagcagcttccaggacctgctgggcgacgccctggccggcccccccagagcccccggcagaagcggctggcccgccggcggcgcccccggcagccccatccccagcccccccggccccggcgacgacctgtgcagcgacctggaggaggcccccgaggccgagctgagccaggcccccgccgagggccccgacctggtgcccgccgccctgggcagcctgaccaccgcccagatcgccagaagcgtgtggagaccctggtag

SEQ ID NO: 199178 - DNA, 645 bp, Artificial Sequence
  derived and/or modified sequence
atggccccccccgccgcccccggcagagacagagtgggcagagaggacgaggacggctgggagaccagaggcgacagaaaggccagaaagcccctggtggagaagaagagaagagccagaatcaacgagagcctgcaggagctgagactgctgctggccggcgccgaggtgcaggccaagctggagaacgccgaggtgctggagctgaccgtgagaagagtgcagggcgtgctgagaggcagagccagaggcgagtggagaagaggcggcagaggcagaagacccagagcccccgtgacccccgccagaagaagaaccagcctgcccgcccccctgagctgcagaagaagaggcctgccccccgagcagggcgccccccccagactgctgggcgagcccagacccagaggccccggcggcctgggccacgccgtggccgcccacagagccggcagaggcagcctgccccccaccctgggccccagagccagagccgccgccggcggcagcgagagagccctgagatgcagactgcaccccgtgcacgccagaggcgcccacgtgagagtgcacgtgcccggccacagaagatacagaagatgcagagcccccgagcccagcgccagagtgcacgccgccgcctag

SEQ ID NO: 199179 - protein, 557 aa, Artificial Sequence
  derived and/or modified sequence
MGLSLPKEKGLILCLWSKFCRWFQDSLGNTVLHILILQPNKTFACQMYNLLLSYDRHGDHLQPLDLVPNHQGLTPFKLAGVEGNTVMFQHLMQKRKHTQWTYGPLTSTLYDLTEIDSSGDEQSLLELIITTKKREARQILDQTPVKELVSLKWKRYGRPYFCMLGAIYLLYIICFTMCCIYRPLKPRTNNRTSPRDNTLLQQKLLQEAYMTPKDDIRLVGELVTVIGAIIILLVEVPDIFRMGVTRFFGQTILGGPFHVLIITYAFMVLVTMVMRLISASGEVVPMSFALVLGWCNVMYFARGFQMLGPFTIMIQKMIFGDLMRFCWLMAVVILGFASAFYIIFQTEDPEELGHFYDYPMALFSTFELFLTIIDGPANYNVDLPFMYSITYAAFAIIATLLMLNLLIAMMGDTHWRVAHERDELWRAQIVATTVMLERKLPRCLWPRSGICGREYGLGDRWFLRVEDRQDLNRQRIQRYAQAFHTRGSEDLDKDSVEKLELGCPFSPHLSLPMPSVSRSTSRSSANWERLRQGTLRRDLRGIINRGLEDGESWEYQI

SEQ ID NO: 199180 - protein, 725 aa, Artificial Sequence
  derived and/or modified sequence
MGLSLPKEKGLILCLWSKFCRWFQRRESWAQSRDEQNLLQQKRIWESPLLLAAKDNDVQALNKLLKYEDCKVHQRGAMGETALHIAALYDNLEAAMVLMEAAPELVFEPMTSELYEGQTALHIAVVNQNMNLVRALLARRASVSARATGTAFRRSPCNLIYFGEHPLSFAACVNSEEIVRLLIEHGADIRAQDSLGNTVLHILILQPNKTFACQMYNLLLSYDRHGDHLQPLDLVPNHQGLTPFKLAGVEGNTVMFQHLMQKRKHTQWTYGPLTSTLYDLTEIDSSGDEQSLLELIITTKKREARQILDQTPVKELVSLKWKRYGRPYFCMLGAIYLLYIICFTMCCIYRPLKPRTNNRTSPRDNTLLQQKLLQEAYMTPKDDIRLVGELVTVIGAIIILLVEVPDIFRMGVTRFFGQTILGGPFHVLIITYAFMVLVTMVMRLISASGEVVPMSFALVLGWCNVMYFARGFQMLGPFTIMIQKMIFGDLMRFCWLMAVVILGFASAFYIIFQTEDPEELGHFYDYPMALFSTFELFLTIIDGPANYNVDLPFMYSITYAAFAIIATLLMLNLLIAMMGDTHWRVAHERDELWRAQIVATTVMLERKLPRCLWPRSGICGREYGLGDRWFLRVEDRQDLNRQRIQRYAQAFHTRGSEDLDKDSVEKLELGCPFSPHLSLPMPSVSRSTSRSSANWERLRQGTLRRDLRGIINRGLEDGESWEYQI

SEQ ID NO: 199181 - DNA, 1674 bp, Artificial Sequence
  derived and/or modified sequence
atgggcctgagcctgcccaaggagaagggcctgatcctgtgcctgtggagcaagttctgcagatggttccaggacagcctgggcaacaccgtgctgcacatcctgatcctgcagcccaacaagaccttcgcctgccagatgtacaacctgctgctgagctacgacagacacggcgaccacctgcagcccctggacctggtgcccaaccaccagggcctgacccccttcaagctggccggcgtggagggcaacaccgtgatgttccagcacctgatgcagaagagaaagcacacccagtggacctacggccccctgaccagcaccctgtacgacctgaccgagatcgacagcagcggcgacgagcagagcctgctggagctgatcatcaccaccaagaagagagaggccagacagatcctggaccagacccccgtgaaggagctggtgagcctgaagtggaagagatacggcagaccctacttctgcatgctgggcgccatctacctgctgtacatcatctgcttcaccatgtgctgcatctacagacccctgaagcccagaaccaacaacagaaccagccccagagacaacaccctgctgcagcagaagctgctgcaggaggcctacatgacccccaaggacgacatcagactggtgggcgagctggtgaccgtgatcggcgccatcatcatcctgctggtggaggtgcccgacatcttcagaatgggcgtgaccagattcttcggccagaccatcctgggcggccccttccacgtgctgatcatcacctacgccttcatggtgctggtgaccatggtgatgagactgatcagcgccagcggcgaggtggtgcccatgagcttcgccctggtgctgggctggtgcaacgtgatgtacttcgccagaggcttccagatgctgggccccttcaccatcatgatccagaagatgatcttcggcgacctgatgagattctgctggctgatggccgtggtgatcctgggcttcgccagcgccttctacatcatcttccagaccgaggaccccgaggagctgggccacttctacgactaccccatggccctgttcagcaccttcgagctgttcctgaccatcatcgacggccccgccaactacaacgtggacctgcccttcatgtacagcatcacctacgccgccttcgccatcatcgccaccctgctgatgctgaacctgctgatcgccatgatgggcgacacccactggagagtggcccacgagagagacgagctgtggagagcccagatcgtggccaccaccgtgatgctggagagaaagctgcccagatgcctgtggcccagaagcggcatctgcggcagagagtacggcctgggcgacagatggttcctgagagtggaggacagacaggacctgaacagacagagaatccagagatacgcccaggccttccacaccagaggcagcgaggacctggacaaggacagcgtggagaagctggagctgggctgccccttcagcccccacctgagcctgcccatgcccagcgtgagcagaagcaccagcagaagcagcgccaactgggagagactgagacagggcaccctgagaagagacctgagaggcatcatcaacagaggcctggaggacggcgagagctgggagtaccagatctag

SEQ ID NO: 199182 - DNA, 2178 bp, Artificial Sequence
  derived and/or modified sequence
atgggcctgagcctgcccaaggagaagggcctgatcctgtgcctgtggagcaagttctgcagatggttccagagaagagagagctgggcccagagcagagacgagcagaacctgctgcagcagaagagaatctgggagagccccctgctgctggccgccaaggacaacgacgtgcaggccctgaacaagctgctgaagtacgaggactgcaaggtgcaccagagaggcgccatgggcgagaccgccctgcacatcgccgccctgtacgacaacctggaggccgccatggtgctgatggaggccgcccccgagctggtgttcgagcccatgaccagcgagctgtacgagggccagaccgccctgcacatcgccgtggtgaaccagaacatgaacctggtgagagccctgctggccagaagagccagcgtgagcgccagagccaccggcaccgccttcagaagaagcccctgcaacctgatctacttcggcgagcaccccctgagcttcgccgcctgcgtgaacagcgaggagatcgtgagactgctgatcgagcacggcgccgacatcagagcccaggacagcctgggcaacaccgtgctgcacatcctgatcctgcagcccaacaagaccttcgcctgccagatgtacaacctgctgctgagctacgacagacacggcgaccacctgcagcccctggacctggtgcccaaccaccagggcctgacccccttcaagctggccggcgtggagggcaacaccgtgatgttccagcacctgatgcagaagagaaagcacacccagtggacctacggccccctgaccagcaccctgtacgacctgaccgagatcgacagcagcggcgacgagcagagcctgctggagctgatcatcaccaccaagaagagagaggccagacagatcctggaccagacccccgtgaaggagctggtgagcctgaagtggaagagatacggcagaccctacttctgcatgctgggcgccatctacctgctgtacatcatctgcttcaccatgtgctgcatctacagacccctgaagcccagaaccaacaacagaaccagccccagagacaacaccctgctgcagcagaagctgctgcaggaggcctacatgacccccaaggacgacatcagactggtgggcgagctggtgaccgtgatcggcgccatcatcatcctgctggtggaggtgcccgacatcttcagaatgggcgtgaccagattcttcggccagaccatcctgggcggccccttccacgtgctgatcatcacctacgccttcatggtgctggtgaccatggtgatgagactgatcagcgccagcggcgaggtggtgcccatgagcttcgccctggtgctgggctggtgcaacgtgatgtacttcgccagaggcttccagatgctgggccccttcaccatcatgatccagaagatgatcttcggcgacctgatgagattctgctggctgatggccgtggtgatcctgggcttcgccagcgccttctacatcatcttccagaccgaggaccccgaggagctgggccacttctacgactaccccatggccctgttcagcaccttcgagctgttcctgaccatcatcgacggccccgccaactacaacgtggacctgcccttcatgtacagcatcacctacgccgccttcgccatcatcgccaccctgctgatgctgaacctgctgatcgccatgatgggcgacacccactggagagtggcccacgagagagacgagctgtggagagcccagatcgtggccaccaccgtgatgctggagagaaagctgcccagatgcctgtggcccagaagcggcatctgcggcagagagtacggcctgggcgacagatggttcctgagagtggaggacagacaggacctgaacagacagagaatccagagatacgcccaggccttccacaccagaggcagcgaggacctggacaaggacagcgtggagaagctggagctgggctgccccttcagcccccacctgagcctgcccatgcccagcgtgagcagaagcaccagcagaagcagcgccaactgggagagactgagacagggcaccctgagaagagacctgagaggcatcatcaacagaggcctggaggacggcgagagctgggagtaccagatctag

SEQ ID NO: 199183 - DNA, 1674 bp, Artificial Sequence
  derived and/or modified sequence
atgggcttgtctctgccaaaagagaagggacttatcctgtgtctctggtccaaattctgtcgatggtttcaggatagcctggggaacaccgtgctccacatattgattctgcaacctaacaagactttcgcatgccagatgtacaacctactactgagctatgacaggcatggggaccacctacagccactggacttggtgcctaaccaccaggggctcaccccgttcaagctggcgggtgtagagggcaataccgttatgttccagcatctcatgcagaaaaggaagcacacccagtggacatatgggcccctcacatcaacactctacgatctgacagagatcgatagctccggcgatgagcagtcgctcttagaactgataatcactacaaagaagagggaggctcgacagatcctggatcagaccccagtgaaagagttggtgtccctgaaatggaagcgctatgggagaccctacttttgcatgctgggtgctatttatttactgtacataatttgttttacaatgtgctgcatctataggcctcttaaaccccgtaccaataacagaacaagcccccgggacaacacccttctccagcaaaagctcctccaggaggcctacatgactcctaaggatgacatacgactggtgggggagttagttaccgtgatcggagcaatcattatattgttggtcgaagtgccagacatctttaggatgggcgtgacccggtttttcgggcagactatcctaggtggacctttccatgtcctgatcatcacatatgctttcatggtgcttgtgacaatggtgatgaggctgataagcgcaagtggtgaggttgtacctatgtccttcgccctggttctcgggtggtgtaatgtcatgtatttcgcgcgtgggtttcagatgctgggccccttcaccattatgatccagaaaatgatttttggagacctaatgcgcttctgttggctgatggcagtggtgatcctaggcttcgcttccgcattttacattatctttcagacagaggatcccgaggagctgggtcacttctacgactacccaatggccctgttctccacatttgagctgttcctgacaatcatcgatggcccggccaattataacgtcgacttgcctttcatgtactccatcacttacgcagccttcgctattattgctacactactgatgttaaatctgctcatagccatgatgggagacactcactggagagtagcacatgaacgagatgagctgtggagggctcagattgtggcgaccaccgtcatgctggagagaaagctgcccaggtgtctctggccccgcagcggcatttgcggcagggagtacggccttggggaccggtggttcctgcgcgtggaagaccggcaggatctcaaccgacagcgtattcagagatatgctcaggcctttcacactaggggatctgaagatctggacaaagacagcgtggaaaagctggaacttgggtgtccgttcagcccacacctttctctcccgatgccaagtgtcagccgatctacttccagaagctcagccaactgggaacgcctgaggcagggcaccctgagaagggacctaagaggaatcatcaacagaggtctcgaggatggcgagagttgggagtatcagatttag

SEQ ID NO: 199184 - DNA, 2178 bp, Artificial Sequence
  derived and/or modified sequence
atgggactgagccttcctaaagagaagggacttattctttgcttatggtccaaattctgtcgatggtttcagaggagagagagctgggcccagtcccgggacgagcagaacctgttacagcagaaaaggatctgggaatctcctctactgctggctgccaaggacaatgacgtccaggctttgaataagttgctcaagtacgaagactgtaaggttcatcaacgaggtgccatgggtgagacagctctgcacattgccgccctgtatgacaatctggaggccgctatggtcctgatggaagccgccccagagttagtatttgaacctatgacctccgagctgtacgagggccagaccgcactccacatagccgtggttaaccagaatatgaacttggtgcgcgcactgttggctcgccgtgcaagcgtctccgcccgtgctacaggtacagccttcaggcgatctccttgcaatctgatttactttggtgagcatccgttatcatttgctgcatgcgtaaacagcgaggagatagtgcggcttctgatagaacatggggccgatatacgcgcccaggacagtctgggcaacactgtgttgcacatcctgatcctccagccaaacaagacgttcgcttgtcagatgtacaacctgcttctttcctacgataggcatggcgaccatctgcaacccctagatttggtccccaaccatcaggggttgacaccctttaagctggccggggtcgagggcaacactgtgatgttccagcatctgatgcagaaaaggaagcacacccagtggacatacggacctctgacttctacattgtacgacttgactgaaatcgactcaagcggcgacgaacagagcctgctggagctgatcattaccactaagaaacgtgaagcccgccagatcctcgaccagacacccgtgaaagaattggtcagtctgaagtggaagcgctacggtcgcccatatttttgtatgctcggtgctatctatctgctttacatcatctgttttaccatgtgttgcatctataggcctctcaagcctagaaccaataacaggacatccccccgagacaatactcttctgcagcagaaattgctgcaggaagcatatatgacaccaaaggacgacatccggttagtgggagagctcgtcacagtgattggggccataattatccttcttgtggaggtgcccgatatctttagaatgggggtaacccgattctttggccagacgatcctgggggggccatttcatgttctgattattacctatgccttcatggtcctggtgacaatggtgatgcgtcttatatcagcatccggcgaggttgtgccaatgagctttgccctggtcctggggtggtgcaacgtaatgtactttgcaagaggcttccagatgctgggaccctttactatcatgatccagaagatgatctttggagaccttatgagattctgctggttgatggctgtcgtaattctcggatttgcaagcgccttctatattatatttcagacagaagatccagaagagcttggccatttttacgactatcccatggcactgtttagcacctttgaactgttcctcactatcatcgatgggccagctaattacaacgtggacctgccatttatgtatagtatcacgtacgcggcgtttgcaatcattgcaactctgctcatgctgaatttactcattgctatgatgggtgatacccattggagagtcgcccatgaaagggacgagctttggcgcgctcaaatcgtggcaactactgtgatgttggagaggaagctgccccggtgtctctggccccgcagcggcatctgcgggagggaatacggcctaggggacaggtggtttctgcgcgtcgaagatcgacaggacctcaaccgtcaacgtattcagagatacgcacaggcctttcatactaggggaagtgaggacctcgacaaggatagcgtggagaagctcgaactaggctgccctttcagcccacacctatcgctgcccatgccctccgttagtagatctacatctcggagctccgccaactgggagaggcttcgtcaggggacacttcgaagagatctgcgcggcatcataaaccgcgggctggaagacggcgaaagctgggagtatcagatctag

SEQ ID NO: 199185 - DNA, 1674 bp, Artificial Sequence
  derived and/or modified sequence
atgggcctgagcctgcccaaggagaagggcctcatcctgtgcctgtggagcaagttctgccgctggttccaggacagcctgggcaacacagtgctgcacatcctgatcctgcagcccaacaagacctttgcctgccagatgtacaacctgctgctgtcctatgacagacatggagaccacctgcagcccctggacctggtgcccaaccaccagggcctgacccccttcaagctggccggcgtggagggcaacacagtgatgttccagcacctgatgcagaagaggaagcacacccagtggacctacggccccctgaccagcaccctgtatgacctgacagaaattgacagcagtggagatgagcagagcctgctggagctgatcatcaccaccaagaagcgggaggcccggcagatcctggaccagacccctgtgaaggagctggtgtccctgaagtggaagagatatggccggccctacttctgcatgctgggcgccatctacctgctgtacatcatctgcttcaccatgtgctgcatctaccggcccctgaagcccaggaccaacaacagaaccagcccccgggacaacaccctgctgcagcagaagctgctgcaggaggcctacatgacccccaaggatgacatccggctggtgggggagctggtgaccgtcatcggggccatcatcatcctgctggtggaggtgcctgacatcttcaggatgggcgtgacccgcttcttcggccagaccatcctgggcggccccttccacgtgctgatcatcacctacgccttcatggtgctggtgaccatggtgatgaggctcatcagcgccagcggggaggtggtgcccatgagctttgccctggtgctgggctggtgcaatgtgatgtactttgcccggggcttccagatgctgggccccttcaccatcatgatccagaagatgatctttggagacctgatgaggttctgctggctgatggctgtggtgatcctgggctttgccagcgccttctacatcatcttccagacagaagatcctgaggagctgggccacttctatgactaccccatggccctcttcagcacctttgagctgttcctgaccatcattgatggccctgccaactacaacgtggacctgcccttcatgtacagcatcacctacgccgcctttgccatcatcgccaccctgctgatgctgaacctgctgattgccatgatgggagacacccactggagggtggcccacgagagagatgagctgtggagggcccagatcgtggccaccaccgtgatgctggagaggaagctgccccgctgcctgtggcccaggagcggcatctgtggccgggagtatggcctgggggaccgctggttcctgcgggtggaggaccggcaggacctgaaccggcagaggatccagagatatgcccaggccttccacacccggggcagcgaggacctggacaaggacagcgtggagaagctggagctgggctgccccttcagcccccacctgagcctgcccatgcccagcgtgagccgcagcaccagccgcagcagcgccaactgggagcggctgcggcagggcaccctgcggcgggacctgcggggcatcatcaacagaggcctggaggatggagagagctgggagtaccagatctag

SEQ ID NO: 199186 - DNA, 2178 bp, Artificial Sequence
  derived and/or modified sequence
atgggcctgagcctgcccaaggagaagggcctcatcctgtgcctgtggagcaagttctgccgctggttccagaggcgggagagctgggcccagagcagagatgagcagaacctgctgcagcagaagaggatctgggagagccccctgctgctggccgccaaggacaatgatgtgcaggccctgaacaagctgctgaagtatgaggactgcaaggtgcaccagagaggagccatgggagaaacagccctgcacatcgccgccctgtatgacaacctggaggccgccatggtgctgatggaggccgcccctgagctggtgtttgagcccatgaccagcgagctgtatgagggccagacagccctgcacatcgctgtggtgaaccagaacatgaacctggtgcgggccctgctggcccggcgggcctctgtgtctgcccgggccaccggcacagccttcagaagaagcccctgcaacctgatctactttggagagcaccccctgagctttgctgcctgtgtgaacagcgaggagatcgtgcggctgctgattgaacatggagctgacatccgggcccaggacagcctgggcaacacagtgctgcacatcctgatcctgcagcccaacaagacctttgcctgccagatgtacaacctgctgctgtcctatgacagacatggagaccacctgcagcccctggacctggtgcccaaccaccagggcctgacccccttcaagctggccggcgtggagggcaacacagtgatgttccagcacctgatgcagaagaggaagcacacccagtggacctacggccccctgaccagcaccctgtatgacctgacagaaattgacagcagtggagatgagcagagcctgctggagctgatcatcaccaccaagaagcgggaggcccggcagatcctggaccagacccctgtgaaggagctggtgtccctgaagtggaagagatatggccggccctacttctgcatgctgggcgccatctacctgctgtacatcatctgcttcaccatgtgctgcatctaccggcccctgaagcccaggaccaacaacagaaccagcccccgggacaacaccctgctgcagcagaagctgctgcaggaggcctacatgacccccaaggatgacatccggctggtgggggagctggtgaccgtcatcggggccatcatcatcctgctggtggaggtgcctgacatcttcaggatgggcgtgacccgcttcttcggccagaccatcctgggcggccccttccacgtgctgatcatcacctacgccttcatggtgctggtgaccatggtgatgaggctcatcagcgccagcggggaggtggtgcccatgagctttgccctggtgctgggctggtgcaatgtgatgtactttgcccggggcttccagatgctgggccccttcaccatcatgatccagaagatgatctttggagacctgatgaggttctgctggctgatggctgtggtgatcctgggctttgccagcgccttctacatcatcttccagacagaagatcctgaggagctgggccacttctatgactaccccatggccctcttcagcacctttgagctgttcctgaccatcattgatggccctgccaactacaacgtggacctgcccttcatgtacagcatcacctacgccgcctttgccatcatcgccaccctgctgatgctgaacctgctgattgccatgatgggagacacccactggagggtggcccacgagagagatgagctgtggagggcccagatcgtggccaccaccgtgatgctggagaggaagctgccccgctgcctgtggcccaggagcggcatctgtggccgggagtatggcctgggggaccgctggttcctgcgggtggaggaccggcaggacctgaaccggcagaggatccagagatatgcccaggccttccacacccggggcagcgaggacctggacaaggacagcgtggagaagctggagctgggctgccccttcagcccccacctgagcctgcccatgcccagcgtgagccgcagcaccagccgcagcagcgccaactgggagcggctgcggcagggcaccctgcggcgggacctgcggggcatcatcaacagaggcctggaggatggagagagctgggagtaccagatctag

SEQ ID NO: 199187 - DNA, 1674 bp, Artificial Sequence
  derived and/or modified sequence
atgggcctgagcctgcccaaggagaagggcctgatcctgtgcctgtggtcaaaattttgtagatggttccaggactctttaggcaacacagtactgcatatcctcatcctccaaccgaataagacatttgcatgccagatgtacaacctgctcctgtcctatgataggcacggggatcacctgcagcctttggacctggtgccaaatcaccagggtctcacccccttcaagctggctggcgttgaaggaaacaccgtgatgttccaacatttaatgcagaaacgcaagcacacgcagtggacctacggccctctgacatcaaccctgtacgatcttaccgagattgacagtagcggagatgagcagagcttactggagctcattatcaccacaaaaaagagagaagccaggcagatcttagaccagactcccgtcaaagaactggtcagcctgaagtggaaacgctatggtaggccgtatttctgtatgcttggggccatttacttactttatattatctgcttcactatgtgctgtatatataggccgctcaaaccaaggaccaataatcgaacctcgcctcgcgataatacactcctgcagcagaagctgctccaggaggcctatatgacccctaaggacgatatccggctggtgggagaattggtaaccgtgataggggccatcattatacttcttgttgaggtacccgacatcttcaggatgggcgtcaccagattctttgggcagacgatactggggggccctttccacgtgctgatcatcacttatgcattcatggtgctggtgactatggtgatgagactcattagcgcaagcggcgaggtggtgcccatgtcattcgccctggtcctgggatggtgcaacgtgatgtattttgctcggggctttcagatgctcgggcccttcacaataatgattcagaagatgatattcggcgatctgatgcggttctgctggcttatggctgtcgtgatcctcggatttgcaagcgccttctatattatattccaaaccgaagaccccgaggaactgggccatttttacgattatcccatggcacttttctccacctttgagcttttcctgaccatcatcgatggccctgccaattacaacgttgatcttccttttatgtattcgatcacttacgccgccttcgcgatcatcgcaacactgctgatgctgaacctgctcatcgccatgatgggcgacactcattggcgagtggctcacgagagggatgagctgtggagggcccagatcgtggccaccacggtaatgctggaaaggaagctgccccggtgcctgtggcctagatccggcatctgcgggcgcgaatacggactaggtgaccggtggttcctcagagtggaagaccggcaggacctgaaccgccaaaggattcaaagatatgctcaggcttttcacacccggggaagtgaggacctggataaagattcggtggagaagctagagctggggtgtccgttctccccacatttgagcctcccaatgcctagcgttagtcggtcaacctctaggtcctctgctaattgggaacgactgcggcagggaaccctgcggagggacctgcggggcatcatcaatcgcggtctcgaggatggagagtcctgggagtatcagatctag

SEQ ID NO: 199188 - DNA, 2178 bp, Artificial Sequence
  derived and/or modified sequence
atgggcctgagcctgcccaaggagaagggcctgatcctgtgcctgtggtccaagttctgtaggtggttccagcgccgcgaatcttgggcacaatcaagagacgaacaaaacctgctacagcagaaaaggatttgggaaagccccctcctcctggcagcaaaagacaacgatgtccaggccctcaataaactgctgaagtatgaagattgtaaagttcatcagcggggggcgatgggagagaccgccttgcatatcgcagccctgtatgataatctcgaagccgctatggtccttatggaagccgcacctgaacttgtcttcgaacccatgacaagtgaactctacgaaggccagaccgccctgcacatcgctgtggtcaaccagaatatgaacctggtacgggccttgcttgctcgcagggcctctgtgagtgcgagagccacaggcactgcgtttcgcaggtctccctgcaacttgatctacttcggagaacatcccctgtcattcgcagcgtgtgtgaactcagaggaaattgttcgtctcctgatagaacacggcgccgatatcagagcccaggatagtcttggaaatactgtgctgcacatcttgatccttcaaccgaataagacattcgcgtgtcagatgtataacctcttgctctcttatgatcgacatggcgatcacctgcagcctcttgacctcgttcccaatcatcagggtctgactccattcaaactcgccggcgtcgaggggaatactgtcatgtttcagcacctcatgcagaaacgaaaacacactcagtggacctacgggcccctgaccagtacactctacgatctgaccgagatagactccagcggagacgagcagtcgctccttgagctgatcatcactaccaaaaagagagaagcaagacaaatacttgaccagacaccagtcaaggaacttgtttcactgaaatggaagcggtatggcagaccatacttctgcatgctgggggccatttacctcctgtatatcatctgctttacgatgtgttgtatctaccggccactcaaaccccgcacaaacaaccggacaagccctagggataacactctcctgcagcagaagctcttgcaagaggcctacatgacccctaaagatgatatccggctcgttggggagctcgtgacagtcatcggggcaatcatcattctgctcgtcgaagttcccgatatcttccgtatgggcgtgacaaggtttttcggccaaactatcctcggaggtccattccatgtactcataatcacctatgcctttatggtgttggtgactatggttatgaggctgatcagtgcctctggagaggtcgttcctatgtcatttgccttggtgctgggctggtgcaacgttatgtacttcgctcggggattccagatgctggggccatttacgatcatgatccagaaaatgatctttggcgacctcatgcggttctgctggctcatggccgtggtcattcttggattcgcgagcgccttttacataatcttccagaccgaggatccggaagagctcgggcatttctatgactaccctatggcattattctcaacattcgaattgttccttaccatcattgatggcccggcaaattacaatgtggatctccctttcatgtattcaataacctacgcggctttcgcgattattgcgactcttctcatgctgaacctcttgattgcaatgatgggcgacacacactggagggtggctcacgaacgggacgaactgtggcgtgcccagatcgttgccacgaccgttatgttggagaggaagctccctcggtgcctgtggccgcggtcgggaatttgcggcagagaatacggacttggagataggtggttcttgagggtcgaggaccggcaggatctgaaccgccagcggatacagagatacgcccaagccttccacaccagagggtctgaagacctcgataaggatagcgttgaaaagcttgaactcggttgccctttctctcctcatttgtcactgcccatgccaagcgtgagccggtcaacatctcgctcgagcgccaattgggagagacttcgacaagggaccctgaggcgggaccttagaggcatcataaacagaggactggaggacggcgaatcatgggaataccagatttag

SEQ ID NO: 199189 - DNA, 1674 bp, Artificial Sequence
  derived and/or modified sequence
atggggctatctctaccaaaggaaaagggtctgattttatgtttatggagcaagttttgcaggtggtttcaggactctctgggaaacaccgtccttcatatacttatcttacaacccaacaagactttcgcctgtcaaatgtataaccttctgctaagttacgaccggcacggagatcaccttcagcccctcgatctggtgccgaatcaccaaggtctaacaccgtttaaactggctggggtcgagggaaatacagtgatgtttcagcacttgatgcaaaagaggaaacatactcagtggacatatgggccactgacatcgacgctttatgacctcacagagatagacagttccggcgacgagcagagcttgctggaactaataataacaactaaaaagcgggaggccaggcagatcctcgatcagacccccgttaaggaattggtttcactcaagtggaagagatatggacgcccatatttttgcatgctgggggctatctatctgctctatattatttgctttaccatgtgctgcatctatcgacccctgaagccccgaaccaacaacaggacttcgcccagagataatacgctccttcagcagaagctccttcaggaggcttacatgacccctaaggacgacatcaggctggtcggagagctggtgactgtcattggggcaattatcatcctgcttgtggaagttcccgacattttccgcatgggggttacacgcttctttggccaaacaatactaggtggaccatttcatgtgctaatcatcacttatgctttcatggtgctcgtgacaatggtgatgaggctcattagcgcaagtggggaggtagtgcctatgagctttgccctcgtattgggctggtgcaacgtgatgtatttcgctagagggtttcaaatgctcgggcctttcacaattatgattcaaaagatgatattcggggatctgatgcggttctgctggctcatggctgtagttatactgggatttgcctccgcattctacatcatatttcaaactgaggacccagaagagctcggccacttctatgattatcctatggcgctgttctccacatttgagctctttctgaccattatagatggcccagctaactataacgttgatttaccctttatgtatagtataacatacgcggcattcgctatcatagcgactttgctcatgctaaatctgctgattgccatgatgggagatactcactggcgggtagcgcacgaaagagacgaactttggcgagctcagatcgttgccacaaccgtaatgttagaacgaaagttaccaagatgtctgtggccccgaagcggcatttgcggtcgagagtatggacttggagaccgatggttcctgcgggtggaagataggcaggatttaaaccgccagcgaattcagcgatatgcccaagcatttcacactcgaggcagcgaggacctcgacaaagattcagtagagaagttggagctagggtgtcccttctccccacatcttagcttgcccatgcccagcgtgagcagatcaacctctaggtcatccgcaaactgggagcggcttcgccagggcacgcttcggagagacttgcgcggaatcattaaccggggactggaagacggtgagtcttgggaatatcagatttag

SEQ ID NO: 199190 - DNA, 2178 bp, Artificial Sequence
  derived and/or modified sequence
atgggcctgagcttgcctaaggaaaagggcctgattctctgcctctggagtaagttttgtcggtggtttcagcgacgcgagagctgggctcaaagtagggacgaacagaacctgcttcagcagaagcgtatttgggagagtcctctgttgctcgcagccaaagataatgatgtgcaggcacttaacaaactgttgaagtacgaggactgtaaggttcaccaacggggagccatgggagaaaccgcccttcatattgccgctctatacgataacctggaagctgcgatggtcctgatggaagctgctccagaactggtttttgaacccatgacatctgagttgtatgagggacagacagccttgcatatagccgttgtgaaccagaatatgaacttggtccgtgcgctgctcgcacgccgtgccagcgtgtctgcaagggccacaggcacagcctttcgtaggtctccctgcaatctcatttatttcggagagcacccactctcgttcgccgcatgcgttaacagcgaggaaattgtgcgacttctaattgaacacggggcagatataagggcacaggatagcttgggcaataccgttctgcatatccttatactgcagcctaataagacatttgcatgtcagatgtacaacttgctgctttcctacgaccgccatggagatcatttacagccactggacctggtgcccaatcaccaaggtctgaccccgtttaaattggccggtgtcgaaggaaatacagttatgtttcagcatctcatgcagaaaagaaagcacacacaatggacatacggcccactgaccagtactctctatgatctgactgaaattgactcatcgggcgatgaacagtccctgctggaactgatcatcaccacaaagaaaagggaggctagacagatccttgatcagacacccgtcaaggaattggtctccttgaaatggaagcggtacggccgaccatacttttgcatgcttggggctatatatttactctacatcatttgtttcaccatgtgctgtatctaccgaccgttgaagccacgtaccaacaaccgaacatctcccagggacaataccctgctgcagcagaagctcctgcaggaagcttatatgacaccaaaagacgatataaggctggtgggcgaactcgtgacagttattggggctatcataatcctgctggtcgaggtccccgacattttccgaatgggagtcacacggttctttggacaaacaattctgggcggtcctttccacgttttaataattacgtacgctttcatggtactggttacaatggttatgcggctgattagcgccagcggggaggtggtacccatgagtttcgccctggtcctcggctggtgtaacgtaatgtacttcgcgagggggttccagatgctgggcccttttaccataatgatccagaagatgatatttggcgatcttatgcggttctgctggctgatggcagttgttattcttgggtttgcttctgctttttacattatcttccagactgaggacccggaagagctgggacacttctatgattatccaatggcactgttttccaccttcgagctgttcttgaccatcatcgatggacccgctaattataacgtggatttgccatttatgtactccatcacctacgccgcatttgctataatcgccactttgctcatgcttaatctgctgattgccatgatgggagatacccactggcgcgtggcccacgagcgcgatgaactgtggagagcccagatagtggccacaactgtgatgctggaacggaagttgcctcgctgtctgtggccacgctcggggatctgcggcagggagtacggtctgggagatagatggttcttgagggttgaggacagacaggatctgaaccgtcaaagaattcaaaggtacgcacaggcctttcatactagagggagcgaagacctagataaggactccgtggagaaattggagctgggctgcccattctccccccatctcagccttcccatgccaagcgtgtctaggtctaccagccgatccagtgccaactgggaacgactgcgacaggggacactacggagagacctgcgtggtattatcaacaggggtttggaagacggagagagttgggagtaccagatctag

SEQ ID NO: 199191 - DNA, 2174 bp, Artificial Sequence
  derived and/or modified sequence
atgggtttgtcactgcccaaggagaaagggctaattctctgcctatggagcaagttctgcagatggttccaggactccctgggaaacacagtgttacacatcctcatcctccagcccaacaaaacctttgcctgccagatgtacaacctgttgctgtcctacgacagacatggggaccacctgcagcccctggacctcgtgcccaatcaccagggtctcacccctttcaagctggctggagtggagggtaacactgtgatgtttcagcacctgatgcagaagcggaagcacacccagtggacgtatggaccactgacctcgactctctatgacctcacagagatcgactcctcaggggatgagcagtccctgctggaacttatcatcaccaccaagaagcgggaggctcgccagatcctggaccagacgccggtgaaggagctggtgagcctcaagtggaagcggtacgggcggccgtacttctgcatgctgggtgccatatatctgctgtacatcatctgcttcaccatgtgctgcatctaccgccccctcaagcccaggaccaataaccgcacgagcccccgggacaacaccctcttacagcagaagctacttcaggaagcctacatgacccctaaggacgatatccggctggtcggggagctggtgactgtcattggggctatcatcatcctgctggtagaggttccagacatcttcagaatgggggtcactcgcttctttggacagaccatccttgggggcccattccatgtcctcatcatcacctatgccttcatggtgctggtgaccatggtgatgcggctcatcagtgccagcggggaggtggtacccatgtcctttgcactcgtgctgggctggtgcaacgtcatgtacttcgcccgaggattccagatgctaggccccttcaccatcatgattcagaagatgatttttggcgacctgatgcgattctgctggctgatggctgtggtcatcctgggctttgcttcagccttctatatcatcttccagacagaggaccccgaggagctaggccacttctacgactaccccatggccctgttcagcaccttcgagctgttccttaccatcatcgatggcccagccaactacaacgtggacctgcccttcatgtacagcatcacctatgctgcctttgccatcatcgccacactgctcatgctcaacctcctcattgccatgatgggcgacactcactggcgagtggcccatgagcgggatgagctgtggagggcccagattgtggccaccacggtgatgctggagcggaagctgcctcgctgcctgtggcctcgctccgggatctgcggacgggagtatggcctgggagaccgctggttcctgcgggtggaagacaggcaagatctcaaccggcagcggatccaacgctacgcacaggccttccacacccggggctctgaggatttggacaaagactcagtggaaaaactagagctgggctgtcccttcagcccccacctgtcccttcctatgccctcagtgtctcgaagtacctcccgcagcagtgccaattgggaaaggcttcggcaagggaccctgaggagagacctgcgtgggataatcaacaggggtctggaggacggggagagctgggaatatcagatctgactgcgtgttctcacttcgcttcctggaacttgctctcattttcctgggtgcatcaaacaaaacaaaaaccaaacacccagaggtctcatctcccaggccccaggggagaaagaggagtagcatgaacgccaaggaatgtacgttgagaatcactgctccaggcctgcattactccttcagctctggggcagaggaagcccagcccaagcacggggctggcagggcgtgaggaactctcctgtggcctgctcatcacccttccgacaggagcactgcatgtcagagcactttaaaaacaggccagcctgcttgggcgctcggtctccaccccagggtcataagtggggagagagcccttcccagggcacccaggcaggtgcagggaagtgcagagcttgtggaaagcgtgtgagtgagggagacaggaacggctctgggggtgggaagtggggctaggtcttgccaactccatcttcaataaagtcgttttcggatccctg

SEQ ID NO: 199192 - DNA, 2928 bp, Artificial Sequence
  derived and/or modified sequence
agacaggccagccctgcagagtcctggctggctctgccaagtgtaacaaactcacagccctctccaaactggctggggctgctgggagactcccaaggaactcgtcaggaaggcaggagacaggagacgggacctctacagggagacggtgggccggcccttgggggggctgatgtgtccccaaggctgagtcccgtcagggtctggcctcggcctcaggcccccaaggagccggccctacaccccatgggtttgtcactgcccaaggagaaagggctaattctctgcctatggagcaagttctgcagatggttccagagacgggagtcctgggcccagagccgagatgagcagaacctgctgcagcagaagaggatctgggagtctcctctccttctagctgccaaagataatgatgtccaggccctgaacaagttgctcaagtatgaggattgcaaggtgcaccagagaggagccatgggggaaacagcgctacacatagcagccctctatgacaacctggaggccgccatggtgctgatggaggctgccccggagctggtctttgagcccatgacatctgagctctatgagggtcagactgcactgcacatcgctgttgtgaaccagaacatgaacctggtgcgagccctgcttgcccgcagggccagtgtctctgccagagccacaggcactgccttccgccgtagtccctgcaacctcatctactttggggagcaccctttgtcctttgctgcctgtgtgaacagtgaggagatcgtgcggctgctcattgagcatggagctgacatccgggcccaggactccctgggaaacacagtgttacacatcctcatcctccagcccaacaaaacctttgcctgccagatgtacaacctgttgctgtcctacgacagacatggggaccacctgcagcccctggacctcgtgcccaatcaccagggtctcacccctttcaagctggctggagtggagggtaacactgtgatgtttcagcacctgatgcagaagcggaagcacacccagtggacgtatggaccactgacctcgactctctatgacctcacagagatcgactcctcaggggatgagcagtccctgctggaacttatcatcaccaccaagaagcgggaggctcgccagatcctggaccagacgccggtgaaggagctggtgagcctcaagtggaagcggtacgggcggccgtacttctgcatgctgggtgccatatatctgctgtacatcatctgcttcaccatgtgctgcatctaccgccccctcaagcccaggaccaataaccgcacgagcccccgggacaacaccctcttacagcagaagctacttcaggaagcctacatgacccctaaggacgatatccggctggtcggggagctggtgactgtcattggggctatcatcatcctgctggtagaggttccagacatcttcagaatgggggtcactcgcttctttggacagaccatccttgggggcccattccatgtcctcatcatcacctatgccttcatggtgctggtgaccatggtgatgcggctcatcagtgccagcggggaggtggtacccatgtcctttgcactcgtgctgggctggtgcaacgtcatgtacttcgcccgaggattccagatgctaggccccttcaccatcatgattcagaagatgatttttggcgacctgatgcgattctgctggctgatggctgtggtcatcctgggctttgcttcagccttctatatcatcttccagacagaggaccccgaggagctaggccacttctacgactaccccatggccctgttcagcaccttcgagctgttccttaccatcatcgatggcccagccaactacaacgtggacctgcccttcatgtacagcatcacctatgctgcctttgccatcatcgccacactgctcatgctcaacctcctcattgccatgatgggcgacactcactggcgagtggcccatgagcgggatgagctgtggagggcccagattgtggccaccacggtgatgctggagcggaagctgcctcgctgcctgtggcctcgctccgggatctgcggacgggagtatggcctgggagaccgctggttcctgcgggtggaagacaggcaagatctcaaccggcagcggatccaacgctacgcacaggccttccacacccggggctctgaggatttggacaaagactcagtggaaaaactagagctgggctgtcccttcagcccccacctgtcccttcctatgccctcagtgtctcgaagtacctcccgcagcagtgccaattgggaaaggcttcggcaagggaccctgaggagagacctgcgtgggataatcaacaggggtctggaggacggggagagctgggaatatcagatctgactgcgtgttctcacttcgcttcctggaacttgctctcattttcctgggtgcatcaaacaaaacaaaaaccaaacacccagaggtctcatctcccaggccccaggggagaaagaggagtagcatgaacgccaaggaatgtacgttgagaatcactgctccaggcctgcattactccttcagctctggggcagaggaagcccagcccaagcacggggctggcagggcgtgaggaactctcctgtggcctgctcatcacccttccgacaggagcactgcatgtcagagcactttaaaaacaggccagcctgcttgggcgctcggtctccaccccagggtcataagtggggagagagcccttcccagggcacccaggcaggtgcagggaagtgcagagcttgtggaaagcgtgtgagtgagggagacaggaacggctctgggggtgggaagtggggctaggtcttgccaactccatcttcaataaagtcgttttcggatccctgccca

SEQ ID NO: 199193 - protein, 423 aa, Artificial Sequence
  derived and/or modified sequence
MALKVLLEQEKTFFTLLVLLGYLSCKVTCESGDCRQQEFRDRSGNCVPCNQCGPGMELSKECGFGYGEDAQCVTCRLHRFKEDWGFQKCKPCLDCAVVNRFQKANCSATSDAICGDCLPGFYRKTKLVGFQDMECVPCGDPPPPYEPHCASKVNLVKIASTASSPRDTALAAVICSALATVLLALLILCVIYCKRQFMEKKPSWSLRSQDIQYNGSELSCFDRPQLHEYAHRACCQCRRDSVQTCGPVRLLPSMCCEEACSPNPATLGCGVHSAASLQARNAGPAGEMVPTFFGSLTQSICGEFSDAWPLMQNPMGGDNISFCDSYPELTGEDIHSLNPELESSTSLDSNSSQDLVGGAVPVQSHSENFTAATDLSRYNNTLVESASTQDALTMRSQLDQESGAVIHPATQTSLQVRQRLGSL

SEQ ID NO: 199194 - DNA, 1272 bp, Artificial Sequence
  derived and/or modified sequence
atggccctgaaggtgctgctggagcaggagaagaccttcttcaccctgctggtgctgctgggctacctgagctgcaaggtgacctgcgagagcggcgactgcagacagcaggagttcagagacagaagcggcaactgcgtgccctgcaaccagtgcggccccggcatggagctgagcaaggagtgcggcttcggctacggcgaggacgcccagtgcgtgacctgcagactgcacagattcaaggaggactggggcttccagaagtgcaagccctgcctggactgcgccgtggtgaacagattccagaaggccaactgcagcgccaccagcgacgccatctgcggcgactgcctgcccggcttctacagaaagaccaagctggtgggcttccaggacatggagtgcgtgccctgcggcgaccccccccccccctacgagccccactgcgccagcaaggtgaacctggtgaagatcgccagcaccgccagcagccccagagacaccgccctggccgccgtgatctgcagcgccctggccaccgtgctgctggccctgctgatcctgtgcgtgatctactgcaagagacagttcatggagaagaagcccagctggagcctgagaagccaggacatccagtacaacggcagcgagctgagctgcttcgacagaccccagctgcacgagtacgcccacagagcctgctgccagtgcagaagagacagcgtgcagacctgcggccccgtgagactgctgcccagcatgtgctgcgaggaggcctgcagccccaaccccgccaccctgggctgcggcgtgcacagcgccgccagcctgcaggccagaaacgccggccccgccggcgagatggtgcccaccttcttcggcagcctgacccagagcatctgcggcgagttcagcgacgcctggcccctgatgcagaaccccatgggcggcgacaacatcagcttctgcgacagctaccccgagctgaccggcgaggacatccacagcctgaaccccgagctggagagcagcaccagcctggacagcaacagcagccaggacctggtgggcggcgccgtgcccgtgcagagccacagcgagaacttcaccgccgccaccgacctgagcagatacaacaacaccctggtggagagcgccagcacccaggacgccctgaccatgagaagccagctggaccaggagagcggcgccgtgatccaccccgccacccagaccagcctgcaggtgagacagagactgggcagcctgtag

SEQ ID NO: 199195 - DNA, 1272 bp, Artificial Sequence
  derived and/or modified sequence
atggccctgaaagtcttgctggagcaagaaaagacattttttacgcttttggtgctccttggctatcttagctgcaaggtgacatgtgaatctggggactgcaggcaacaggagtttcgtgatcgaagcggcaattgcgtgccctgcaaccagtgtgggcccggcatggaactcagtaaggaatgtggtttcggatatggtgaggacgcccagtgcgtgacatgtcgcctgcaccgcttcaaggaagattgggggtttcagaagtgtaaaccatgtctggactgtgcagtcgtgaaccgattccagaaggccaactgttcagccacttccgacgccatttgcggcgactgtctcccaggattctaccgcaagactaagctcgtgggcttccaggatatggaatgtgtaccttgtggggatccccctcccccttacgagccacattgcgcatcaaaggtgaatctagtaaagattgcttccacagcctcatccccacgcgatacggctctggcagccgtcatttgtagcgctctagcaactgtactgcttgcacttcttattttatgtgttatctactgcaagcggcagtttatggaaaagaagccaagctggtccctgcgtagtcaggacattcaatataatggttcggaactgtcttgttttgaccgcccccagcttcacgaatacgcccacagagcatgttgtcagtgtcggagagacagtgtccagacgtgtggaccggttcgtcttttgccctcaatgtgctgtgaggaggcctgttcccctaacccagctactctcggctgcggagtccacagtgccgcttcactccaggccagaaacgccggccccgccggcgaaatggtacccacattttttggaagcctgactcagtctatctgcggagagttctctgacgcttggccactcatgcagaacccaatgggaggggacaatatatctttctgtgattcatatcctgagcttactggggaagacattcactcactaaatcctgaattagagtcttcaactagtttagattctaacagctcacaggatctggtcgggggcgccgtacctgtccagtctcatagcgagaattttacagcagccaccgacttgtctcggtacaacaatactctggtggaatccgccagtacacaggacgccctcactatgcgatcacaattagaccaggagagcggggctgtgatccatcctgctactcagacatccctccaggtgagacagagactgggcagtctgtag

SEQ ID NO: 199196 - DNA, 1272 bp, Artificial Sequence
  derived and/or modified sequence
atggccctgaaggtgctgctggagcaggagaagaccttcttcaccctgctggtgctgctgggctacctgagctgcaaggtgacctgtgagagcggggactgccggcagcaggagttccgggacagaagtggcaactgtgtgccctgcaaccagtgtggccctggcatggagctgagcaaagaatgtggcttcggctacggggaggatgcccagtgtgtgacctgccgcctgcaccgcttcaaggaggactggggcttccagaagtgcaagccctgcctggactgtgctgtggtgaaccgcttccagaaggccaactgcagcgccaccagtgatgccatctgtggggactgcctgcccggcttctacaggaagaccaagctggtgggcttccaggacatggagtgtgtgccctgtggggaccccccaccaccctatgagccccactgtgccagcaaggtgaacctggtgaagatcgccagcacagccagcagcccccgggacacagccctggccgccgtcatctgcagcgccctggccaccgtgctgctggccctgctgatcctgtgtgtgatctactgcaagaggcagttcatggagaagaagcccagctggagcctgcggagccaggacatccagtacaacggcagcgagctgagctgctttgaccggccccagctgcatgaatatgcccaccgggcctgctgccagtgccggcgggacagcgtgcagacctgtggccctgtgcggctgctgcccagcatgtgctgtgaggaggcctgcagccccaacccagccaccctgggctgcggcgtgcacagcgctgccagcctgcaggccagaaatgccggccctgctggggagatggtgcccaccttcttcggcagcctgacccagagcatctgtggggagttcagtgatgcctggcccctgatgcagaaccccatgggcggggacaacatctccttctgtgacagctacccagagctgaccggggaggacatccacagcctgaaccctgagctggagagcagcaccagcctggacagcaacagcagccaggacctggtgggcggcgctgtgcctgtgcagagccacagcgagaacttcaccgctgccacagacctgagccgctacaacaacaccctggtggagagcgccagcacccaggatgccctgaccatgaggagccagctggaccaggagagcggggccgtcatccacccagccacccagaccagcctgcaggtgcggcagaggctgggcagcctgtag

SEQ ID NO: 199197 - DNA, 1272 bp, Artificial Sequence
  derived and/or modified sequence
atggccctgaaggtgctgctggagcaggagaagaccttcttcaccctcctggttctgctgggctatctgtcctgcaaggtgacctgcgaaagtggggattgcagacagcaagaattccgggacaggtcaggtaactgcgtgccgtgtaaccagtgtggaccggggatggaacttagcaaagaatgcggttttgggtatggagaggatgcccagtgcgtaacttgccgcctacaccgcttcaaagaggactggggttttcagaaatgcaaaccttgtctggattgtgccgtggtgaacagatttcagaaggccaattgttctgcgacttctgatgccatctgcggtgattgtctaccgggcttttatagaaaaacaaagctggtgggattccaggacatggagtgcgttccctgtggggatcctccccccccctatgagcctcactgcgcctcaaaggtgaacctcgtgaagattgccagtactgctagttcacctcgggatactgccctcgctgccgtgatatgcagtgcactggctaccgtcctcctggccctgttgattctctgtgttatatactgtaagcggcaatttatggagaagaagccttcatggtctctgagatcccaggacatccagtataacggttcggaattgtcatgcttcgacagacctcagttgcacgagtacgcacatagggcatgttgtcagtgtaggcgggatagtgttcaaacctgtggccccgtaaggctccttccaagcatgtgttgtgaggaggcgtgtagcccaaaccctgctacgctgggatgcggagtgcatagtgcggcgagcttgcaagcgcggaacgccgggccggcaggcgaaatggtgcccacgttcttcgggtccctcacccagagtatttgcggcgagttttcagacgcttggcctctgatgcagaaccctatggggggggacaacatctctttttgtgatagctatcctgagctcactggcgaggacatccacagcctgaacccagagctggaatcttcgacttccctggatagcaatagttcccaggacctagtcggaggcgccgtccctgtgcagtctcactccgagaattttaccgccgccacagatctatcacgttataacaacacactggttgagtcagcatccacccaggacgccctgactatgaggtcccagcttgatcaagagtccggtgcagtaatacaccctgccacccagacgagcctacaagttcgccagaggctcgggtccctgtag

SEQ ID NO: 199198 - DNA, 1272 bp, Artificial Sequence
  derived and/or modified sequence
atggccctaaaagtgctgttggaacaagagaaaacgtttttcacacttctggtgttgctcgggtatcttagctgtaaagtcacttgcgagagtggagactgcagacagcaggaatttcgcgataggagtggcaactgcgttccctgcaaccaatgtggccctggaatggagttgtcaaaagaatgtggatttggctatggagaggacgctcagtgcgtgacatgtagactgcacaggtttaaagaggactggggatttcagaagtgtaagccatgcttggattgcgctgttgtcaacaggtttcaaaaggcaaactgttctgccacatcagacgccatttgcggcgattgcttaccgggattctaccggaagacaaagctcgtagggtttcaggatatggagtgtgtgccatgcggcgaccctcccccaccatatgagccacactgtgcctctaaggttaatctggtgaaaattgcatccaccgccagcagcccacgcgacacagcattagctgcagtgatttgcagtgccttggctacagtgctacttgctctgctgattttatgtgtgatttactgtaaacggcagttcatggagaagaagccaagctggtctctgaggagtcaggatattcagtataatgggagcgagttaagctgtttcgataggcctcagctccatgaatacgctcatagggcctgctgccagtgtaggcgcgactctgtgcagacctgtggccctgtgcggctcctgccctccatgtgctgcgaagaggcctgcagccccaaccctgccacactcggatgcggcgtccattcagccgcatcactgcaggcaagaaatgccggtccagccggagaaatggtgcctacattctttggctccctaacccagagcatctgtggtgaattctcagatgcttggcccctcatgcagaatcccatgggtggggacaacataagtttctgcgactcatatccagaattaaccggcgaggacatccattctctaaatcctgaactggagagctctacgagtctggatagcaactcttctcaggatctagtgggaggagctgttcccgtacagtcccactccgagaactttaccgctgctactgatctctcaaggtataataacacattggtggagtctgctagtacccaagacgccctgacgatgaggagtcagcttgatcaggagagtggagccgtgattcaccccgcaacccagacttccctgcaggtccggcaacgtctcgggtcactgtag

SEQ ID NO: 199199 - DNA, 1625 bp, Artificial Sequence
  derived and/or modified sequence
gttgccgggctacgggagagcgcggagccctgcgctgggaggtgcacggtgtgcacgctggactggacccccatgcaaccccgcgccctgcgccttaaccaggactgctccgcgcgcccctgagcctcgggctccggcccggacctgcagcctcccaggtggctgggaagaactctccaacaataaatacatttgataagaaagatggctttaaaagtgctactagaacaagagaaaacgtttttcactcttttagtattactaggctatttgtcatgtaaagtgacttgtgaatcaggagactgtagacagcaagaattcagggatcggtctggaaactgtgttccctgcaaccagtgtgggccaggcatggagttgtctaaggaatgtggcttcggctatggggaggatgcacagtgtgtgacgtgccggctgcacaggttcaaggaggactggggcttccagaaatgcaagccctgtctggactgcgcagtggtgaaccgctttcagaaggcaaattgttcagccaccagtgatgccatctgcggggactgcttgccaggattttataggaagacgaaacttgtcggctttcaagacatggagtgtgtgccttgtggagaccctcctcctccttacgaaccgcactgtgccagcaaggtcaacctcgtgaagatcgcgtccacggcctccagcccacgggacacggcgctggctgccgttatctgcagcgctctggccaccgtcctgctggccctgctcatcctctgtgtcatctattgtaagagacagtttatggagaagaaacccagctggtctctgcggtcacaggacattcagtacaacggctctgagctgtcgtgttttgacagacctcagctccacgaatatgcccacagagcctgctgccagtgccgccgtgactcagtgcagacctgcgggccggtgcgcttgctcccatccatgtgctgtgaggaggcctgcagccccaacccggcgactcttggttgtggggtgcattctgcagccagtcttcaggcaagaaacgcaggcccagccggggagatggtgccgactttcttcggatccctcacgcagtccatctgtggcgagttttcagatgcctggcctctgatgcagaatcccatgggtggtgacaacatctctttttgtgactcttatcctgaactcactggagaagacattcattctctcaatccagaacttgaaagctcaacgtctttggattcaaatagcagtcaagatttggttggtggggctgttccagtccagtctcattctgaaaactttacagcagctactgatttatctagatataacaacacactggtagaatcagcatcaactcaggatgcactaactatgagaagccagctagatcaggagagtggtgctgtcatccacccagccactcagacgtccctccaggtaaggcagcgactgggttccctgtgaacacagcactgacttacagtagatcagaactctgttcccagcataagatttgggggaacctgatgagttttttttttgcatctttaataatttcttgtatgttgtagagtatgttttaaaataaatttcaagtatttttttaaaaaact

SEQ ID NO: 199200 - protein, 64 aa, Artificial Sequence
  derived and/or modified sequence
MFLQYYLNEQGDRVYTLKKFDPMGQQTCSAHPARFSPDDKYSRHRITIKKRFKVLMTQQPRPVL

SEQ ID NO: 199201 - DNA, 195 bp, Artificial Sequence
  derived and/or modified sequence
atgttcctgcagtactacctgaacgagcagggcgacagagtgtacaccctgaagaagttcgaccccatgggccagcagacctgcagcgcccaccccgccagattcagccccgacgacaagtacagcagacacagaatcaccatcaagaagagattcaaggtgctgatgacccagcagcccagacccgtgctgtag

SEQ ID NO: 199202 - DNA, 195 bp, Artificial Sequence
  derived and/or modified sequence
atgttcctccagtactatctgaatgaacagggggatcgtgtttatacactgaagaagttcgaccctatgggccagcagacttgctcagcccatccagccagattctcccccgacgacaagtacagccgccaccggatcacgattaaaaaaaggttcaaagtgcttatgacccagcaacccagacctgtgttgtag

SEQ ID NO: 199203 - DNA, 195 bp, Artificial Sequence
  derived and/or modified sequence
atgttcctgcagtactacctgaatgagcagggcgacagagtgtacaccctgaagaagtttgaccccatgggccagcagacctgcagcgcccacccagcccgcttctccccagatgacaagtacagccgccaccgcatcaccatcaagaagcgcttcaaggtgctgatgacccagcagcccaggcctgtgctgtag

SEQ ID NO: 199204 - DNA, 195 bp, Artificial Sequence
  derived and/or modified sequence
atgttcctgcagtactacctgaacgagcagggcgaccgggtgtacacgctgaaaaagttcgaccccatggggcagcagacatgtagcgctcaccctgcccgatttagccccgatgacaagtactcacgacaccgaattaccatcaagaaacgattcaaggtcttaatgacgcagcagcctagacccgtattatag

SEQ ID NO: 199205 - DNA, 551 bp, Artificial Sequence
  derived and/or modified sequence
ttccggttatgcaggaaggaaattgacgaacacgtgacgcggtcgggcggaccactgcagactgagcggtggaccgaattgggaccgctggcttataagcgatcatgtttctccagtattacctcaacgagcagggagatcgagtctatacgctgaagaaatttgacccgatgggacaacagacctgctcagcccatcctgctcggttctccccagatgacaaatactctcgacaccgaatcaccatcaagaaacgcttcaaggtgctcatgacccagcaaccgcgccctgtcctctgagggtcccttaaactgatgtcttttctgccacctgttacccctcggagactccgtaaccaaactcttcggactgtgagccctgatgcctttttgccagccatactctttggcatccagtctctcgtggcgattgattatgcttgtgtgaggcaatcatggtggcatcacccataaagggaacacatttgacttttttttctcatattttaaattactacaagattattaaagataaaatgatttgaaaaactc

SEQ ID NO: 199206 - DNA, 195 bp, Artificial Sequence
  derived and/or modified sequence
atgttccttcagtattacctgaacgagcagggagaccgcgtgtacacccttaagaaatttgaccccatgggacagcaaacatgttccgcgcatcccgctcgtttttctcctgatgacaaatattcccgccaccggataacgataaagaagagatttaaggtgctgatgactcagcagccaaggcccgtactgtag

SEQ ID NO: 199207 - protein, 372 aa, Artificial Sequence
  derived and/or modified sequence
MSGRSGKKKMSKLSRSARAGVIFPVGRLMRYLKKGTFKYRISVGAPVYMAAVIEYLAAEILELAGNAARDNKKARIAPRHILLAVANDEELNQLLKGVTIASGGVLPRIHPELLAKKRGTKGKSETILSPPPEKRGRKATSGKKGGKKSKAAKPRTSKKSKPKDSDKEGTSNSTSEDGPGDGFTILSSKSLVLGQKLSLTQSDISHIGSMRVEGIVHPTTAEIDLKEDIGKALEKAGGKEFLETVKELRKSQGPLEVAEAAVSQSSGLAAKFVIHCHIPQWGSDKCEEQLEETIKNCLSAAEDKKLKSVAFPPFPSGRNCFPKQTAAQVTLKAISAHFDDSSASSLKNVYFLLFDSESIGIYVQEMAKLDAK

SEQ ID NO: 199208 - protein, 243 aa, Artificial Sequence [sequence omitted]

SEQ ID NO: 199209 - DNA, 1119 bp, Artificial Sequence
  derived and/or modified sequence
atgtcggggcgttccggaaaaaagaagatgtctaaactcagcagatccgcgcgcgccggcgtgattttccccgtggggcgattaatgcgctacctgaaaaagggcactttcaagtaccgaatctctgtcggtgccccagtgtacatggccgcagtcatcgagtacttagcagcagaaatactggaactcgccggtaacgcagcacgtgataataagaaggcccgcatcgctcctagacatattttgctggctgtcgctaatgatgaagaattaaaccagctcctgaagggggtcacaatcgcgtctggcggagtcctcccacgaatacaccctgagctgcttgccaagaagagggggacgaaaggaaagagtgaaaccattctttctccaccacccgaaaagagagggcgcaaggctacgtccgggaaaaaagggggcaaaaagtcgaaagcagccaagccccggacaagcaagaaatctaagcccaaggacagtgacaaggagggaacctccaattccacaagcgaggatgggccgggggacggattcacaatcttatcctcaaaaagtctggtcctagggcagaaactttccttgacccaatcggacattagtcatatcggttctatgcgtgtcgagggcatcgtgcatcctacaactgcggagatcgaccttaaagaggatatcggcaaagcattagagaaagccggaggaaaagagttccttgagacagtcaaagagctgcgaaagagtcaggggcctctggaagtggctgaggctgcggtatcccaatcctctgggcttgctgctaaatttgtgattcattgtcatattcctcagtgggggagtgataaatgtgaggagcaactcgaggaaacaattaagaactgtctctccgcagcagaagataaaaagctgaagtcggtggcgtttccaccatttccttcaggtcgcaactgctttcccaagcagactgccgcccaggtgactctcaaggctatctccgcacatttcgacgattcttctgctagcagtctaaagaacgtgtatttcctcctttttgatagtgagtctattggcatttacgttcaggaaatggcaaaactggacgccaagtag

SEQ ID NO: 199210 - DNA, 732 bp, Artificial Sequence
  derived and/or modified sequence
atgtcagggaggagcggaaagaagaaaatgagcaagttgagccgcagtgcccgtgcaggggtcatcttccctgtgggcagattgatgagatatttaaagaagggtacgttcaagtatcgtatttctgttggggctcctgtctacatggctgccgtcatcgaatatctggccgctgagattttagaactagccggaaacgccgcaagggacaacaagaaagctcgaatcgcgccaagacacatactcctggcggtggccaatgacgaggagctcaatcagtcgaagccaaaagactccgataaggaaggaaccagtaacagtacctccgaggacgggccaggagatggttttactatcctctccagcaagtcccttgtactgggccagaaactgagtctgacccaaagcgatatatcacatatcggttccatgcgggtggaaggaatcgtgcacccaaccacagccgagattgatttgaaggaagacatcggtaaagctctcgagaaagcgggaggcaaagagtttctcgagactgtgaaggagctgcgtaagagccaggggccacttgaggtggctgaagcggccgtgtcacagagctctggacttgcagctaagtttgtgatccactgtcacataccccagtggggctctgacaaatgcgaggaacagctcgaggaaacaatcaagaattgcttgtctgccgcagaagacaaaaagctgaaatctgtgtag

SEQ ID NO: 199211 - DNA, 732 bp, Artificial Sequence
  derived and/or modified sequence
atgagcggcaggagcggcaaaaaaaagatgtctaaacttagcaggtcagcgcgagcgggagttatatttcctgtggggcgtctgatgcggtacctgaagaagggcactttcaaataccgcatatcagtgggcgcccctgtttacatggccgccgtcattgaatacctggccgccgagatccttgaactggcaggcaacgcggcgcgggataataagaaagcgcgtattgcacccaggcacatcttgttggcagtcgcaaatgacgaggaacttaatcagagcaagccgaaggatagtgacaaggaggggactagtaactctacctcagaggatgggcccggcgacggatttacgatcttaagcagtaaatccctggtgctaggccaaaaactaagcctgacccagtcagatatctcccatattggctctatgagagtcgagggcatcgtgcaccccacaacagccgaaattgatctaaaggaagacatcgggaaggcactagaaaaagcagggggtaaggaattcctagaaactgtcaaggagctgagaaaaagtcagggaccattggaggtcgcagaggctgcggtgtcacaaagttccggactagcagccaagttcgtgatccactgccacattccacagtggggaagcgacaagtgtgaggaacagctcgaggagacaatcaagaattgcctgtctgccgccgaggataagaagcttaaatctgtgtag

SEQ ID NO: 199212 - DNA, 1119 bp, Artificial Sequence
  derived and/or modified sequence
atgagcggccgcagcggcaagaagaagatgagcaagctgagccgcagcgcccgggccggggtcatcttccctgtgggccgcctgatgagatacctgaagaagggcaccttcaagtaccgcatctctgtgggcgcccctgtgtacatggctgctgtgattgagtacctggccgctgagatcctggagctggccggaaatgctgcccgggacaacaagaaggcccgcatcgcccccaggcacatcctgctggccgtggccaatgatgaggagctgaaccagctgctgaagggcgtgaccatcgccagcggcggcgtgctgccccgcatccaccctgagctgctggccaagaagaggggcaccaagggcaagtctgagaccatcctgagccccccacctgagaagaggggcaggaaggccaccagcggcaagaagggcggcaagaagagcaaggccgccaagcccaggaccagcaagaagagcaagcccaaggacagcgacaaggagggcaccagcaacagcaccagtgaagatggccctggagatggcttcaccatcctgagcagcaagagcctggtgctgggccagaagctgagcctgacccagagcgacatcagccacatcggctccatgagggtggagggcatcgtgcaccccaccacagctgagattgacctgaaggaggacatcggcaaggccctggagaaggccggcggcaaggagttcctggagaccgtgaaggagctgaggaagagccagggccccctggaggtggccgaggccgctgtgtcccagagcagcggcctggccgccaagtttgtgatccactgccacatcccccagtggggcagtgacaagtgtgaggagcagctggaggagaccatcaagaactgcctgtctgctgctgaggacaagaagctgaagtctgtggccttcccccccttccccagcggcaggaactgcttccccaagcagacagctgcccaggtgaccctgaaggccatcagcgcccactttgatgacagcagcgccagcagcctgaagaatgtgtacttcctgctgtttgacagcgagagcatcggcatctacgtgcaggagatggccaagctggatgccaagtag

SEQ ID NO: 199213 - DNA, 732 bp, Artificial Sequence
  derived and/or modified sequence
atgagcggccgcagcggcaagaagaagatgagcaagctgagccgcagcgcccgggccggggtcatcttccctgtgggccgcctgatgagatacctgaagaagggcaccttcaagtaccgcatctctgtgggcgcccctgtgtacatggctgctgtgattgagtacctggccgctgagatcctggagctggccggaaatgctgcccgggacaacaagaaggcccgcatcgcccccaggcacatcctgctggccgtggccaatgatgaggagctgaaccagagcaagcccaaggacagcgacaaggagggcaccagcaacagcaccagtgaagatggccctggagatggcttcaccatcctgagcagcaagagcctggtgctgggccagaagctgagcctgacccagagcgacatcagccacatcggctccatgagggtggagggcatcgtgcaccccaccacagctgagattgacctgaaggaggacatcggcaaggccctggagaaggccggcggcaaggagttcctggagaccgtgaaggagctgaggaagagccagggccccctggaggtggccgaggccgctgtgtcccagagcagcggcctggccgccaagtttgtgatccactgccacatcccccagtggggcagtgacaagtgtgaggagcagctggaggagaccatcaagaactgcctgtctgctgctgaggacaagaagctgaagtctgtgtag

SEQ ID NO: 199214 - DNA, 1119 bp, Artificial Sequence
  derived and/or modified sequence
atgagcggccggagcggcaagaagaagatgagcaagctgagccggagtgctcgagcaggtgtaatattccctgtcgggagactcatgagatatttaaaaaaagggacattcaaatatagaatttctgtgggcgcacccgtgtacatggctgcagttatcgagtacctcgccgctgaaatcctggagctggcgggcaacgctgctcgggacaataagaaggctagaattgcccccagacacattctgctcgctgttgcaaacgacgaggaactcaaccagttgctaaaaggggtaaccattgcgagtggaggcgtacttcctaggattcaccccgagctcttggcaaaaaagagagggaccaaaggcaagtcggagaccatcctgagccccccaccagagaagagggggaggaaggccacatctggcaaaaagggcgggaaaaaatcgaaagctgccaagcccaggactagcaaaaagtccaagcctaaagatagcgacaaggaaggtaccagcaactcaacttcagaggacgggcctggagacgggtttactattctgagtagcaagtcactggtcctaggtcaaaagctgtcactcacgcagtcggatatctcccatattgggagcatgagagtggaagggatagtacacccaactacagcagaaatcgatctcaaggaagacattggtaaggctctggaaaaagccggaggaaaagagttcctcgaaaccgtcaaggaactgcgcaaaagtcagggcccactagaagtggccgaggcagctgtcagccagtcaagtggactagcagctaagttcgtgatccactgccacatcccacagtggggctcggacaaatgcgaagagcaactcgaggaaacgattaaaaactgtctgtccgccgcagaagataaaaagctgaagtctgtcgcttttcccccctttcccagcggccgcaactgcttcccaaaacaaacagctgcgcaggtgaccttgaaagccataagcgcacactttgatgactccagcgcaagttctctgaaaaatgtttattttctgctgttcgattccgaatccatcggaatctacgtccaggagatggccaaactggacgcaaaatag

SEQ ID NO: 199215 - DNA, 732 bp, Artificial Sequence
  derived and/or modified sequence
atgagcggccggagcggcaagaagaagatgagcaagctgagccggagtgctagagcaggagttatctttcccgtggggaggctgatgcggtatttgaagaagggtactttcaaatacaggattagcgtaggagcccccgtttatatggctgccgtgatcgagtacctagcagctgagattctggaattggctgggaatgcggcacgtgataataagaaggctaggatcgcacccaggcatattctgcttgcggtggctaatgatgaggaactcaatcagtcaaaacctaaggactccgacaaggaaggtactagcaattccacgtcagaagacggaccaggggatgggtttacgatcttgtcttctaaatcattggtgcttggccagaagctcagtctgacgcagtcggacatctctcacattggctctatgagagtagagggaatcgtgcaccctacaacagccgaaatcgacttaaaggaggatatcggtaaagcattggaaaaggcaggcgggaaagagttccttgagacagtgaaggaactgaggaaatcgcagggacccctggaagtggctgaggccgcagtgagtcagagctcagggctcgcagccaagttcgttattcattgccacatcccacagtggggcagcgataagtgcgaggaacagctcgaggaaacaatcaagaattgcctttccgccgcggaagacaagaaactcaaatccgtctag

SEQ ID NO: 199216 - DNA, 732 bp, Artificial Sequence
  derived and/or modified sequence
atgagcggccggagcggcaagaagaagatgagcaagctgagccggtcagcacgggccggagtcattttccccgttggacgtttgatgcggtatcttaagaaggggactttcaaatatagaatctcagtcggtgcccctgtctatatggccgccgtcattgagtaccttgccgccgagattctggagttggccggaaatgccgcccgggacaacaagaaagcaaggatagcaccaaggcacatcctcctggctgtggcaaatgatgaggaattaaatcagtccaaacccaaagatagcgacaaggaaggtacaagcaactctacctccgaggacgggcctggggacggtttcaccatcctgagtagtaagtctctcgttctaggacagaagttatccctcacacagtcagatattagccacattggttctatgagggtggagggtatagtccatccgaccacggccgaaattgacttgaaggaggacataggtaaggcactggaaaaggctggggggaaagagttcctggagacagtgaaggagctacggaagagccaaggtcccctggaagtcgctgaagctgccgtttcccaaagcagtggactcgccgcaaaatttgtcattcattgtcatatccctcaatggggaagcgacaagtgcgaggaacagctcgaggagacaatcaagaattgcctatcagccgcagaagataaaaagcttaaaagtgtatag

SEQ ID NO: 199217 - DNA, 1119 bp, Artificial Sequence
  derived and/or modified sequence
atgtccggaaggtccgggaaaaagaagatgtcaaaactctctcgaagcgctcgtgcaggagtgatctttccggtcggacgactaatgcgttatctcaaaaagggaaccttcaaatacaggatttcagtcggcgcaccagtctacatggcagccgtgatagagtatctggctgccgagatcctggagttagcaggcaacgcagcaagggataacaaaaaggcacgaattgcacctcgacatatcctgcttgccgttgcgaatgatgaagagctgaaccaactgctcaagggcgtcaccatcgcatcagggggagtgctgcctagaatccatccagaattgctcgctaagaagcgtggcacaaagggaaaatcagaaacaatactttcaccaccccctgagaagaggggcagaaaggccacgtcaggtaaaaagggagggaagaaatccaaggcagcaaaaccgagaacatccaagaaaagtaaacccaaagacagcgataaagaaggtactagcaatagcacctcagaggacggacctggcgacgggttcaccattctcagttccaagagtctagtgctaggacagaaactgtcgttgacacagtctgatatctctcatatcggatctatgagggtcgaggggattgttcatccaactaccgccgagattgacctgaaggaggatataggtaaggccttggaaaaagcaggcggaaaggagtttttggaaaccgtgaaagaacttagaaaaagccagggacccttggaagtggctgaggctgctgtgtcccagagttctggcctagcggcaaaatttgtaatacactgtcatatacctcagtgggggtccgataagtgcgaggaacagctggaggaaacaattaaaaactgcctgtccgcagcagaagacaagaagttaaaaagcgtggcatttcctcctttcccatctggcagaaactgctttccaaagcagactgcggctcaggtcacgctgaaggcaatctcagctcattttgacgatagctccgcaagcagtctgaaaaatgtttattttttgctgttcgattccgaatctatcggaatctacgttcaggagatggccaaactggatgcaaagtag

SEQ ID NO: 199218 - DNA, 732 bp, Artificial Sequence
  derived and/or modified sequence
atgtccggacgttcaggtaagaagaaaatgagcaaactcagcaggtcggccagggccggtgtgatcttcccggtggggaggttaatgcgctacctgaagaagggaacatttaaatatagaatatctgtgggggctcccgtctatatggccgcagtcatagagtacctcgcggcagagatcctcgagctcgccggtaacgccgcacgtgataataaaaaagcgcgtattgcccctcggcacatacttctggcggttgcaaacgacgaggagctcaaccagtctaagcctaaggattcagacaaagagggtacctcaaacagtaccagtgaagatgggcctggcgatggctttactattctgtccagcaaatcactggtgctggggcagaagctgtcgctcacacagtctgatatatcccacataggctcaatgagggtcgaggggattgtgcaccctacaaccgcggagatagacttaaaggaggacatcggaaaggctctggagaaagctggaggtaaggagttcctggagactgtcaaggagctgcgaaaatcccaagggccactggaagtagcagaagccgcagtgtctcagagcagtgggctcgccgctaaattcgtgatccattgtcatatccctcagtgggggtccgacaagtgcgaggaacagctcgaggagactatcaaaaactgcttgagcgccgcagaggacaaaaagttaaaatctgtttag

SEQ ID NO: 199219 - DNA, 732 bp, Artificial Sequence
  derived and/or modified sequence
atgagcggcaggtccgggaagaaaaagatgtcgaagctgtcacggtcggctcgcgctggtgttatttttcctgtgggccgtcttatgcgctatttgaaaaaaggcaccttcaaataccggattagtgtaggcgctcccgtgtacatggcggctgtaatcgaatacctcgcagccgagatactggagctcgcaggcaatgcggctagggacaacaagaaggcaagaatcgctcctcgtcatatcctgcttgctgtagcaaatgatgaagaattgaaccagtctaagcctaaagacagtgacaaggaaggcacctccaactccacgtccgaggacgggccaggggacggattcacaatcctctcctctaagagcttagtcctgggacagaaactgtcactaactcagagcgacatcagtcatattggaagcatgcgagtggagggtatagttcaccctactactgccgagattgacctgaaggaggacatcggcaaggcattggagaaggctggaggaaaagagtttcttgagactgtgaaggagctgcgcaaatcccagggtcccctggaagtcgctgaggccgctgtgtcccaaagttccggactcgcagccaaattcgttattcactgccacatcccgcagtggggcagcgataagtgtgaggaacagctcgaggagacaattaaaaattgcctttccgcagcggaggataaaaagcttaaaagtgtttag

SEQ ID NO: 199220 - DNA, 1119 bp, Artificial Sequence
  derived and/or modified sequence
atgagcggcagaagcggcaagaagaagatgagcaagctgagcagaagcgccagagccggcgtgatcttccccgtgggcagactgatgagatacctgaagaagggcaccttcaagtacagaatcagcgtgggcgcccccgtgtacatggccgccgtgatcgagtacctggccgccgagatcctggagctggccggcaacgccgccagagacaacaagaaggccagaatcgcccccagacacatcctgctggccgtggccaacgacgaggagctgaaccagctgctgaagggcgtgaccatcgccagcggcggcgtgctgcccagaatccaccccgagctgctggccaagaagagaggcaccaagggcaagagcgagaccatcctgagccccccccccgagaagagaggcagaaaggccaccagcggcaagaagggcggcaagaagagcaaggccgccaagcccagaaccagcaagaagagcaagcccaaggacagcgacaaggagggcaccagcaacagcaccagcgaggacggccccggcgacggcttcaccatcctgagcagcaagagcctggtgctgggccagaagctgagcctgacccagagcgacatcagccacatcggcagcatgagagtggagggcatcgtgcaccccaccaccgccgagatcgacctgaaggaggacatcggcaaggccctggagaaggccggcggcaaggagttcctggagaccgtgaaggagctgagaaagagccagggccccctggaggtggccgaggccgccgtgagccagagcagcggcctggccgccaagttcgtgatccactgccacatcccccagtggggcagcgacaagtgcgaggagcagctggaggagaccatcaagaactgcctgagcgccgccgaggacaagaagctgaagagcgtggccttcccccccttccccagcggcagaaactgcttccccaagcagaccgccgcccaggtgaccctgaaggccatcagcgcccacttcgacgacagcagcgccagcagcctgaagaacgtgtacttcctgctgttcgacagcgagagcatcggcatctacgtgcaggagatggccaagctggacgccaagtag

SEQ ID NO: 199221 - DNA, 732 bp, Artificial Sequence
  derived and/or modified sequence
atgagcggcagaagcggcaagaagaagatgagcaagctgagcagaagcgccagagccggcgtgatcttccccgtgggcagactgatgagatacctgaagaagggcaccttcaagtacagaatcagcgtgggcgcccccgtgtacatggccgccgtgatcgagtacctggccgccgagatcctggagctggccggcaacgccgccagagacaacaagaaggccagaatcgcccccagacacatcctgctggccgtggccaacgacgaggagctgaaccagagcaagcccaaggacagcgacaaggagggcaccagcaacagcaccagcgaggacggccccggcgacggcttcaccatcctgagcagcaagagcctggtgctgggccagaagctgagcctgacccagagcgacatcagccacatcggcagcatgagagtggagggcatcgtgcaccccaccaccgccgagatcgacctgaaggaggacatcggcaaggccctggagaaggccggcggcaaggagttcctggagaccgtgaaggagctgagaaagagccagggccccctggaggtggccgaggccgccgtgagccagagcagcggcctggccgccaagttcgtgatccactgccacatcccccagtggggcagcgacaagtgcgaggagcagctggaggagaccatcaagaactgcctgagcgccgccgaggacaagaagctgaagagcgtgtag

SEQ ID NO: 199222 - DNA, 1959 bp, Artificial Sequence
  derived and/or modified sequence
gagcaatcccttctccctcctcctcctccccccgctactatccgcggcccagagaactgccgcttgccgccattgacacgcacagatagaacccaaagaaaggcaaagagtcctgcccggcaccggcgccgcgtgggccaaacctgcgcccgtggaggggcgcgcagagggcaccgggcgccgggagcaggcggcgcagcaccagcattgtgttagtgccgggaggccactgtgtcagcaagctgagagggaaactgaagcaagatgtcgggccggagtgggaagaagaaaatgtccaagctgtcccgttcagctagggcaggtgtcatctttccagtggggaggctgatgcgttatctgaagaaagggacgttcaagtaccggatcagcgtgggcgcccctgtctacatggcggcagtcattgagtacctggcagcggaaattctagaattggccggcaatgccgcgagggacaacaagaaggcccggatagccccgagacacatcttgctggcagttgccaatgacgaggagctcaaccagctgctaaaaggagtgaccatcgccagtggaggcgtcctgcccagaattcaccccgaactgctggccaaaaagcgagggaccaaaggcaagtcggaaacgatcctctccccacccccagagaaaagaggcaggaaggccacgtcaggcaagaagggggggaagaaatccaaggctgccaaaccacggacgtccaaaaagtccaaaccaaaggacagcgataaagaaggaacttcaaattccacctctgaagatgggccaggggatggattcaccattctgtcttctaagagccttgttctgggacagaagctgtccttaacccagagtgacatcagccatattggctccatgagagtggagggcattgtccacccaaccacagccgaaattgacctcaaagaagatataggtaaagccttggaaaaggctgggggaaaagagttcttggaaacggtaaaggagcttcgcaaatcccaaggccctttggaagtcgccgaagccgccgtcagccaatccagtggactcgcagccaaatttgtcatccactgtcacatccctcagtggggctccgacaaatgtgaagaacagcttgaagagaccatcaaaaactgcctgtcagcggcggaggacaagaagctaaagtccgtcgcgttcccgcctttccccagcggcagaaactgctttcccaaacagactgcggcccaggtgaccctcaaagccatctcagcccactttgatgactcgagcgcgtcctcgctgaagaacgtgtacttcctgctcttcgacagcgagagcatcggcatctacgtgcaggagatggccaagctcgacgccaagtagccgccgcactttccagcagggatcggaggacgacccgagtcccaagagtggggttttgctttttaaaaggagagaggaggggtgatggcaggggagtggagggtggccgggcaggtcctgccggcgcagggagccctctgcccttcacactctcctccaaaagagcctccatctgtaaggaagcaggtctccgcgaggggtttctttccatgtgttttcctcctgttgttttagaacttttttaaaaaaacagacctcgttttagatttatagcattgacttttacacacattcacacaagaaaaaaatcctttcaaaattcttaaatcttctgttcctcctttttccaagggaagagggcaaaaagtggcctgggctctgttggtgtgcgtgttccgtggcggagagaagaaaatgggaaagacatctcactggtgcttttctcttttgttttagtgccccccgcccccatccctataatatctgtaactactcctaaaaaggttttgattcaggcttttttttggtttcattttgtttttttaagaaaaagaaaatgaaaggaaaaaaataaaa

SEQ ID NO: 199223 - DNA, 1724 bp, Artificial Sequence
  derived and/or modified sequence
aactgccgcttgccgccattgacacgcacagatagaacccaaagaaaggcaaagagtcctgcccggcaccggcgccgcgtgggccaaacctgcgcccgtggaggggcgcgcagagggcaccgggcgccgggagcaggcggcgcagcaccagcattgtgttagtgccgggaggccactgtgtcagcaagctgagagggaaactgaagcaagatgtcgggccggagtgggaagaagaaaatgtccaagctgtcccgttcagctagggcaggtgtcatctttccagtggggaggctgatgcgttatctgaagaaagggacgttcaagtaccggatcagcgtgggcgcccctgtctacatggcggcagtcattgagtacctggcagcggaaattctagaattggccggcaatgccgcgagggacaacaagaaggcccggatagccccgagacacatcttgctggcagttgccaatgacgaggagctcaaccagtccaaaccaaaggacagcgataaagaaggaacttcaaattccacctctgaagatgggccaggggatggattcaccattctgtcttctaagagccttgttctgggacagaagctgtccttaacccagagtgacatcagccatattggctccatgagagtggagggcattgtccacccaaccacagccgaaattgacctcaaagaagatataggtaaagccttggaaaaggctgggggaaaagagttcttggaaacggtaaaggagcttcgcaaatcccaaggccctttggaagtcgccgaagccgccgtcagccaatccagtggactcgcagccaaatttgtcatccactgtcacatccctcagtggggctccgacaaatgtgaagaacagcttgaagagaccatcaaaaactgcctgtcagcggcggaggacaagaagctaaagtccgtcgcgttcccgcctttccccagcggcagaaactgctttcccaaacagactgcggcccaggtgaccctcaaagccatctcagcccactttgatgactcgagcgcgtcctcgctgaagaacgtgtacttcctgctcttcgacagcgagagcatcggcatctacgtgcaggagatggccaagctcgacgccaagtagccgccgcactttccagcagggatcggaggacgacccgagtcccaagagtggggttttgctttttaaaaggagagaggaggggtgatggcaggggagtggagggtggccgggcaggtcctgccggcgcagggagccctctgcccttcacactctcctccaaaagagcctccatctgtaaggaagcaggtctccgcgaggggtttctttccatgtgttttcctcctgttgttttagaacttttttaaaaaaacagacctcgttttagatttatagcattgacttttacacacattcacacaagaaaaaaatcctttcaaaattcttaaatcttctgttcctcctttttccaagggaagagggcaaaaagtggcctgggctctgttggtgtgcgtgttccgtggcggagagaagaaaatgggaaagacatctcactggtgcttttctcttttgttttagtgccccccgcccccatccctataatatctgtaactactcctaaaaaggttttgattcaggcttttttttggtttcattttgtttttttaagaaaaagaaaatgaaaggaaaaaaataaaagatccagtgtctttctt

SEQ ID NO: 199224 - DNA, 908 bp, Artificial Sequence
  derived and/or modified sequence
gatagaacccaaagaaaggcaaagagtcctgcccggcaccggcgccgcgtgggccaaacctgcgcccgtggaggggcgcgcagagggcaccgggcgccgggagcaggcggcgcagcaccagcattgtgttagtgccgggaggccactgtgtcagcaagctgagagggaaactgaagcaagatgtcgggccggagtgggaagaagaaaatgtccaagctgtcccgttcagctagggcaggtgtcatctttccagtggggaggctgatgcgttatctgaagaaagggacgttcaagtaccggatcagcgtgggcgcccctgtctacatggcggcagtcattgagtacctggcagcggaaattctagaattggccggcaatgccgcgagggacaacaagaaggcccggatagccccgagacacatcttgctggcagttgccaatgacgaggagctcaaccagtccaaaccaaaggacagcgataaagaaggaacttcaaattccacctctgaagatgggccaggggatggattcaccattctgtcttctaagagccttgttctgggacagaagctgtccttaacccagagtgacatcagccatattggctccatgagagtggagggcattgtccacccaaccacagccgaaattgacctcaaagaagatataggtaaagccttggaaaaggctgggggaaaagagttcttggaaacggtaaaggagcttcgcaaatcccaaggccctttggaagtcgccgaagccgccgtcagccaatccagtggactcgcagccaaatttgtcatccactgtcacatccctcagtggggctccgacaaatgtgaagaacagcttgaagagaccatcaaaaactgcctgtcagcggcggaggacaagaagctaaagtccgt

SEQ ID NO: 199225 - protein, 795 aa, Artificial Sequence
  derived and/or modified sequence
MSARTPLPTVNERDTENHTSVDGYTEPHIQPTKSSSRQNIPRCRNSITSATDEQPHIGNYRLQKTIGKGNFAKVKLARHVLTGREVAVKIIDKTQLNPTSLQKLFREVRIMKILNHPNIVKLFEVIETEKTLYLVMEYASGGEVFDYLVAHGRMKEKEARAKFRQIVSAVQYCHQKYIVHRDLKAENLLLDGDMNIKIADFGFSNEFTVGNKLDTFCGSPPYAAPELFQGKKYDGPEVDVWSLGVILYTLVSGSLPFDGQNLKELRERVLRGKYRIPFYMSTDCENLLKKLLVLNPIKRGSLEQIMKDRWMNVGHEEEELKPYTEPDPDFNDTKRIDIMVTMGFARDEINDALINQKYDEVMATYILLGRKPPEFEGGESLSSGNLCQRSRPSSDLNNSTLQSPAHLKVQRSISANQKQRRFSDHAGPSIPPAVSYTKRPQANSVESEQKEEWDKDVARKLGSTTVGSKSEMTASPLVGPERKKSSTIPSNNVYSGGSMARRNTYVCERTTDRYVALQNGKDSSLTEMSVSSISSAGSSVASAVPSARPRHQKSMSTSGHPIKVTLPTIKDGSEAYRPGTTQRVPAASPSAHSISTATPDRTRFPRGSSSRSTFHGEQLRERRSVAYNGPPASPSHETGAFAHARRGTSTGIISKITSKFVRRDPSEGEASGRTDTSRSTSGEPKERDKEEGKDSKPRSLRFTWSMKTTSSMDPNDMMREIRKVLDANNCDYEQKERFLLFCVHGDARQDSLVQWEMEVCKLPRLSLNGVRFKRISGTSIAFKNIASKIANELKL

SEQ ID NO: 199226 - DNA, 2388 bp, Artificial Sequence
  derived and/or modified sequence
atgtctgctcggacacctctccctaccgtcaatgagcgcgacactgaaaatcatacttcggttgacggctatacagagccccacatacaaccaaccaagagctcctctagacagaacatccccagatgtcggaacagcattactagtgccacggacgagcaacctcatatcggaaattatcggcttcagaaaactatcggcaaaggaaatttcgcaaaggtgaaactagccagacacgttctcacaggcagagaagtggccgtgaagattatcgacaagacccagctgaatcccacatccctgcaaaaattatttcgcgaggtgaggatcatgaaaatcctgaaccatccaaatatcgtgaaattgtttgaggtcattgaaacagagaaaaccctgtacctagtaatggaatacgcgagcgggggagaggttttcgactacctcgttgctcatggacgaatgaaggagaaggaggctagagcaaagttcagacagattgtgagcgccgttcaatactgtcaccagaagtatatcgtccatagggatcttaaagcagaaaatctgctgttagacggcgacatgaacattaaaattgccgacttcggatttagcaatgagtttaccgttggcaataaattggacacattctgtgggtccccaccttacgccgctcccgagctgtttcaggggaagaaatatgacggacccgaggttgatgtgtggtctctgggagtcattctgtacacactcgtgtcgggatctctgcctttcgatggacagaacttgaaggaactacgtgagcgggtgctcagaggtaaatacagaataccattttacatgtcgaccgattgtgagaatcttctgaaaaagttactcgtgttaaatccgatcaagcgaggatccttggagcaaatcatgaaagataggtggatgaacgtgggtcatgaagaagaggagctgaaaccatatacagaaccggatcctgacttcaatgacacaaagcggattgatattatggtaacaatgggttttgcccgggacgaaataaatgatgctctgattaatcagaaatacgacgaggttatggcgacatacatcctgctgggcagaaaaccccctgaatttgaaggcggagaatccctgagctctggcaacttgtgccagcgatctcgcccgtcctccgacctcaataactccaccctccagagtcctgctcacctgaaggtgcagcgaagtatctcagctaaccaaaagcaacggcggttttctgatcatgctggaccgtccatccccccagcagtttcgtatactaagcgtcctcaggccaattctgtcgagtccgagcaaaaagaggagtgggacaaggacgtggctaggaaactggggtcgacgacagtgggcagcaaaagtgagatgacagcctctccgctggtgggccccgagagaaagaaaagctccaccattccatctaataatgtgtactcaggcgggagtatggcgcgcaggaatacatatgtctgcgaacggaccactgataggtacgtggcgttacagaatgggaaggattcatctttgactgagatgtccgtgtcttctataagctcagccgggagttcagtggcgtcagcggtacctagcgcaagacccagacaccagaaatctatgtcaacttcggggcaccctattaaagtgacactcccaaccatcaaagatggctctgaggcataccgccccggcacgacgcaaagagtacccgccgcctcacccagtgcacactcgatctcaacagctacacccgatcggacccgattcccacgggggtcttcctcacgctctacgtttcacggagaacagttacgggagaggcgcagcgtggcttataacgggcccccagcaagccccagccatgagacgggagcctttgctcatgcccggagagggaccagcaccggaatcatctcaaaaattacatctaaattcgtgcgccgtgaccctagcgagggggaggcgtcaggccgtactgacacgtcacgctccactagtggcgagcccaaggagagggacaaggaagagggaaaggatagcaagccaagatctctccgcttcacatggagcatgaagacaacatcttccatggacccaaacgatatgatgcgagaaatccgtaaggtgctggatgccaataattgcgattatgagcaaaaggaacgtttcctcctcttctgcgtgcatggggatgctcggcaagacagcctcgtgcaatgggaaatggaggtgtgtaaactgccaaggctctctttgaacggtgtgagattcaagagaataagtggcacttccatcgcttttaagaacatcgcatccaagatcgccaacgaactgaagctgtag

SEQ ID NO: 199227 - DNA, 2388 bp, Artificial Sequence
  derived and/or modified sequence
atgtctgcccggacccccctgcccaccgtgaatgaaagagacacagagaaccacacctctgtggatggctacacagagccccacatccagcccaccaagagcagcagccggcagaacatcccccgctgcaggaacagcatcaccagcgccacagatgagcagccccacatcggcaactaccgcctgcagaagaccatcggcaagggcaactttgccaaggtgaagctggcccggcacgtgctgaccggccgggaggtggccgtgaagatcatcgacaagacccagctgaaccccaccagcctgcagaagctgttccgggaggtgcgcatcatgaagatcctgaaccaccccaacatcgtgaagctgtttgaagtcatcgagacagagaagaccctgtacctggtgatggagtatgccagcggcggggaggtgtttgactacctggtggcccacggccgcatgaaggagaaggaggcccgggccaagttccggcagatcgtgtctgctgtgcagtactgccaccagaagtacatcgtgcaccgggacctgaaggccgagaacctgctgctggatggagacatgaacatcaagattgctgactttggcttcagcaatgagttcaccgtgggcaacaagctggacaccttctgtggcagccccccctatgctgcccctgagctgttccagggcaagaagtatgatggccctgaggtggatgtgtggagcctgggcgtcatcctgtacaccctggtgtctggcagcctgccctttgatggccagaacctgaaggagctgcgggagcgggtgctgcggggcaagtaccgcatccccttctacatgagcacagactgtgagaacctgctgaagaagctgctggtgctgaaccccatcaagaggggcagcctggagcagatcatgaaggaccgctggatgaatgtgggccacgaggaggaggagctgaagccctacacagagccagaccctgacttcaatgacaccaagagaattgacatcatggtgaccatgggctttgccagagatgagatcaatgatgccctgatcaaccagaagtatgatgaggtgatggccacctacatcctgctgggcaggaagcccccagagtttgaaggaggagagagcctgagcagcggcaacctgtgccagaggagccggcccagcagtgacctgaacaacagcaccctgcagagccctgcccacctgaaggtgcagaggagcatcagcgccaaccagaagcagaggcgcttcagtgaccacgccggccccagcatccccccagctgtgtcctacaccaagaggccccaggccaacagcgtggagagcgagcagaaggaggagtgggacaaggatgtggccaggaagctgggcagcaccaccgtgggcagcaagtctgagatgacagccagccccctggtgggccctgagaggaagaagagcagcaccatccccagcaacaacgtgtacagcggcggctccatggcccggaggaacacctacgtgtgtgagaggaccacagaccgctacgtggccctgcagaatggcaaggacagcagcctgacagagatgtctgtgagcagcatcagcagcgctggcagctctgtggccagcgctgtgcccagcgcccggcccaggcaccagaagtccatgagcaccagcggccaccccatcaaggtgaccctgcccaccatcaaggatggcagcgaggcctaccggcccggcaccacccagagggtgcctgctgccagccccagcgcccacagcatcagcacagccaccccagacaggacccgcttcccccggggcagcagcagccgcagcaccttccatggagagcagctgcgggagcggcgctctgtggcctacaacggccccccagccagccccagccatgagaccggggcctttgcccacgcccggcggggcaccagcacaggcatcatcagcaagatcaccagcaagtttgtgcggcgggaccccagcgagggggaggccagcggccgcacagacaccagccgcagcaccagcggggagcccaaggagcgggacaaggaggagggcaaggacagcaagcccaggagcctgcgcttcacctggagcatgaagaccaccagctccatggaccccaatgacatgatgagggagatcaggaaggtgctggatgccaacaactgtgactatgagcagaaggagcgcttcctgctcttctgtgtgcatggagatgcccggcaggacagcctggtgcagtgggagatggaggtgtgcaagctgccccggctgagcctgaatggagtgcgcttcaagaggatcagcggcaccagcatcgccttcaagaacatcgccagcaagatcgccaatgagctgaagctgtag

SEQ ID NO: 199228 - DNA, 2946 bp, Artificial Sequence
  derived and/or modified sequence
cgggcaaccgcctcgcccgaagccctccctcgttactgtccgcataccccggcggcgccgccgcgggaagcggctccccctcctcttcctccgcgtcctcttccctctttcccccgccggggccgcttgttgcaccgccccgcggcctgcgggagccgctcgccccggccttgtgctcgcgtccgcacccctttcctgtcgccccccggggcccgcaccacagcccggccggcgagaccccggccagaccccgctgcccgcacaaaatgtcggcccggacgccattgccgacggtgaacgagcgggacacggaaaatcatacatctgtggatggatatactgaaccacacatccagcctaccaagtcgagtagcagacagaacatcccccggtgtagaaactccattacgtcagcaacagatgaacagcctcacattggaaattaccgtttacaaaaaacaatagggaagggaaattttgccaaagtcaaattggcaagacacgttctaactggtagagaggttgctgtgaaaataatagacaaaactcagctaaatcctaccagtctacaaaagttatttcgagaagtacgaataatgaagatactgaatcatcctaatatagtaaaattgtttgaagttattgaaacagagaagactctctatttagtcatggaatacgcgagtgggggtgaagtatttgattacttagttgcccatggaagaatgaaagagaaagaggcccgtgcaaaatttaggcagattgtatctgctgtacagtattgtcatcaaaagtacattgttcaccgtgatcttaaggctgaaaaccttctccttgatggtgatatgaatattaaaattgctgactttggttttagtaatgaatttacagttgggaacaaattggacacattttgtggaagcccaccctatgctgctcccgagcttttccaaggaaagaagtatgatgggcctgaagtggatgtgtggagtctgggcgtcattctctatacattagtcagtggctccttgcctttcgatggccagaatttaaaggaactgcgagagcgagttttacgagggaagtaccgtattcccttctatatgtccacagactgtgaaaatcttctgaagaaattattagtcctgaatccaataaagagaggcagcttggaacaaataatgaaagatcgatggatgaatgttggtcatgaagaggaagaactaaagccatatactgagcctgatccggatttcaatgacacaaaaagaatagacattatggtcaccatgggctttgcacgagatgaaataaatgatgccttaataaatcagaagtatgatgaagttatggctacttatattcttctaggtagaaaaccacctgaatttgaaggtggtgaatcgttatccagtggaaacttgtgtcagaggtcccggcccagtagtgacttaaacaacagcactcttcagtcccctgctcacctgaaggtccagagaagtatctcagcaaatcagaagcagcggcgtttcagtgatcatgctggtccatccattcctcctgctgtatcatataccaaaagacctcaggctaacagtgtggaaagtgaacagaaagaggagtgggacaaagatgtggctcgaaaacttggcagcacaacagttggatcaaaaagcgagatgactgcaagccctcttgtagggccagagaggaaaaaatcttcaactattccaagtaacaatgtgtattctggaggtagcatggcaagaaggaatacatatgtctgtgaaaggaccacagatcgatacgtagcattgcagaatggaaaagacagcagccttacggagatgtctgtgagtagcatatcttctgcaggctcttctgtggcctctgctgtcccctcagcacgaccccgccaccagaagtccatgtccacttctggtcatcctattaaagtcacactgccaaccattaaagacggctctgaagcttaccggcctggtacaacccagagagtgcctgctgcttccccatctgctcacagtattagtactgcgactccagaccggacccgttttccccgagggagctcaagccgaagcactttccatggtgaacagctccgggagcgacgcagcgttgcttataatgggccacctgcttcaccatcccatgaaacgggtgcatttgcacatgccagaaggggaacgtcaactggtataataagcaaaatcacatccaaatttgttcgcagggatccaagtgaaggcgaagccagtggcagaaccgacacctcaagaagtacatcaggggaaccaaaagaaagagacaaggaagagggtaaagattctaagccgcgttctttgcggttcacatggagtatgaagaccactagttcaatggaccctaatgacatgatgagagaaatccgaaaagtgttagatgcaaataactgtgattatgagcaaaaagagagatttttgcttttctgtgtccatggagacgctagacaggatagcctcgtgcagtgggagatggaagtctgcaagttgccacgactgtcacttaatggggttcgcttcaagcgaatatctgggacatctattgcctttaagaacattgcatcaaaaatagcaaatgagcttaagctgtaaagaagtccaaatttacaggttcagggaagatacatacatatatgaggtacagtttttgaatgtactggtaatgcctaatgtggtctgcctgtgaatctccccatgtagaatttgcccttaatgcaataaggttatacatagttatgaactgtaaaattaaagtcagtatgaactataataaatatctgtagcttaaaaagtaggttcacatgtacaggtaagtatattgtgtatttctgttcattttctgttcatagagttgtataataaaacatgattgcttaaaaacttg

SEQ ID NO: 199229 - DNA, 2388 bp, Artificial Sequence
  derived and/or modified sequence
atgagcgcccggacccccctgcccaccgtgaacgagcgggacaccgagaaccacacctctgtcgatggatatacggaaccccatatccagccaacaaagagctcaagcagacagaacatccctcgctgccgtaattctattacctccgctaccgatgagcagccccacatcggcaactatcgcctgcaaaagacaatagggaaggggaactttgccaaggtcaagttagccaggcatgtgcttactgggagggaggtcgctgtcaagatcattgataagacccagttaaaccccacatccctgcagaaacttttcagggaggtccgaatcatgaagatactgaaccatcctaacattgtgaagctcttcgaagttatcgagactgagaaaactttatatttagtcatggaatacgctagtgggggagaggtgttcgattatctagttgcgcatggtcggatgaaggagaaagaggcaagagctaagtttcggcagatcgtgtccgccgtgcaatattgccaccagaaatatattgtgcatagggacctcaaggcggagaatctacttctggacggcgatatgaacataaagatcgctgattttggctttagtaatgaattcactgtggggaacaaactggatacattttgcggatctccgccttatgccgctccagagctatttcagggtaaaaaatatgatggacctgaggtggatgtgtggagtctgggagttatcctgtacactctcgtctcaggatcattgccttttgatggccagaatctaaaggagctcagggagagggtgttgcgcggaaagtacaggattccattttacatgagcacagactgtgagaatctgcttaaaaagctgctggtgttgaatcccattaaaaggggtagcctcgagcagatcatgaaggaccggtggatgaacgtcggccatgaggaagaggagctaaaaccatatactgaaccagaccctgactttaacgacaccaagcgcattgatatcatggtcaccatggggttcgcccgggatgagatcaatgacgcgttaatcaaccagaagtacgacgaggttatggccacctacatactcctggggaggaagccccctgaattcgaagggggcgaatctctctcatcgggaaatctctgtcaacgttcccgaccaagtagcgacctgaacaatagcactctacagagccccgcacatctgaaagtccagcggtcaattagtgcaaatcaaaaacaacggagatttagtgatcatgcagggcctagtattccacctgcggtgagctataccaaacggccccaggccaattcagtggaatcagagcagaaagaggagtgggataaagatgtggctcgaaaattgggatctacgacagttggcagtaagtctgagatgacagccagtcctctcgtgggtccggagcggaaaaaatcaagcacaatccccagcaacaacgtgtacagtggggggtctatggctcgaagaaacacttacgtgtgcgagagaacaacagatagatacgttgcgctgcagaacgggaaggactcttccttgacagaaatgtctgtgtcttctatttcttctgcaggttccagcgtcgcaagcgccgtaccttcagcacgtccacggcatcagaaatccatgtcaacatcaggacaccccatcaaggtcacactgccgactatcaaggacggtagcgaggcatataggcctggaactacccagcgcgtgccagccgcatcaccctcagcccacagcatttccacagctacacccgacagaactcgcttcccacggggatcttcttctcggtccacatttcacggtgagcagctgcgggaaagaagaagtgttgcttacaacggcccccctgcatcccctagtcatgagacaggggctttcgcacacgcacgccgaggcacctccacgggcatcatttctaaaatcactagcaagtttgtgcgccgtgaccccagcgaaggggaggccagtggccgcactgacacatctcggtccaccagtggcgagccgaaagagcgggataaagaagaaggtaaagactccaagcccagatccctaaggttcacttggtctatgaaaactacaagttctatggaccccaacgatatgatgagggagattcgcaaggtcctggacgctaataactgcgactatgagcagaaggagcggtttttgctcttttgtgtgcatggagacgccagacaagactccctggttcagtgggagatggaggtgtgcaaactgcctcgcctgtccctcaacggtgtgaggtttaagagaatcagtggaacttcaatcgccttcaagaacattgctagcaaaatcgcgaatgagctcaagctgtag

SEQ ID NO: 199230 - DNA, 2388 bp, Artificial Sequence
  derived and/or modified sequence
atgtccgccagaacgccccttccaaccgtcaatgagcgggacactgagaaccacactagtgtcgatggatatactgaaccacacatccagcctacaaagtcctctagtcgacagaatattcctaggtgccggaactccatcacctccgctactgatgagcaaccccatatcgggaattaccggttacagaaaaccattggaaaaggcaattttgcaaaggtgaaactggccaggcatgttcttactggcagagaagtggccgttaagatcattgacaaaacacaactaaatcccacctccctgcaaaaactttttcgagaagtacggattatgaagatcctgaaccatcctaatattgtcaagctgttcgaggtcatagagacagaaaaaacgctctatctggttatggaatatgcttcaggcggtgaagtctttgattacctggtggctcacggtcgcatgaaggaaaaggaggcgagagcgaaatttagacagattgtgagcgcggtgcagtactgtcatcagaagtatattgtgcatcgggacctcaaagccgaaaacctcctgttagacggcgatatgaatattaaaatcgcagatttcggcttttccaatgagttcactgtcggcaataagttagacacattttgtggcagcccaccgtatgcggcacctgaactgtttcagggtaagaaatacgacggccctgaggtagatgtctggtcattgggcgttattttatataccctggtgagcggctcgttaccattcgatgggcagaacctgaaggagctacgtgaaagagttctgcggggtaagtatagaataccgttttatatgtcgactgactgcgagaacctcctcaagaaactgcttgtgcttaatcccattaagcgcggatcactagagcagattatgaaggaccggtggatgaacgtgggacacgaggaagaggaactcaagccatacaccgaaccagatccagatttcaacgacaccaagaggatcgacatcatggtgacgatgggattcgctagggacgaaatcaacgatgccctgatcaaccagaagtatgacgaggtgatggctacgtatatcctgctggggaggaagccacctgaattcgaggggggagaatcactcagtagtggtaatctgtgtcaacggtcaaggccaagctcagacctcaacaactctactttgcaatccccagctcacctgaaagtgcaaaggtctattagcgcaaatcagaaacagaggcggttcagtgatcacgcgggtccaagcataccgcctgcggtttcttacacaaaaagacctcaggccaactcagtagaaagcgaacagaaggaggaatgggacaaagacgtagcaagaaagttggggtccactactgttgggagtaaatctgagatgactgcatccccacttgttggtcccgaaagaaagaagtctagcacgattcctagtaataatgtttattctggaggtagtatggcacgacggaatacatatgtgtgtgagaggacgacagataggtacgtagccctacagaatgggaaggactcctcccttaccgaaatgtctgtgagttccattagcagtgcgggatcaagcgtcgcttccgctgttccctctgccaggccacggcaccagaaaagcatgtctacttcaggccacccaatcaaggtcaccctgcctaccataaaggatgggtccgaagcgtatcgccctgggacaactcagagagtgccagccgcaagcccttccgctcattcgatttccactgccactcccgacaggacaaggttccctaggggatcttccagccggagtaccttccacggagaacagcttcgagagcgcaggtcagtggcctacaacggcccaccagccagtccatctcatgagacaggggctttcgcccacgctcgacgtggtacttccacaggaataattagtaaaatcaccagcaagttcgtccgtcgcgatcctagtgagggtgaggcatccgggagaaccgataccagcaggtctacaagcggcgaaccgaaagagagagataaggaggaggggaaagattccaagcccagatccctgagatttacctggtccatgaaaacaacatccagcatggaccctaacgacatgatgagggaaatccggaaagtcctggatgctaacaactgcgactatgaacagaaagagcgattcctcctgttctgtgttcacggcgacgcgcgtcaagactccttggtccagtgggagatggaggtctgtaagctgccacgtttaagtttgaacggcgtaagattcaagagaatctccgggacatctatcgcattcaagaacattgcttctaagattgccaacgaactgaaactatag

SEQ ID NO: 199231 - DNA, 2388 bp, Artificial Sequence
  derived and/or modified sequence
atgagcgccagaacccccctgcccaccgtgaacgagagagacaccgagaaccacaccagcgtggacggctacaccgagccccacatccagcccaccaagagcagcagcagacagaacatccccagatgcagaaacagcatcaccagcgccaccgacgagcagccccacatcggcaactacagactgcagaagaccatcggcaagggcaacttcgccaaggtgaagctggccagacacgtgctgaccggcagagaggtggccgtgaagatcatcgacaagacccagctgaaccccaccagcctgcagaagctgttcagagaggtgagaatcatgaagatcctgaaccaccccaacatcgtgaagctgttcgaggtgatcgagaccgagaagaccctgtacctggtgatggagtacgccagcggcggcgaggtgttcgactacctggtggcccacggcagaatgaaggagaaggaggccagagccaagttcagacagatcgtgagcgccgtgcagtactgccaccagaagtacatcgtgcacagagacctgaaggccgagaacctgctgctggacggcgacatgaacatcaagatcgccgacttcggcttcagcaacgagttcaccgtgggcaacaagctggacaccttctgcggcagccccccctacgccgcccccgagctgttccagggcaagaagtacgacggccccgaggtggacgtgtggagcctgggcgtgatcctgtacaccctggtgagcggcagcctgcccttcgacggccagaacctgaaggagctgagagagagagtgctgagaggcaagtacagaatccccttctacatgagcaccgactgcgagaacctgctgaagaagctgctggtgctgaaccccatcaagagaggcagcctggagcagatcatgaaggacagatggatgaacgtgggccacgaggaggaggagctgaagccctacaccgagcccgaccccgacttcaacgacaccaagagaatcgacatcatggtgaccatgggcttcgccagagacgagatcaacgacgccctgatcaaccagaagtacgacgaggtgatggccacctacatcctgctgggcagaaagccccccgagttcgagggcggcgagagcctgagcagcggcaacctgtgccagagaagcagacccagcagcgacctgaacaacagcaccctgcagagccccgcccacctgaaggtgcagagaagcatcagcgccaaccagaagcagagaagattcagcgaccacgccggccccagcatcccccccgccgtgagctacaccaagagaccccaggccaacagcgtggagagcgagcagaaggaggagtgggacaaggacgtggccagaaagctgggcagcaccaccgtgggcagcaagagcgagatgaccgccagccccctggtgggccccgagagaaagaagagcagcaccatccccagcaacaacgtgtacagcggcggcagcatggccagaagaaacacctacgtgtgcgagagaaccaccgacagatacgtggccctgcagaacggcaaggacagcagcctgaccgagatgagcgtgagcagcatcagcagcgccggcagcagcgtggccagcgccgtgcccagcgccagacccagacaccagaagagcatgagcaccagcggccaccccatcaaggtgaccctgcccaccatcaaggacggcagcgaggcctacagacccggcaccacccagagagtgcccgccgccagccccagcgcccacagcatcagcaccgccacccccgacagaaccagattccccagaggcagcagcagcagaagcaccttccacggcgagcagctgagagagagaagaagcgtggcctacaacggcccccccgccagccccagccacgagaccggcgccttcgcccacgccagaagaggcaccagcaccggcatcatcagcaagatcaccagcaagttcgtgagaagagaccccagcgagggcgaggccagcggcagaaccgacaccagcagaagcaccagcggcgagcccaaggagagagacaaggaggagggcaaggacagcaagcccagaagcctgagattcacctggagcatgaagaccaccagcagcatggaccccaacgacatgatgagagagatcagaaaggtgctggacgccaacaactgcgactacgagcagaaggagagattcctgctgttctgcgtgcacggcgacgccagacaggacagcctggtgcagtgggagatggaggtgtgcaagctgcccagactgagcctgaacggcgtgagattcaagagaatcagcggcaccagcatcgccttcaagaacatcgccagcaagatcgccaacgagctgaagctgtag

SEQ ID NO: 199232 - protein, 754 aa, Artificial Sequence
  derived and/or modified sequence
MTTAGRGNLGLIPRSTAFQKQEGRLTVKQEPANQTWGQGSSLQKNYPPVCEIFRLHFRQLCYHEMSGPQEALSRLRELCRWWLMPEVHTKEQILELLVLEQFLSILPGELRTWVQLHHPESGEEAVAVVEDFQRHLSGSEEVSAPAQKQEMHFEETTALGTTKESPPTSPLSGGSAPGAHLEPPYDPGTHHLPSGDFAQCTSPVPTLPQVGNSGDQAGATVLRMVRPQDTVAYEDLSVDYTQKKWKSLTLSQRALQWNMMPENHHSMASLAGENMMKGSELTPKQEFFKGSESSNRTSGGLFGVVPGAAETGDVCEDTFKELEGQTSDEEGSRLENDFLEITDEDKKKSTKDRYDKYKEVGEHPPLSSSPVEHEGVLKGQKSYRCDECGKAFNRSSHLIGHQRIHTGEKPYECNECGKTFRQTSQLIVHLRTHTGEKPYECSECGKAYRHSSHLIQHQRLHNGEKPYKCNECAKAFTQSSRLTDHQRTHTGEKPYECNECGEAFIRSKSLARHQVLHTGKKPYKCNECGRAFCSNRNLIDHQRIHTGEKPYECSECGKAFSRSKCLIRHQSLHTGEKPYKCSECGKAFNQNSQLIEHERIHTGEKPFECSECGKAFGLSKCLIRHQRLHTGEKPYKCNECGKSFNQNSHLIIHQRIHTGEKPYECNECGKVFSYSSSLMVHQRTHTGEKPYKCNDCGKAFSDSSQLIVHQRVHTGEKPYECSECGKAFSQRSTFNHHQRTHTGEKSSGLAWSVS

SEQ ID NO: 199233 - protein, 203 aa, Artificial Sequence
  derived and/or modified sequence
SKCLIRHQSLHTGEKPYKCSECGKAFNQNSQLIEHERIHTGEKPFECSECGKAFGLSKCLIRHQRLHTGEKPYKCNECGKSFNQNSHLIIHQRIHTGEKPYECNECGKVFSYSSSLMVHQRTHTGEKPYKCNDCGKAFSDSSQLIVHQRVHTGEKPYECSECGKAFSQRSTFNHHQRTHTGEVLRSGLVSFLRYGSETESNDL

SEQ ID NO: 199234 - DNA, 3483 bp, Artificial Sequence
  derived and/or modified sequence
taacgggcagtagagtgtccggcttcggtgccgagtgccaccgcgagtgggccgagacgcggagggaggcgcggccggagctcgggtcgccgacgctggccaggaccgcgcttcttcccggcggcaggcggcgcggtccccgtgactctcagaagccgcccgatgtagagccgcttctttgtctcatacccctgaccattcgtgcgtggcacggagccgggtatctgcgggtacagcgatgaacagggcagacgtggccaggtgagcggcgctgctgaagcctggtttaacacgaaaggccacactaccatcacccctttctccaaccctgaaaaacagttcctgagacctgaactattgaccatcattttaatcggaccaactgcagctgtaacaagcttctctttggggtcacaatgaccactgcaggcaggggaaatttaggcctcatccccaggagcactgctttccagaagcaagaggggcgcctgactgtgaagcaggagccagcaaaccagacctgggggcagggcagcagtctccagaagaactatcctcctgtctgcgaaatcttccggctacacttcaggcaattgtgttaccacgagatgtctgggccgcaggaagcattgagccggcttcgggagctctgccgctggtggctcatgccagaggtgcacaccaaggagcagatcctggagctgctggtgcttgagcagttcctgagcatcctccctggggagctccggacctgggtgcagctgcatcaccctgagagtggtgaggaggctgtggctgtggtggaggatttccagagacacctcagtggatcagaggaggtttcagccccagcacagaaacaggaaatgcattttgaggagacaacagctctgggtacaacaaaggaatctcctcctacctcacccctcagtgggggctcagcccctggagcccacctggagcctccttatgacccagggacacaccacctccccagtggggacttcgctcaatgtacttctccagttcctacccttcctcaagtggggaactcaggagaccaagcaggggcaactgtacttcggatggtcaggccccaggatactgtggcatatgaggacctatctgtagactacactcagaagaaatggaaaagtctcacactcagtcagagagccctgcagtggaacatgatgccagaaaatcaccatagcatggcctccttggcaggtgagaacatgatgaagggttcagagttgactccaaagcaggaattttttaaaggatcagagtcatctaacaggacatcagggggactctttggggtggttcctggggcagcagagactggagatgtttgtgaagatactttcaaggagttagaaggacaaacctcagatgaagaagggagcagactagaaaatgatttcttggaaataacagatgaagataagaaaaaatccacaaaagacagatatgacaaatataaggaagttggggaacatccacctctgtcttccagtcctgttgaacatgaaggagttttaaagggacagaaatcctatcgatgtgatgaatgtggcaaagctttcaatcggagttctcaccttattggccatcagagaatccacactggagagaaaccctatgagtgtaatgagtgtgggaagaccttcaggcaaacctcccagctcattgttcatctcagaacccacacaggggaaaaaccctatgaatgcagtgagtgtggaaaggcctataggcacagctcccatctcattcaacaccagagactccataatggggagaaaccctataaatgtaatgaatgtgcaaaagcctttactcagagttcccgactcactgaccaccagagaacccatactggggagaaaccttatgaatgcaatgagtgtggagaggcattcattcgaagcaaaagtcttgctcgacatcaggtcctgcacactggtaagaaaccttacaaatgcaatgagtgtgggagagcattctgttccaatagaaatctcattgaccatcagagaatccacactggggagaagccttatgagtgtagtgaatgtggcaaagccttcagtcggagtaaatgtcttattcgacatcagagcctccatactggggaaaagccatacaaatgtagtgaatgtgggaaagccttcaatcagaactctcaactcattgagcatgagcgaattcatactggagaaaaaccttttgaatgtagcgagtgtggtaaggcatttggtctgagtaaatgtcttattcggcaccagagacttcacacgggtgaaaagccctataaatgcaatgagtgtggaaaatccttcaatcaaaactcacaccttattatacaccagagaattcacactggtgagaaaccctatgaatgtaatgagtgtgggaaggtattcagttatagctccagccttatggtacatcagagaacccatactggggaaaaaccctataaatgcaatgattgtgggaaagcttttagtgacagctcacagcttattgtacaccagagagtccacaccggagagaaaccttatgaatgtagtgaatgtgggaaagcctttagtcagcgttccacttttaatcaccaccagcgaactcacactggagagaagtcctcaggtctggcttggtcagtttcttaaggtatggttctctgagacagagagcaacgacctttgagttaagctgtctttataagcaggatgctcatagtggtttcccggagccagtagtcacggtggaccattccctacttgcttttccttggatcactaaggtgggagagtaggagtaacttattccagttcttacccattattaggaaggtaaggactacacatgtcattgaattgtaggtttcctttttttttctttacttttaaattttaacttttaaaatctatttcatttcttagttatgcatctcataatcagactccatgctttttaaagacagagataatatcttctctattctattctacttcctccatttcaccatttatacaaagtcattcaaaaaggctgattcatgccttcctgcctcttggctatggccctccccatctactctttaaactttaatctataacttttcatcagttttgttccctatctagaaaacattttcttctgtttgctaatctttgtccctcacaatttttgaaatccatctcatcactgaaatactttcttcttcaagtacttttttatttttcttcaacttctcttgatttgacctcagtgctttgaattcactggtgctacaatatgtaactgtggttaattgccttgtaaattttgcgtgtctgtatacttttataccaacttattgtaggctctttgaggtcaggtatgtatttctttcccatatagatagtattttgtacataccagttgttaaataaataatttttaaaatctcaaaaaaaaaaaaaaaaaaaa

SEQ ID NO: 199235 - DNA, 2265 bp, Artificial Sequence
  derived and/or modified sequence
atgaccaccgccggcagaggcaacctgggcctgatccccagaagcaccgccttccagaagcaggagggcagactgaccgtgaagcaggagcccgccaaccagacctggggccagggcagcagcctgcagaagaactacccccccgtgtgcgagatcttcagactgcacttcagacagctgtgctaccacgagatgagcggcccccaggaggccctgagcagactgagagagctgtgcagatggtggctgatgcccgaggtgcacaccaaggagcagatcctggagctgctggtgctggagcagttcctgagcatcctgcccggcgagctgagaacctgggtgcagctgcaccaccccgagagcggcgaggaggccgtggccgtggtggaggacttccagagacacctgagcggcagcgaggaggtgagcgcccccgcccagaagcaggagatgcacttcgaggagaccaccgccctgggcaccaccaaggagagcccccccaccagccccctgagcggcggcagcgcccccggcgcccacctggagcccccctacgaccccggcacccaccacctgcccagcggcgacttcgcccagtgcaccagccccgtgcccaccctgccccaggtgggcaacagcggcgaccaggccggcgccaccgtgctgagaatggtgagaccccaggacaccgtggcctacgaggacctgagcgtggactacacccagaagaagtggaagagcctgaccctgagccagagagccctgcagtggaacatgatgcccgagaaccaccacagcatggccagcctggccggcgagaacatgatgaagggcagcgagctgacccccaagcaggagttcttcaagggcagcgagagcagcaacagaaccagcggcggcctgttcggcgtggtgcccggcgccgccgagaccggcgacgtgtgcgaggacaccttcaaggagctggagggccagaccagcgacgaggagggcagcagactggagaacgacttcctggagatcaccgacgaggacaagaagaagagcaccaaggacagatacgacaagtacaaggaggtgggcgagcacccccccctgagcagcagccccgtggagcacgagggcgtgctgaagggccagaagagctacagatgcgacgagtgcggcaaggccttcaacagaagcagccacctgatcggccaccagagaatccacaccggcgagaagccctacgagtgcaacgagtgcggcaagaccttcagacagaccagccagctgatcgtgcacctgagaacccacaccggcgagaagccctacgagtgcagcgagtgcggcaaggcctacagacacagcagccacctgatccagcaccagagactgcacaacggcgagaagccctacaagtgcaacgagtgcgccaaggccttcacccagagcagcagactgaccgaccaccagagaacccacaccggcgagaagccctacgagtgcaacgagtgcggcgaggccttcatcagaagcaagagcctggccagacaccaggtgctgcacaccggcaagaagccctacaagtgcaacgagtgcggcagagccttctgcagcaacagaaacctgatcgaccaccagagaatccacaccggcgagaagccctacgagtgcagcgagtgcggcaaggccttcagcagaagcaagtgcctgatcagacaccagagcctgcacaccggcgagaagccctacaagtgcagcgagtgcggcaaggccttcaaccagaacagccagctgatcgagcacgagagaatccacaccggcgagaagcccttcgagtgcagcgagtgcggcaaggccttcggcctgagcaagtgcctgatcagacaccagagactgcacaccggcgagaagccctacaagtgcaacgagtgcggcaagagcttcaaccagaacagccacctgatcatccaccagagaatccacaccggcgagaagccctacgagtgcaacgagtgcggcaaggtgttcagctacagcagcagcctgatggtgcaccagagaacccacaccggcgagaagccctacaagtgcaacgactgcggcaaggccttcagcgacagcagccagctgatcgtgcaccagagagtgcacaccggcgagaagccctacgagtgcagcgagtgcggcaaggccttcagccagagaagcaccttcaaccaccaccagagaacccacaccggcgagaagagcagcggcctggcctggagcgtgagctag

SEQ ID NO: 199236 - DNA, 2265 bp, Artificial Sequence
  derived and/or modified sequence
atgaccacagctggccggggtaacctgggtcttatccccaggtccacagcctttcagaaacaagaaggacgccttaccgtgaagcaggagccagccaaccagacgtggggccagggctcttctcttcaaaaaaattaccctccggtgtgtgaaatatttagattgcatttcagacagttatgctaccatgagatgtctgggcctcaggaagccctttcacgcctccgtgagctgtgtcggtggtggctgatgcctgaggtgcatacaaaggagcagattctggaactgctggtgctggagcagtttctctctatcttgcctggcgaattgcgtacctgggtccaactccaccaccctgagtccggcgaggaagccgtagccgtcgtggaggacttccagaggcacctcagcgggagcgaagaggtgtctgcccctgcccagaagcaagaaatgcattttgaggaaacgactgccctgggcacgactaaggaatcgccgcctactagccctctctcagggggaagtgcacccggcgcgcatctggaacccccatatgaccctggtacgcatcacctcccctctggcgacttcgcccagtgtacctctccggtgccaaccctgccacaggtcgggaattcaggagatcaggcaggcgccacagtgttaaggatggtgagaccccaggacactgtagcctacgaggatctgtccgtggattatacccagaagaagtggaagtccctcacgttgtcacaaagggccctgcagtggaatatgatgcctgaaaaccaccattcgatggcgtccctggctggggaaaacatgatgaaaggatctgagctcacacccaagcaggagttcttcaagggttcagaatcttctaaccggacttcaggaggcctcttcggcgtcgtgcctggtgcggctgaaacaggtgacgtgtgtgaggacacattcaaagagttagaagggcaaacttctgatgaagaggggtccaggctggagaatgacttcttagagatcaccgatgaggacaagaagaaatctaccaaagatcgctatgacaagtacaaggaagtaggggaacacccaccactgagtagttcaccagttgagcacgagggcgtgttgaagggacaaaagagttatcgatgtgatgagtgtggaaaagctttcaaccgatcaagccacctcatcggacaccagcggatccatactggagaaaaaccttatgaatgtaacgagtgcggaaagaccttcaggcagacgtcacagttaatcgttcatctgcggacacatacaggtgagaaaccatatgagtgctcagaatgcgggaaagcatatcgccacagttcacatctgattcagcaccagaggctccataacggagagaagccttacaagtgcaatgagtgcgccaaggccttcacacagtcctccagactgaccgaccatcagaggacgcacacaggggagaagccctacgagtgtaacgagtgcggcgaggcatttatcagatcaaagagtctggcacgtcaccaagtgctgcacacaggcaagaagccctataaatgcaacgaatgcggacgcgccttttgttctaatcggaacttgattgatcaccagcgcattcataccggagagaagccttatgagtgttccgagtgtggaaaagcattctccaggagtaaatgcttgattcgccatcagagtctgcatactggagagaaaccatacaaatgttctgaatgtggaaaagcttttaatcagaacagtcagctgattgagcatgagaggatccacaccggtgaaaagccatttgagtgttcagagtgtggtaaggccttcggactttcaaaatgcctcatccgacatcaacgccttcatacgggcgaaaaaccttacaagtgcaacgaatgcggcaaatcttttaatcaaaactctcacctgatcatccaccaaaggatccacacaggggagaagccctacgaatgcaacgaatgcggtaaggtgttttcgtatagcagtagtttgatggtccaccagaggactcacacaggcgagaaaccttataagtgtaatgactgcggtaaagctttctctgatagtagtcagctaatcgtccaccagcgcgttcacacaggcgaaaaaccttacgagtgctccgaatgtggcaaagctttctcacagcgtagcacctttaaccaccaccagagaacacatacaggagaaaagtctagtggcctggcctggagcgtgtcttag

SEQ ID NO: 199237 - DNA, 2265 bp, Artificial Sequence
  derived and/or modified sequence
atgacaacagctggacgcggtaaccttggccttattccccgttccacggcgttccagaaacaggaagggagactgaccgtgaagcaagagcctgccaaccagacctgggggcagggaagctctttgcaaaaaaattacccccccgtgtgcgaaattttccgactccacttccgacagctgtgctaccacgagatgtccggtcctcaggaagccctctcgagactgcgtgaactctgtcgatggtggttgatgcctgaagtccacaccaaggaacagattttggagctgttagtgctggaacagttcctgagcatccttcccggtgagctgcgcacgtgggtccagctgcaccaccctgagtctggcgaagaggccgtggccgtggttgaagactttcagcgccacctgtctggttcagaagaggtgagcgcaccagcccagaagcaggagatgcactttgaagaaacaacagcgctgggaactacaaaagaatcacctcccacttctcccctgtccgggggaagtgcacccggtgcacacctggaaccaccctacgaccctggaactcaccatctacctagcggtgactttgcacagtgtacttcaccagtccccaccctgccccaggtaggcaattccggagatcaagccggcgctacggtcttgagaatggtgagaccacaggataccgtggcatacgaagatctttccgtcgattacactcagaagaagtggaaatcactgaccctaagccagagggccctccagtggaacatgatgcccgaaaaccaccatagcatggccagtttggctggggaaaatatgatgaaaggcagtgaattgacacccaaacaagagtttttcaaagggtctgaaagctcaaacagaacctccggaggtctgttcggagtggtgccaggtgccgcggagacaggggacgtgtgcgaggatacttttaaggagcttgaaggccagacatcggatgaagagggcagcagacttgagaatgattttctagagattaccgatgaggataaaaagaagtcaacgaaagaccgttatgacaagtacaaagaagtgggggaacatccaccactttcctcgtcccccgtagaacatgagggagtgctcaaaggtcagaagtcatataggtgcgacgagtgcggaaaggccttcaatagatcatcacatctgattggccaccagagaatccacaccggggagaagccctatgaatgtaacgaatgcggtaaaaccttccggcagacctctcagctgattgtgcacctgaggactcacacaggcgagaaaccctatgagtgtagtgagtgcggcaaggcgtaccgccattcatcacacctcatccaacatcagagactgcataacggcgagaaaccctacaagtgtaatgagtgcgccaaagccttcactcaatcgagtcggctaacagatcaccaaaggacccacacaggggagaaaccatatgagtgcaatgaatgtggagaggcctttattaggagcaagagcctggctcggcaccaggtgctgcacaccggcaagaagccctacaaatgtaacgagtgcggccgggctttctgtagcaacagaaacttgattgaccaccaaaggattcacaccggcgagaagccatatgagtgttccgagtgtggcaaggccttttccaggtcgaagtgcctcatccgccaccagtcactgcacacaggggaaaaaccttacaagtgctcggaatgtggaaaggcctttaaccagaatagccaactcattgaacatgagcgaattcacactggagagaaacccttcgaatgctcagaatgtgggaaggccttcggtctatccaagtgtctgatccggcaccaacgcttgcataccggagagaaaccttataaatgcaacgagtgcgggaagagctttaatcaaaattcccacctcattattcaccagcggattcacacaggagagaagccgtatgagtgcaatgagtgtgggaaggtattttcgtattcctcaagcctgatggtgcatcagaggacccataccggggagaaaccctacaaatgcaacgattgtggcaaagcattcagcgattccagccagctcatcgtccaccagcgagtacacacaggtgagaaaccgtatgagtgtagcgaatgtgggaaggcattttctcagcggagcaccttcaatcaccatcagcgcactcacactggcgaaaaaagctctggtttggcctggagcgtctcttag

SEQ ID NO: 199238 - DNA, 2265 bp, Artificial Sequence
  derived and/or modified sequence
atgaccacagctggccggggcaacctgggcctcatccccaggagcacagccttccagaagcaggagggccgcctgactgtgaagcaggagcccgccaaccagacctggggccagggcagcagcctgcagaagaactacccacctgtgtgtgagatcttccggctgcacttccggcagctgtgctaccacgagatgagcggcccccaggaggccctgagccggctgcgggagctgtgccgctggtggctgatgcctgaggtgcacaccaaggagcagatcctggagctgctggtgctggagcagttcctgagcatcctgcctggagagctgcggacctgggtgcagctgcaccaccctgagagcggggaggaggccgtggccgtggtggaggacttccagaggcacctgagcggcagcgaggaggtgtctgccccagcccagaagcaggagatgcactttgaggagaccacagccctgggcaccaccaaggagagcccccccaccagccccctgagcggcggcagcgcccctggggcccacctggagcccccctatgaccccggcacccaccacctgcccagcggggactttgcccagtgcaccagccctgtgcccaccctgccccaggtgggcaacagcggggaccaggccggggccaccgtgctgaggatggtgcggccccaggacacagtggcctatgaggacctgtctgtggactacacccagaagaagtggaagagcctgaccctgagccagagggccctgcagtggaacatgatgcctgagaaccaccacagcatggccagcctggccggggagaacatgatgaagggcagcgagctgacccccaagcaggagttcttcaagggcagcgagagcagcaacagaaccagcggcggcctgtttggagtggtgcctggagctgctgagactggagatgtgtgtgaggacaccttcaaggagctggagggccagaccagtgatgaggagggcagccggctggagaatgacttcctggagatcacagatgaggacaagaagaagagcaccaaggacagatatgacaagtacaaggaggtgggggagcacccccccctgagcagcagccctgtggagcatgaaggagtgctgaagggccagaagagctaccgctgtgatgaatgtgggaaggccttcaacagaagcagccacctgattggccaccagaggatccacactggagagaagccctatgagtgcaatgaatgtgggaagaccttccggcagaccagccagctgattgtgcacctgcggacccacactggagagaagccctatgagtgcagtgaatgtgggaaggcctaccgccacagcagccacctgatccagcaccagaggctgcacaacggggagaagccctacaagtgcaatgaatgtgccaaggccttcacccagagcagccggctgacagaccaccagaggacccacactggagagaagccctatgagtgcaatgaatgtggggaggccttcatccgcagcaagagcctggcccggcaccaggtgctgcacacaggcaagaagccctacaagtgcaatgaatgtggccgggccttctgcagcaacagaaacctgattgaccaccagaggatccacactggagagaagccctatgagtgcagtgaatgtgggaaggccttcagccgcagcaagtgcctgatccgccaccagagcctgcacactggagagaagccctacaagtgcagtgaatgtgggaaggccttcaaccagaacagccagctgattgaacatgagcgcatccacactggagagaagccctttgagtgcagtgaatgtgggaaggccttcggcctgagcaagtgcctgatccgccaccagaggctgcacactggagagaagccctacaagtgcaatgaatgtgggaagagcttcaaccagaacagccacctgatcatccaccagaggatccacactggagagaagccctatgagtgcaatgaatgtgggaaggtgttctcctacagcagcagcctgatggtgcaccagaggacccacactggagagaagccctacaagtgcaatgactgtgggaaggccttcagtgacagcagccagctgattgtgcaccagagggtgcacactggagagaagccctatgagtgcagtgaatgtgggaaggccttcagccagaggagcaccttcaaccaccaccagaggacccacactggagagaagagcagcggcctggcctggagcgtgtcctag

SEQ ID NO: 199239 - DNA, 2265 bp, Artificial Sequence
  derived and/or modified sequence
atgaccaccgccggccggggcaacctgggcctgatcccccggagcaccgccttccagaagcaagaaggtcgacttacagtaaagcaggaaccagcgaaccagacatggggccagggctccagcttacagaagaactacccaccagtgtgcgaaatctttagactgcattttcggcagctatgctatcacgaaatgtctggcccacaggaggctctaagcaggctgagagaactgtgtcgatggtggctcatgcctgaagtccacaccaaggagcagatcctggaactccttgttctggaacaatttttgagcatcttgcctggagagctgcggacctgggtgcaactccatcatcctgagagtggggaagaagctgtggccgttgttgaggacttccagcgacacctatctgggagcgaggaggtgtctgcccccgctcagaaacaagagatgcactttgaggagaccacggctctcggtaccaccaaagagagccctcctacttctcctctttccggcggttctgctcctggggcgcatctcgagccaccttatgacccgggtacacaccacctcccctccggcgactttgcacaatgtacaagcccagtgccgaccctgccgcaagtcggcaacagcggcgaccaggccggggcaaccgtgttgcggatggtgagaccgcaggatacagttgcttacgaggacttatccgtggattatactcagaaaaaatggaaaagtcttaccctatcccagcgcgccctgcaatggaacatgatgcccgaaaatcaccacagcatggcctccctggcaggtgagaatatgatgaagggcagcgaacttacacctaagcaagagtttttcaaaggcagcgaatctagcaatcgcacttcaggagggctgttcggagttgttccgggggctgccgagactggtgatgtctgcgaggacacattcaaagagctcgaaggacagacctctgacgaggagggctccaggttggagaacgacttccttgaaataactgacgaagataaaaagaagtcaaccaaggacaggtatgacaagtacaaggaggtcggagaacatccaccgctttccagcagtccggtcgaacacgagggagtacttaagggccagaagtcatatcggtgtgatgaatgtggaaaagcttttaacaggagcagccacttaattggccaccagcgcatacacactggcgaaaaaccatacgagtgcaacgaatgtggcaagacgttccgccagaccagtcaactgatcgttcacctgagaacccacactggagaaaagccgtatgaatgctctgaatgtggcaaggcttaccgccacagcagccacctcatccagcaccaaaggctgcataacggcgagaaaccatacaagtgtaacgagtgtgccaaggcctttactcagtctagccggctcactgatcaccagagaacccatacaggcgagaagccatacgaatgtaacgaatgcggagaggcctttattcggtcaaaaagcttagcaagacaccaggtcctccatactggaaagaagccctataaatgtaacgagtgtggacgcgccttttgctccaataggaacttgatcgatcaccagaggattcacactggagaaaagccctatgagtgcagcgagtgcggcaaggcctttagtcgaagtaagtgcctcatcagacatcaaagcttacataccggtgagaagccatacaaatgcagcgaatgtggcaaagcctttaatcagaacagtcagctcatcgagcacgagaggatccatactggggagaagccctttgagtgtagcgaatgcggcaaagcctttgggctctccaaatgcctgattaggcatcagcgcctccatactggcgaaaaaccttataagtgcaatgagtgcgggaagtcattcaatcagaattcccacttaatcatccaccaaaggatccacacaggagagaagccatacgaatgtaatgaatgtggcaaggtgttctcatactcaagcagcttgatggtgcaccagcgtacccacacgggtgagaagccatacaagtgcaatgactgtggaaaggctttctctgatagcagtcagttaattgtgcaccagcgggtgcacactggagaaaagccatacgagtgttcggagtgtggaaaagctttctcacagcgtagcactttcaatcatcaccagcgtacccacacaggcgaaaagtcctcaggacttgcgtggtcggttagctag

SEQ ID NO: 199240 - DNA, 2265 bp, Artificial Sequence
  derived and/or modified sequence
atgaccaccgccggccggggcaacctgggcctgatcccccggagcacggcatttcagaagcaagaggggcggctcaccgtgaagcaggaacccgccaatcagacatggggccagggcagctcactccagaagaattatcctcccgtgtgcgagatatttcggctgcatttccgccagctgtgctatcacgaaatgtctggcccacaggaggctctctcacgcctaagggaactttgccgctggtggttgatgccagaagttcatacaaaagagcaaattctagagctccttgtcctcgagcagtttctgtccattctgccaggcgaactgaggacttgggtccaactgcatcaccccgaatccggcgaggaggcggtcgcagtcgttgaagacttccagcgacatctctccggcagcgaagaggtatcagccccggctcagaagcaggaaatgcatttcgaagagaccacggccctgggtaccaccaaagaatcgccaccgaccagtcctttgtcagggggctccgcaccaggtgctcatctcgaacccccctatgacccagggacccaccatctaccaagcggtgacttcgcccaatgtacatcaccagtacccactcttccccaagtcggcaacagcggtgaccaggccggggcaaccgtgctgcgcatggtccgcccacaggatacggtcgcgtacgaggatctgagcgtggactatacacaaaagaaatggaaatccctcaccctatcacaaagagctctccagtggaacatgatgcccgaaaaccatcatagcatggcttctctcgccggtgagaatatgatgaagggaagcgaacttacgccaaagcaggagtttttcaagggaagcgaatcatcaaacagaacctccggcgggttattcggcgtggtacccggcgctgccgaaaccggggacgtgtgtgaagataccttcaaggagttagaagggcagactagcgatgaagaaggtagccgcctggagaacgacttcctggagataactgacgaggacaagaaaaaaagtaccaaggatcggtacgacaaatacaaggaagtcggtgagcaccccccattgtctagttccccagtagagcatgaaggggtgctcaaaggacagaagagctatagatgtgacgagtgcgggaaagctttcaatagatctagccacctaattggtcatcagcggattcacactggagagaagccttacgagtgtaacgaatgtggcaaaacttttcgccagacatcccaacttattgtccatctgcggactcatacaggagaaaagccgtacgagtgttcggaatgtggaaaagcgtaccgccacagtagccacctgatccagcatcaaagattacacaatggtgagaaaccatacaaatgtaacgagtgcgctaaggctttcacacagagttcccgtttaacagatcatcaacgcacacacacaggcgagaagccatacgagtgcaatgagtgtggagaggcctttattcggtccaagagtttggcccggcaccaggttctgcacacgggcaagaaaccctataaatgcaacgagtgtggccgggccttctgcagcaacaggaatctgatcgaccaccaaagaattcataccggcgagaagccgtacgagtgctcagaatgtggcaaggccttctcaaggtcaaagtgcctgattagacaccagtcactgcacaccggagaaaaaccatacaagtgtagcgagtgtggcaaggcgttcaaccagaatagccagttaatcgagcacgaacgaatacacactggggaaaaaccattcgaatgttcagagtgcgggaaagcttttgggctttccaagtgtttaattcgtcatcagaggctgcacacaggagaaaagccatacaaatgtaacgagtgcggcaagtcctttaaccagaactcacacctgatcatacaccagcgaattcacaccggcgagaaaccatacgaatgcaacgaatgcggcaaggtgtttagttactcctcttcacttatggttcaccagaggacgcatacaggagaaaaaccatataagtgcaacgattgcggcaaagcattctccgactcttcccagctcattgtgcatcagcgtgttcacactggggagaaaccctacgaatgtagtgaatgcggtaaggctttcagccagaggtccacctttaatcatcatcagaggacccacacaggagagaagagttctggccttgcctggagcgtgtcatag

SEQ ID NO: 199241 - DNA, 2265 bp, Artificial Sequence
  derived and/or modified sequence
atgaccactgccggaagaggcaatcttggcctgattccgagatcaacggccttccagaaacaagagggacggttgacagtcaagcaggagcctgccaaccagacctggggtcaggggagcagcctccagaaaaactatccccctgtatgtgaaatttttaggttgcatttccgccagctatgctaccacgaaatgtccgggcctcaagaagctttaagtcgcctgcgcgaactgtgccgctggtggctcatgcctgaagtgcatactaaagagcagatactggagctgcttgttctggagcaatttctatccatcttgcctggagagctcagaacctgggtccagttgcaccatcctgaatctggggaggaagctgtagctgtggtggaggatttccagcgccatttatccggctctgaggaagtatctgctcctgcacagaagcaggagatgcattttgaggaaaccaccgccctgggtaccacaaaagagtcacctccaacatctcccctcagcggcggatctgccccaggtgctcacttagagcctccatacgatcctgggactcatcatcttccctctggagacttcgctcagtgtactagccccgtccctacactcccacaagtgggaaactcgggtgatcaggcgggtgccacggtcctcagaatggtccgtcctcaggacaccgtggcctatgaagacttgagtgttgattatacacagaaaaagtggaaatcactgactctgtcacaacgcgcactgcagtggaatatgatgcccgaaaaccatcattctatggcctcattagctggcgagaacatgatgaaagggagtgagctcactccaaaacaagagttctttaagggttccgagagcagcaatcggactagtggaggcctgttcggtgttgtccctggggcagctgaaacgggtgacgtttgtgaagatacgtttaaagagctggagggtcagaccagcgacgaggagggctcacgccttgaaaatgatttcctggagatcacggatgaagataaaaagaaatccacaaaggaccgatacgataaatataaagaggtgggcgaacatccaccccttagcagctcccctgttgaacatgaaggagtgctaaaaggacagaagtcttataggtgtgacgagtgcggtaaagctttcaacaggtcctctcatctgataggccaccaaagaatacacactggcgaaaaaccttacgagtgtaacgagtgcggcaaaacttttagacaaactagtcagttaatcgttcacttgagaacccataccggagagaaaccctacgaatgctccgagtgtggtaaagcctacaggcactctagtcatctcattcagcaccagagattacataacggggaaaaaccctacaaatgtaatgaatgcgccaaagccttcacccagtcgtctcgattaactgaccaccagcgcacacatacaggcgaaaagccctatgaatgtaatgaatgtggtgaagccttcattcggtccaagagcttggcacggcatcaagtccttcatactggaaaaaaaccctataagtgtaatgagtgcgggcgagccttttgcagcaatagaaacctaatcgatcatcaacgcatacacacaggggagaagccatatgagtgctcagagtgtggaaaggccttcagcaggtccaaatgcctgattcggcaccaaagccttcatactggcgagaagccatataaatgcagtgagtgcgggaaggcctttaaccagaactcccagctgatcgagcacgagaggattcacacaggagaaaagccctttgagtgttccgagtgtggaaaggcatttggcctgtcgaagtgcctgattagacaccagcgtctccacacaggagagaaaccatataagtgtaacgagtgcggcaaatcatttaatcagaattcccacctgatcattcatcaacggatacacaccggtgaaaaaccctacgagtgtaacgaatgtggtaaggttttctcttattccagcagcctgatggtccatcagcgcactcacacaggggaaaagccttacaagtgtaatgactgtgggaaggccttttctgacagttcacagctcattgtacatcagcgggtccatactggcgaaaagccgtacgagtgttcagaatgcgggaaggccttctctcaacggtctacatttaaccatcaccaaaggacacacacaggagaaaaaagctcagggcttgcttggtccgtgagctag

SEQ ID NO: 199242 - DNA, 2265 bp, Artificial Sequence
  derived and/or modified sequence
atgactaccgctggaagaggtaacctgggtctgataccccgaagcacagccttccagaagcaagaaggcaggctgactgtgaaacaagaaccggctaatcagacctggggccaaggatcatccctgcagaagaactacccacccgtgtgcgagatctttcgactgcatttccgtcagctgtgctatcacgagatgtccggtccccaggaggccctttcccgactgcgagagttgtgtaggtggtggctgatgccggaagtgcatacaaaagagcagattctggagcttctagtgctagagcagtttctgtccattttacccggagagttgaggacatgggtgcagttgcatcacccagaatccggagaggaggccgttgcggtggttgaagatttccagagacatctttctggatctgaggaagtgtccgcacctgcacagaaacaagagatgcactttgaagaaactacagcgttgggcaccacaaaagaatcccctcctacctcccccctgtctgggggaagcgccccaggcgcacatctggagcccccatacgacccaggtacccaccatctcccctccggcgacttcgcccaatgtactagcccagtgccaacactaccccaggtcggcaattctggtgaccaagctggagccaccgtcttgagaatggtgcgcccacaagatactgtggcttatgaggacctgtcggtcgattatacccagaaaaagtggaagtccctgaccctgtcccagcgcgctttgcagtggaacatgatgcctgagaatcaccactccatggccagtctggccggtgagaacatgatgaaaggatctgagttaacacccaaacaggagttttttaaagggagtgagtcatccaatcggacaagcggtgggctgtttggagtggttcctggagcagctgaaaccggagatgtttgcgaagatacgtttaaggagctggagggacagacgagcgacgaggaaggaagtaggctggagaacgacttcctggaaatcacagatgaggacaagaagaaatctaccaaagataggtatgacaagtacaaagaggtgggcgagcacccacctctgagctccagtcctgtggaacacgaaggcgtgttgaagggccagaagtcctacagatgtgatgagtgtgggaaggcgttcaatcgctccagccacctgataggccatcagcggatacatacaggagagaagccttatgagtgtaatgaatgcggaaagactttcaggcaaacttcccaattgattgttcacctgcgcacccatacaggtgaaaagccctatgagtgtagcgagtgcggcaaggcctaccgccacagtagtcatctcattcaacaccaaaggcttcataatggtgagaaaccgtacaagtgcaatgaatgcgcaaaagctttcacgcaatcaagtagactgactgaccaccagaggacgcatactggggagaagccttatgagtgcaacgaatgcggagaggcgtttattcgctctaaaagtctagcccgtcatcaagtgctgcacaccggcaaaaagccgtataagtgcaatgagtgtggcagagcgttctgttccaaccgaaatcttatcgatcaccagcgcattcataccggggagaagccctatgagtgcagtgaatgtggaaaagcgttctcccggagtaagtgcctgattcgccatcagtctctgcacacaggagagaaaccttataaatgcagtgagtgcgggaaggcctttaatcagaattcccaattaatcgagcatgagcggatccatacaggcgagaagccattcgaatgtagcgaatgcggcaaggccttcggcctcagcaagtgcttaattaggcatcaaagactccacacaggcgagaagccgtacaagtgtaacgaatgtggcaagagtttcaatcagaatagtcacctcatcatacaccaaagaattcacaccggcgagaagccatatgagtgcaatgaatgcggcaaggtgttctcatactctagtagcctgatggtgcatcaaaggacccatactggggagaagccctataaatgcaatgactgcggaaaggcattcagcgatagcagccagctcatagtgcatcagagggtgcacaccggcgagaagccttatgaatgcagtgaatgcgggaaggctttcagccagaggtccactttcaatcaccaccagcggactcacacgggtgagaagtcctcaggattggcgtggagtgtgtcttag

SEQ ID NO: 199243 - DNA, 3477 bp, Artificial Sequence
  derived and/or modified sequence
attgtttttggtctaacgggcagtagagtgtccggcttcggtgccgagtgccaccgcgagtgggccgagacgcggagggaggcgcggccggagctcgggtcgccgacgctggccaggaccgcgcttcttcccggcggcaggcggcgcggtccccgtgactctcagaagccgcccgatgtagagccgcttctttgtctcatacccctgaccattcgtgcgtggcacggagccgggtatctgcgggtacagcgatgaacagggcagacgtggccaggtgagcggcgctgctgaagcctggtttaacacgaaaggccacactaccatcacccctttctccaaccctgaaaaacagttcctgagacctgaactattgaccatcattttaatcggaccaactgcagctgtaacaagcttctctttggggtcacaatgaccactgcaggcaggggaaatttaggcctcatccccaggagcactgctttccagaagcaagaggggcgcctgactgtgaagcaggagccagcaaaccagacctgggggcagggcagcagtctccagaagaactatcctcctgtctgcgaaatcttccggctacacttcaggcaattgtgttaccacgagatgtctgggccgcaggaagcattgagccggcttcgggagctctgccgctggtggctcatgccagaggtgcacaccaaggagcagatcctggagctgctggtgcttgagcagttcctgagcatcctccctggggagctccggacctgggtgcagctgcatcaccctgagagtggtgaggaggctgtggctgtggtggaggatttccagagacacctcagtggatcagaggaggtttcagccccagcacagaaacaggaaatgcattttgaggagacaacagctctgggtacaacaaaggaatctcctcctacctcacccctcagtgggggctcagcccctggagcccacctggagcctccttatgacccagggacacaccacctccccagtggggacttcgctcaatgtacttctccagttcctacccttcctcaagtggggaactcaggagaccaagcaggggcaactgtacttcggatggtcaggccccaggatactgtggcatatgaggacctatctgtagactacactcagaagaaatggaaaagtctcacactcagtcagagagccctgcagtggaacatgatgccagaaaatcaccatagcatggcctccttggcaggtgagaacatgatgaagggttcagagttgactccaaagcaggaattttttaaaggatcagagtcatctaacaggacatcagggggactctttggggtggttcctggggcagcagagactggagatgtttgtgaagatactttcaaggagttagaaggacaaacctcagatgaagaagggagcagactagaaaatgatttcttggaaataacagatgaagataagaaaaaatccacaaaagacagatatgacaaatataaggaagttggggaacatccacctctgtcttccagtcctgttgaacatgaaggagttttaaagggacagaaatcctatcgatgtgatgaatgtggcaaagctttcaatcggagttctcaccttattggccatcagagaatccacactggagagaaaccctatgagtgtaatgagtgtgggaagaccttcaggcaaacctcccagctcattgttcatctcagaacccacacaggggaaaaaccctatgaatgcagtgagtgtggaaaggcctataggcacagctcccatctcattcaacaccagagactccataatggggagaaaccctataaatgtaatgaatgtgcaaaagcctttactcagagttcccgactcactgaccaccagagaacccatactggggagaaaccttatgaatgcaatgagtgtggagaggcattcattcgaagcaaaagtcttgctcgacatcaggtcctgcacactggtaagaaaccttacaaatgcaatgagtgtgggagagcattctgttccaatagaaatctcattgaccatcagagaatccacactggggagaagccttatgagtgtagtgaatgtggcaaagccttcagtcggagtaaatgtcttattcgacatcagagcctccatactggggaaaagccatacaaatgtagtgaatgtgggaaagccttcaatcagaactctcaactcattgagcatgagcgaattcatactggagaaaaaccttttgaatgtagcgagtgtggtaaggcatttggtctgagtaaatgtcttattcggcaccagagacttcacacgggtgaaaagccctataaatgcaatgagtgtggaaaatccttcaatcaaaactcacaccttattatacaccagagaattcacactggtgagaaaccctatgaatgtaatgagtgtgggaaggtattcagttatagctccagccttatggtacatcagagaacccatactggggaaaaaccctataaatgcaatgattgtgggaaagcttttagtgacagctcacagcttattgtacaccagagagtccacaccggagagaaaccttatgaatgtagtgaatgtgggaaagcctttagtcagcgttccacttttaatcaccaccagcgaactcacactggagagaagtcctcaggtctggcttggtcagtttcttaaggtatggttctctgagacagagagcaacgacctttgagttaagctgtctttataagcaggatgctcatagtggtttcccggagccagtagtcacggtggaccattccctacttgcttttccttggatcactaaggtgggagagtaggagtaacttattccagttcttacccattattaggaaggtaaggactacacatgtcattgaattgtaggtttcctttttttttctttacttttaaattttaacttttaaaatctatttcatttcttagttatgcatctcataatcagactccatgctttttaaagacagagataatatcttctctattctattctacttcctccatttcaccatttatacaaagtcattcaaaaaggctgattcatgccttcctgcctcttggctatggccctccccatctactctttaaactttaatctataacttttcatcagttttgttccctatctagaaaacattttcttctgtttgctaatctttgtccctcacaatttttgaaatccatctcatcactgaaatactttcttcttcaagtacttttttatttttcttcaacttctcttgatttgacctcagtgctttgaattcactggtgctacaatatgtaactgtggttaattgccttgtaaattttgcgtgtctgtatacttttataccaacttattgtaggctctttgaggtcaggtatgtatttctttcccatatagatagtattttgtacataccagttgttaaataaataatttttaaaatctca

SEQ ID NO: 199244 - DNA, 2791 bp, Artificial Sequence
  derived and/or modified sequence
gcttccggctcggccattgtttttggtctaacgggcagtagagtgtccggcttcggtgccgagtgccaccgcgagtgggccgagacgcggagggaggcgcggccggagctcgggtcgccgacgctggccaggaccgcgcttcttcccggcggcaggcggcgcggtccccgtgactctcagaagccgcccgatgtagagccgcttctttgtctcatacccctgaccattcgtgcgtggcacggagccgggtatctgcgggtacagcgatgaacagggcagacgtggccaggccacactaccatcacccctttctccaaccctgaaaaacagttcctgagacctgaactattgaccatcattttaatcggaccaactgcagctgtaacaagcttctctttggggtcacaatgaccactgcaggcaggggaaatttaggcctcatccccaggagcactgctttccagaagcaagaggggcgcctgactgtgaagcaggagccagcaaaccagacctgggggcagggcagcagtctccagaagaactatcctcctgtctgcgaaatcttccggctacacttcaggcaattgtgttaccacgagatgtctgggccgcaggaagcattgagccggcttcgggagctctgccgctggtggctcatgccagaggtgcacaccaaggagcagatcctggagctgctggtgcttgagcagttcctgagcatcctccctggggagctccggacctgggtgcagctgcatcaccctgagagtggtgaggaggctgtggctgtggtggaggatttccagagacacctcagtggatcagaggaggtttcagccccagcacagaaacaggaaatgcattttgaggagacaacagctctgggtacaacaaaggaatctcctcctacctcacccctcagtgggggctcagcccctggagcccacctggagcctccttatgacccagggacacaccacctccccagtggggacttcgctcaatgtacttctccagttcctacccttcctcaagtggggaactcaggagaccaagcaggggcaactgtacttcggatggtcaggccccaggatactgtggcatatgaggacctatctgtagactacactcagaagaaatggaaaagtctcacactcagtcagagagccctgcagtggaacatgatgccagaaaatcaccatagcatggcctccttggcaggtgagaacatgatgaagggttcagagttgactccaaagcaggaattttttaaaggatcagagtcatctaacaggacatcagggggactctttggggtggttcctggggcagcagagactggagatgtttgtgaagatactttcaaggagttagaaggacaaacctcagatgaagaagggagcagactagaaaatgatttcttggaaataacagatgaagataagaaaaaatccacaaaagacagatatgacaaatataaggaagttggggaacatccacctctgtcttccagtcctgttgaacatgaaggagttttaaagggacagaaatcctatcgatgtgatgaatgtggcaaagctttcaatcggagttctcaccttattggccatcagagaatccacactggagagaaaccctatgagtgtaatgagtgtgggaagaccttcaggcaaacctcccagctcattgttcatctcagaacccacacaggggaaaaaccctatgaatgcagtgagtgtggaaaggcctataggcacagctcccatctcattcaacaccagagactccataatggggagaaaccctataaatgtaatgaatgtgcaaaagcctttactcagagttcccgactcactgaccaccagagaacccatactggggagaaaccttatgaatgcaatgagtgtggagaggcattcattcgaagcaaaagtcttgctcgacatcaggtcctgcacactggtaagaaaccttacaaatgcaatgagtgtgggagagcattctgttccaatagaaatctcattgaccatcagagaatccacactggggagaagccttatgagtgtagtgaatgtggcaaagccttcagtcggagtaaatgtcttattcgacatcagagcctccatactggggaaaagccatacaaatgtagtgaatgtgggaaagccttcaatcagaactctcaactcattgagcatgagcgaattcatactggagaaaaaccttttgaatgtagcgagtgtggtaaggcatttggtctgagtaaatgtcttattcggcaccagagacttcacacgggtgaaaagccctataaatgcaatgagtgtggaaaatccttcaatcaaaactcacaccttattatacaccagagaattcacactggtgagaaaccctatgaatgtaatgagtgtgggaaggtattcagttatagctccagccttatggtacatcagagaacccatactggggaaaaaccctataaatgcaatgattgtgggaaagcttttagtgacagctcacagcttattgtacaccagagagtccacaccggagagaaaccttatgaatgtagtgaatgtgggaaagcctttagtcagcgttccacttttaatcaccaccagcgaactcacactggagagaagtcctcaggtctggcttggtcagtttcttaaggtatggttctctgagacagagagcaacgacctttgagttaagctgtctttataagcaggatgctcatagtggtttcccggagccagtagtcacggtggaccattccctacttgctttt

SEQ ID NO: 199245 - protein, 453 aa, Artificial Sequence
  derived and/or modified sequence
MGTQPEPGLGARMAIHKALVMCLGLPLFLFPGAWAQGHVPPGCSQGLNPLYYNLCDRSGAWGIVLEAVAGAGIVTTFVLTIILVASLPFVQDTKKRSLLGTQVFFLLGTLGLFCLVFACVVKPDFSTCASRRFLFGVLFAICFSCLAAHVFALNFLARKNHGPRGWVIFTVALLLTLVEVIINTEWLIITLVRGSGEGGPQGNSSAGWAVASPCAIANMDFVMALIYVMLLLLGAFLGAWPALCGRYKRWRKHGVFVLLTTATSVAIWVVWIVMYTYGNKQHNSPTWDDPTLAIALAANAWAFVLFYVIPEVSQVTKSSPEQSYQGDMYPTRGVGYETILKEQKGQSMFVENKAFSMDEPVAAKRPVSPYSGYNGQLLTSVYQPTEMALMHKVPSEGAYDIILPRATANSQVMGSANSTLRAEDMYSAQSHQAATPPKDGKNSQVFRNPYVWD

SEQ ID NO: 199246 - DNA, 1419 bp, Artificial Sequence
  derived and/or modified sequence
ggggaacctccctgaagagtgccctggtcacagcacccttgaagacagccattggccatggggacccaaccagagcctggcctgggagccaggatggccatccacaaagccttggtgatgtgcctgggactgcctctcttcctgttcccaggggcctgggcccagggccatgtcccacccggctgcagccaaggcctcaaccccctgtactacaacctgtgtgaccgctctggggcgtggggcatcgtcctggaggccgtggctggggcgggcattgtcaccacgtttgtgctcaccatcatcctggtggccagcctcccctttgtgcaggacaccaagaaacggagcctgctggggacccaggtattcttccttctggggaccctgggcctcttctgcctcgtgtttgcctgtgtggtgaagcccgacttctccacctgtgcctctcggcgcttcctctttggggttctgttcgccatctgcttctcttgtctggcggctcacgtctttgccctcaacttcctggcccggaagaaccacgggccccggggctgggtgatcttcactgtggctctgctgctgaccctggtagaggtcatcatcaatacagagtggctgatcatcaccctggttcggggcagtggcgagggcggccctcagggcaacagcagcgcaggctgggccgtggcctccccctgtgccatcgccaacatggactttgtcatggcactcatctacgtcatgctgctgctgctgggtgccttcctgggggcctggcccgccctgtgtggccgctacaagcgctggcgtaagcatggggtctttgtgctcctcaccacagccacctccgttgccatatgggtggtgtggatcgtcatgtatacttacggcaacaagcagcacaacagtcccacctgggatgaccccacgctggccatcgccctcgccgccaatgcctgggccttcgtcctcttctacgtcatccccgaggtctcccaggtgaccaagtccagcccagagcaaagctaccagggggacatgtaccccacccggggcgtgggctatgagaccatcctgaaagagcagaagggtcagagcatgttcgtggagaacaaggccttttccatggatgagccggttgcagctaagaggccggtgtcaccatacagcgggtacaatgggcagctgctgaccagtgtgtaccagcccactgagatggccctgatgcacaaagttccgtccgaaggagcttacgacatcatcctcccacgggccaccgccaacagccaggtgatgggcagtgccaactcgaccctgcgggctgaagacatgtactcggcccagagccaccaggcggccacaccgccgaaagacggcaagaactctcaggtctttagaaacccctacgtgtgggactga

SEQ ID NO: 199247 - DNA, 1326 bp, Artificial Sequence
  derived and/or modified sequence
atggccattcataaagctctggtaatgtgcttaggcctgcccctctttctgtttccaggggcatgggcccagggccacgtacctcctggctgctctcaaggactcaaccctttatattataacctgtgcgaccgctctggcgcatggggaattgttctcgaggctgtggctggagctggtatagtgactacgttcgtgcttaccatcattctggtggcctcactgcccttcgttcaggatacaaagaagaggagcctactcgggacccaagttttttttctgctaggtactcttggtctcttttgcctggtttttgcctgcgttgtgaagcctgatttcagcacttgtgcatctaggcggtttttgttcggggttctgtttgctatatgcttctcttgccttgccgctcacgtgttcgccctgaacttcctggcccgtaaaaaccacggacccagaggatgggtgatcttcactgttgccctgctacttacattggtagaggtcatcatcaacaccgaatggctgatcataacactggtccgtggatctggcgagggtgggcctcaggggaatagttccgctggctgggcagtggccagcccttgcgccattgcaaacatggattttgtcatggccttgatctacgtaatgctgctgctgctcggagcgtttttaggcgcttggccagcactgtgcgggagatataaaaggtggcgaaagcatggtgtgtttgtcctcttaaccacagcaacgagcgtcgccatatgggtcgtctggatcgtcatgtacacttacggcaataagcaacataactctcctacatgggatgaccctacgctggcaatcgccctggcagctaatgcctgggcatttgtgttgttctatgttatccccgaggtatcccaggtgacaaaatcttctcccgagcagtcttaccagggagatatgtatccaacacgcggggttgggtacgaaacgatcctgaaggagcagaagggacagagcatgttcgtcgagaataaggctttcagtatggatgagcccgtagcagcgaagagaccggttagtccctattctggttacaacgggcagctgctcacatcagtgtaccagcctaccgagatggcactgatgcacaaggtaccgagtgaaggcgcatacgacatcatcctcccacgggccaccgcgaattcccaggtgatgggatccgccaacagcactctgagggccgaggacatgtacagcgcccaaagccaccaagcagctacaccacctaaagatgggaaaaattcacaggtttttagaaacccatatgtgtgggattag

SEQ ID NO: 199248 - DNA, 1362 bp, Artificial Sequence
  derived and/or modified sequence
atgggcacacaaccagagcctggccttggtgctcgaatggcgatacataaagccctggttatgtgcctggggttgccgctgttcttattccccggcgcgtgggcgcaggggcacgtgccacccggctgctcacaggggctgaacccactctattataatctttgcgatcgctctggagcttggggcatcgttctggaggcggtggcaggagccggcatcgtgactacatttgtcctgactattatcttggttgcatctctgcccttcgtgcaggataccaaaaagcggagcctgctaggcactcaggtgttcttcctgctcggcaccctgggccttttttgtctggtattcgcatgcgttgtgaagcctgatttctccacatgcgcgtctaggcgctttctgtttggtgtccttttcgccatatgtttcagctgtctggccgcccacgtgtttgcactgaacttccttgcgcgaaaaaaccacggccctagaggatgggtgatattcaccgtggctctgttgctcacactggtggaggttattattaacaccgagtggctgataattaccctggtgaggggcagtggcgagggaggccctcaggggaactcctcagccggctgggccgttgcctctccctgtgcgatcgccaacatggattttgtgatggccctgatatatgtaatgctactcctcctgggtgcatttctgggggcctggcctgcactctgtgggagatataaacgttggcggaagcatggtgtgtttgtgctcctgactactgcaaccagcgtggccatctgggttgtttggattgtcatgtacacatatggtaataagcagcacaactcgccaacctgggacgatccaacgctggctatcgctttggctgcaaatgcctgggcttttgtgctcttctatgtcatccctgaggtgagccaagtcactaaatcttcccctgagcagtcataccaaggcgatatgtatcccacaaggggcgtgggatacgagactattcttaaagagcagaagggtcagagcatgttcgtcgagaataaggccttttcaatggacgagcccgtggccgccaaaagaccagtcagtccctacagtggctataatggccagctcctcacctctgtttatcaacccaccgaaatggcgcttatgcacaaagttccgagcgagggagcctatgatatcatattgcctagggctaccgccaattcccaggtaatgggctccgcaaactcaaccttgcgcgcggaggacatgtactctgcacagtctcatcaggctgctactccccctaaagatggaaaaaatagtcaggtttttcgtaatccatatgtctgggattag

SEQ ID NO: 199249 - DNA, 1326 bp, Artificial Sequence
  derived and/or modified sequence
atggccatccacaaggccctggtgatgtgcctgggcctgcccctcttcctgtttcctggggcctgggcccagggccacgtgcccccaggctgcagccagggcctgaaccccctgtactacaacctgtgtgacagaagtggggcctggggcatcgtgctggaggccgtggccggggccggcatcgtgaccacctttgtgctgaccatcatcctggtggccagcctgccctttgtgcaggacaccaagaagaggagcctgctgggcacccaggtgttcttcctgctgggcaccctgggcctcttctgcctggtgtttgcctgtgtggtgaagccagacttcagcacctgtgccagccgccgcttcctgtttggagtgctgtttgccatctgcttcagctgcctggccgcccacgtgtttgccctgaacttcctggccaggaagaaccacggcccccggggctgggtgatcttcaccgtggccctgctgctgaccctggtggaggtgatcatcaacacagagtggctgatcatcaccctggtgcggggcagcggggagggcggcccccagggcaacagcagcgctggctgggccgtggccagcccctgtgccatcgccaacatggactttgtgatggccctgatctacgtgatgctgctgctgctgggcgccttcctgggcgcctggccagccctgtgtggccgctacaagcgctggaggaagcatggagtgtttgtgctgctgaccacagccacctctgtggccatctgggtggtgtggatcgtgatgtacacctacggcaacaagcagcacaacagccccacctgggatgaccccaccctggccatcgccctggccgccaatgcctgggcctttgtgctcttctacgtgattcctgaggtgtcccaggtgaccaagagcagccctgagcagagctaccagggcgacatgtaccccacccggggcgtgggctatgagaccatcctgaaggagcagaagggccagagcatgtttgtggagaacaaggccttctccatggatgagcctgtggccgccaagaggcctgtgagcccctacagcggctacaacggccagctgctgacctctgtgtaccagcccacagagatggccctgatgcacaaggtgcccagcgagggcgcctatgacatcatcctgccccgggccacagccaacagccaggtgatgggcagcgccaacagcaccctgcgggcagaggacatgtacagcgcccagagccaccaggccgccaccccacccaaggatggcaagaacagccaggtgttcaggaacccctacgtgtgggactag

SEQ ID NO: 199250 - DNA, 1362 bp, Artificial Sequence
  derived and/or modified sequence
atgggcacccagcctgagcccggcctgggcgccaggatggccatccacaaggccctggtgatgtgcctgggcctgcccctcttcctgtttcctggggcctgggcccagggccacgtgcccccaggctgcagccagggcctgaaccccctgtactacaacctgtgtgacagaagtggggcctggggcatcgtgctggaggccgtggccggggccggcatcgtgaccacctttgtgctgaccatcatcctggtggccagcctgccctttgtgcaggacaccaagaagaggagcctgctgggcacccaggtgttcttcctgctgggcaccctgggcctcttctgcctggtgtttgcctgtgtggtgaagccagacttcagcacctgtgccagccgccgcttcctgtttggagtgctgtttgccatctgcttcagctgcctggccgcccacgtgtttgccctgaacttcctggccaggaagaaccacggcccccggggctgggtgatcttcaccgtggccctgctgctgaccctggtggaggtgatcatcaacacagagtggctgatcatcaccctggtgcggggcagcggggagggcggcccccagggcaacagcagcgctggctgggccgtggccagcccctgtgccatcgccaacatggactttgtgatggccctgatctacgtgatgctgctgctgctgggcgccttcctgggcgcctggccagccctgtgtggccgctacaagcgctggaggaagcatggagtgtttgtgctgctgaccacagccacctctgtggccatctgggtggtgtggatcgtgatgtacacctacggcaacaagcagcacaacagccccacctgggatgaccccaccctggccatcgccctggccgccaatgcctgggcctttgtgctcttctacgtgattcctgaggtgtcccaggtgaccaagagcagccctgagcagagctaccagggcgacatgtaccccacccggggcgtgggctatgagaccatcctgaaggagcagaagggccagagcatgtttgtggagaacaaggccttctccatggatgagcctgtggccgccaagaggcctgtgagcccctacagcggctacaacggccagctgctgacctctgtgtaccagcccacagagatggccctgatgcacaaggtgcccagcgagggcgcctatgacatcatcctgccccgggccacagccaacagccaggtgatgggcagcgccaacagcaccctgcgggcagaggacatgtacagcgcccagagccaccaggccgccaccccacccaaggatggcaagaacagccaggtgttcaggaacccctacgtgtgggactag

SEQ ID NO: 199251 - DNA, 1326 bp, Artificial Sequence
  derived and/or modified sequence
atggccatccacaaggccctggtgatgtgcctgggcctgcccctgtttctttttcccggagcttgggcccagggtcacgtaccccctggctgtagccagggactgaatccactgtactacaatctgtgtgaccgaagtggtgcttggggcatcgtcctcgaggcagtagccggtgccggaatcgtaaccactttcgtgttaacaatcattctcgtggccagcctcccattcgttcaggataccaagaagaggtctcttctggggacccaggtgttcttcctgctcggcaccttggggctcttttgcttggtcttcgcatgtgtcgtcaaacctgacttcagtacttgtgcatcaaggaggtttctgttcggtgttctctttgccatctgtttctcttgtttggcggcccatgtgtttgcattgaatttccttgccagaaaaaaccatggcccccggggatgggtgatcttcaccgtggctcttcttctgactctggtggaggtgataatcaataccgagtggctcatcattacactggtccgaggatctggagaaggtggacctcaaggtaattccagcgccgggtgggccgtcgcttccccttgtgcaatagccaatatggatttcgtcatggcactcatatacgtgatgctattgctgctcggagcattcctcggcgcctggcctgccctctgcggaagatacaaaaggtggagaaaacatggggtgttcgtcctgctgactacagccaccagcgtcgctatatgggtggtatggatcgtgatgtacacctatggtaataaacagcacaactcacctacatgggacgatccaaccttggccatcgccctggcagcgaatgcatgggcgtttgtgctcttttatgttatacctgaagttagccaagtgactaagtcttccccagaacagtcctaccagggggatatgtatcctacccgtggagtcgggtacgaaaccattcttaaagaacagaaggggcagtcaatgtttgtggaaaataaggcgttttcaatggacgaaccagtcgccgctaaacgccctgtgagcccctattctgggtataatggacaactgctgacatctgtttaccagcccacggagatggctctgatgcataaagtgcccagtgagggggcgtatgacatcatcctcccacgcgcaacagccaacagccaggtgatgggttccgccaattcgacattgagagcggaagacatgtattcagctcagagccatcaggccgctacccctccaaaagatgggaaaaattcacaggtatttcgcaacccctacgtgtgggattag

SEQ ID NO: 199252 - DNA, 1362 bp, Artificial Sequence
  derived and/or modified sequence
atgggcacccagcccgagcccggcctgggcgcccggatggccatccataaggctctggttatgtgcctcgggcttcctctctttctgtttccaggagcttgggcccagggacatgtgcccccggggtgctcacagggactaaaccctttgtactataatctgtgcgacagatccggggcctggggcatagttcttgaggccgtggcgggagcaggtatcgtgacaacttttgtgctcacgatcattctggttgccagcctgccttttgtgcaggacaccaagaaacgaagcctactcggaacgcaggtgttctttttgttaggcactctggggctattttgtctagtttttgcatgtgtggtgaagcctgactttagcacctgcgccagccggcggttcctgtttggagttctgttcgcaatctgcttttcttgtttggcagcgcacgtctttgcacttaattttctcgcccggaaaaaccatggaccccgcgggtgggtgattttcacagtagcactcctgttaactctcgtagaggtcataattaacactgagtggctgattattaccctggtgagaggctccggcgagggagggccacaaggaaacagcagcgcaggatgggccgtagctagcccctgtgccatcgccaacatggacttcgtcatggctctgatctatgtaatgctgcttctgctgggggcctttttgggtgcctggcccgctttatgtggacgttacaaacgctggcgcaagcacggtgtgtttgtccttctgacgaccgcgacttcagtggccatctgggttgtgtggattgtgatgtatacatacggcaacaaacagcacaattctccaacatgggatgaccccacacttgccatcgctctggcggcgaacgcatgggctttcgtcctgttctacgtgattcccgaagtctctcaagtgacaaagagtagcccagaacagtcatatcaaggggatatgtaccccacccggggggttggatacgaaaccattctcaaagagcagaaggggcaatccatgtttgtggaaaataaagccttttctatggatgagcctgtagctgctaagcggccagtttcgccgtactctggatacaacgggcagttgctgactagcgtgtaccaacctacggagatggcgctaatgcataaagtgccgtcagagggagcatatgatatcattttacctcgcgcgacagctaactcccaagttatgggcagcgcaaacagcacactgcgtgccgaggatatgtacagcgcacagagtcaccaagctgctacacccccaaaggatggtaaaaactcccaggtgttcagaaatccatatgtgtgggactag

SEQ ID NO: 199253 - DNA, 1326 bp, Artificial Sequence
  derived and/or modified sequence
atggccatacacaaagccttagttatgtgtctaggattgcccttatttctgtttcctggggcttgggcacagggccatgtccctccaggctgtagccagggcttaaatcctctctattacaacctctgtgatcgctctggggcttggggcattgtgcttgaggctgtggctggcgcaggcatagtaacaacattcgtcctcacgattatccttgttgcatccctgccgttcgttcaagacaccaagaagagaagtctgttaggaacccaggtttttttcctgctgggcacccttgggctgttttgtctagtgtttgcctgcgtggtgaagcctgacttctctacctgtgcctcccgccgattcctgttcggggtcctctttgcaatctgttttagttgtctcgcagcccacgttttcgctctgaacttcctcgcccgaaagaaccacggcccaaggggttgggttatttttacagtggctctgttgctaaccctggtggaggtcatcattaatacagagtggttaattatcaccctggtgagaggttccggcgagggagggcctcaaggtaattcttccgcaggctgggccgtcgcatcaccttgcgccatcgccaatatggatttcgtaatggctctgatctacgttatgctgctcctcctcggcgctttcctgggagcttggcctgccctgtgtggacgttataaacggtggcgtaaacatggagtattcgtgcttttaacgaccgcaacgtctgtggctatctgggtggtctggatcgtcatgtatacttacggcaacaagcagcataacagtcctacctgggatgatcccactctggctattgcgcttgcagcgaacgcctgggcatttgtgctgttttacgtgatccccgaggtatcacaagtcaccaaatcttcgcccgagcagagttaccagggagatatgtaccccaccagaggcgtgggatacgagactatactgaaagagcaaaaaggacagtctatgttcgtggagaataaagcctttagcatggatgaaccagtggccgcaaagcggccagtgagtccttattctggatacaacgggcagttgttgacaagcgtttaccagccaacagaaatggccctgatgcataaggtgccctccgagggagcctacgacatcatcttgcccagagcgaccgccaattcacaggtgatggggtcagcaaactccaccctgagggctgaggatatgtactcagcccaatcccaccaagccgcaactcctccaaaagacgggaagaactctcaagtgttccgaaacccatacgtttgggactag

SEQ ID NO: 199254 - DNA, 1362 bp, Artificial Sequence
  derived and/or modified sequence
atgggcacacagcccgagcctggtctgggggctcggatggcgatacataaggcactggttatgtgtctcggattgcctctatttctattccctggtgcatgggcccagggtcatgtgccgccagggtgttctcagggcttgaaccccctgtactacaacctgtgcgaccgctccggcgcatggggcatagtgcttgaggccgtggctggggcaggcatcgttacaacctttgtgctaactatcattcttgtcgcatcccttcctttcgtccaagacaccaagaagagaagccttctggggacacaggttttcttccttctcgggaccctgggccttttttgtttggtgtttgcctgtgtcgtgaaacctgatttctctacttgtgcatccagacgcttcctgttcggggtgttgtttgcgatttgtttcagttgcctggcagcccatgtgtttgcgctgaacttcctggcacggaaaaaccacggtccacggggttgggttatctttacggtggccctccttctgacattggtcgaagtgatcatcaatactgagtggctgataatcacactggtgcgagggagtggcgaaggtggtcctcaggggaacagcagtgccggttgggcagtggctagtccctgcgccatagcgaatatggactttgtcatggctctcatctatgtcatgcttctgctgctcggcgcattcttaggggcttggcccgcactgtgcggtaggtacaaacgatggagaaagcatggagtctttgtgcttcttacaaccgcaacctcggttgccatatgggtggtttggatcgtgatgtacacctatggtaacaagcagcataactccccaacatgggacgatcccacattggccattgccctggccgctaacgcctgggcttttgtgctgttttacgtaattcctgaagttagccaggttaccaagagcagccctgagcaatcctatcaaggtgatatgtaccccaccagaggcgtgggatatgagacgatccttaaagagcaaaaagggcagtccatgtttgtggaaaacaaagccttttcaatggacgagccagttgctgctaaaagacccgtctctccctatagtggctacaacggccagctgcttacaagcgtataccagcctactgagatggccttaatgcataaagtgccctcggagggggcatacgacatcatactgccacgggctacggcgaattcacaggttatgggatctgcgaattccacactccgggctgaggatatgtacagcgcacagagccaccaggccgctaccccgccaaaagatggcaagaactcccaagtattccggaatccatacgtgtgggactag

SEQ ID NO: 199255 - DNA, 1326 bp, Artificial Sequence
  derived and/or modified sequence
atggccatccacaaggccctggtgatgtgcctgggcctgcccctgttcctgttccccggcgcctgggcccagggccacgtgccccccggctgcagccagggcctgaaccccctgtactacaacctgtgcgacagaagcggcgcctggggcatcgtgctggaggccgtggccggcgccggcatcgtgaccaccttcgtgctgaccatcatcctggtggccagcctgcccttcgtgcaggacaccaagaagagaagcctgctgggcacccaggtgttcttcctgctgggcaccctgggcctgttctgcctggtgttcgcctgcgtggtgaagcccgacttcagcacctgcgccagcagaagattcctgttcggcgtgctgttcgccatctgcttcagctgcctggccgcccacgtgttcgccctgaacttcctggccagaaagaaccacggccccagaggctgggtgatcttcaccgtggccctgctgctgaccctggtggaggtgatcatcaacaccgagtggctgatcatcaccctggtgagaggcagcggcgagggcggcccccagggcaacagcagcgccggctgggccgtggccagcccctgcgccatcgccaacatggacttcgtgatggccctgatctacgtgatgctgctgctgctgggcgccttcctgggcgcctggcccgccctgtgcggcagatacaagagatggagaaagcacggcgtgttcgtgctgctgaccaccgccaccagcgtggccatctgggtggtgtggatcgtgatgtacacctacggcaacaagcagcacaacagccccacctgggacgaccccaccctggccatcgccctggccgccaacgcctgggccttcgtgctgttctacgtgatccccgaggtgagccaggtgaccaagagcagccccgagcagagctaccagggcgacatgtaccccaccagaggcgtgggctacgagaccatcctgaaggagcagaagggccagagcatgttcgtggagaacaaggccttcagcatggacgagcccgtggccgccaagagacccgtgagcccctacagcggctacaacggccagctgctgaccagcgtgtaccagcccaccgagatggccctgatgcacaaggtgcccagcgagggcgcctacgacatcatcctgcccagagccaccgccaacagccaggtgatgggcagcgccaacagcaccctgagagccgaggacatgtacagcgcccagagccaccaggccgccaccccccccaaggacggcaagaacagccaggtgttcagaaacccctacgtgtgggactag

SEQ ID NO: 199256 - DNA, 1362 bp, Artificial Sequence
  derived and/or modified sequence
atgggcacccagcccgagcccggcctgggcgccagaatggccatccacaaggccctggtgatgtgcctgggcctgcccctgttcctgttccccggcgcctgggcccagggccacgtgccccccggctgcagccagggcctgaaccccctgtactacaacctgtgcgacagaagcggcgcctggggcatcgtgctggaggccgtggccggcgccggcatcgtgaccaccttcgtgctgaccatcatcctggtggccagcctgcccttcgtgcaggacaccaagaagagaagcctgctgggcacccaggtgttcttcctgctgggcaccctgggcctgttctgcctggtgttcgcctgcgtggtgaagcccgacttcagcacctgcgccagcagaagattcctgttcggcgtgctgttcgccatctgcttcagctgcctggccgcccacgtgttcgccctgaacttcctggccagaaagaaccacggccccagaggctgggtgatcttcaccgtggccctgctgctgaccctggtggaggtgatcatcaacaccgagtggctgatcatcaccctggtgagaggcagcggcgagggcggcccccagggcaacagcagcgccggctgggccgtggccagcccctgcgccatcgccaacatggacttcgtgatggccctgatctacgtgatgctgctgctgctgggcgccttcctgggcgcctggcccgccctgtgcggcagatacaagagatggagaaagcacggcgtgttcgtgctgctgaccaccgccaccagcgtggccatctgggtggtgtggatcgtgatgtacacctacggcaacaagcagcacaacagccccacctgggacgaccccaccctggccatcgccctggccgccaacgcctgggccttcgtgctgttctacgtgatccccgaggtgagccaggtgaccaagagcagccccgagcagagctaccagggcgacatgtaccccaccagaggcgtgggctacgagaccatcctgaaggagcagaagggccagagcatgttcgtggagaacaaggccttcagcatggacgagcccgtggccgccaagagacccgtgagcccctacagcggctacaacggccagctgctgaccagcgtgtaccagcccaccgagatggccctgatgcacaaggtgcccagcgagggcgcctacgacatcatcctgcccagagccaccgccaacagccaggtgatgggcagcgccaacagcaccctgagagccgaggacatgtacagcgcccagagccaccaggccgccaccccccccaaggacggcaagaacagccaggtgttcagaaacccctacgtgtgggactag

SEQ ID NO: 199257 - protein, 345 aa, Artificial Sequence
  derived and/or modified sequence
MYKDCIESTGDYFLLCDAEGPWGIILESLAILGIVVTILLLLAFLFLMRKIQDCSQWNVLPTQLLFLLSVLGLFGLAFAFIIELNQQTAPVRYFLFGVLFALCFSCLLAHASNLVKLVRGCVSFSWTTILCIAIGCSLLQIIIATEYVTLIMTRGMMFVNMTPCQLNVDFVVLLVYVLFLMALTFFVSKATFCGPCENWKQHGRLIFITVLFSIIIWVVWISMLLRGNPQFQRQPQWDDPVVCIALVTNAWVFLLLYIVPELCILYRSCRQECPLQGNACPVTAYQHSFQVENQELSRARDSDGAEEDVALTSYGTPIQPQTVDPTQECFIPQAKLSPQQDAGGV

SEQ ID NO: 199258 - protein, 120 aa, Artificial Sequence
  derived and/or modified sequence
MYKDCIESTGDYFLLCDAEGPWGIILESLAILGIVVTILLLLAFLFLMRKIQDCSQWNVLPTQLLFLLSVLGLFGLAFAFIIELNQQTAPVRYFLFGVLFALCFSCLLAHASNLVKLVRG

SEQ ID NO: 199259 - DNA, 1038 bp, Artificial Sequence
  derived and/or modified sequence
atgtacaaggactgcatcgagtccactggagactattttcttctctgtgacgccgaggggccatggggcatcattctggagtccctggccatacttggcatcgtggtcacaattctgctactcttagcatttctcttcctcatgcgaaagatccaagactgcagccagtggaatgtcctccccacccagctcctcttcctcctgagtgtcctggggctcttcggactcgcttttgccttcatcatcgagctcaatcaacaaactgcccccgtacgctactttctctttggggttctctttgctctctgtttctcatgcctcttagctcatgcctccaatctagtgaagctggttcggggttgtgtctccttctcctggacgacaattctgtgcattgctattggttgcagtctgttgcaaatcattattgccactgagtatgtgactctcatcatgaccagaggtatgatgtttgtgaatatgacaccctgccagctcaatgtggactttgttgtactcctggtctatgtcctcttcctgatggccctcacattcttcgtctccaaagccaccttctgtggcccgtgtgagaactggaagcagcatggaaggctcatctttatcactgtgctcttctccatcatcatctgggtggtgtggatctccatgctcctgagaggcaacccgcagttccagcgacagccccagtgggacgacccggtcgtctgcattgctctggtcaccaacgcatgggttttcctgctgctgtacatcgtccctgagctctgcattctctacagatcgtgtagacaggagtgccctttacaaggcaatgcctgccccgtcacagcctaccaacacagcttccaagtggagaaccaggagctctccagagcccgagacagtgatggagctgaggaggatgtagcattaacttcatatggtactcccattcagccgcagactgttgatcccacacaagagtgtttcatcccacaggctaaactaagcccccagcaagatgcaggaggagtataa

SEQ ID NO: 199260 - DNA, 1038 bp, Artificial Sequence
  derived and/or modified sequence
atgtataaggactgtattgagagcactggggactactttcttttatgcgacgctgagggaccttggggtatcattctggaatcgctggctattttaggcattgtggtcacgatcctgttactgcttgcctttctgtttttgatgaggaaaattcaggattgctcccaatggaatgtgttgcctacgcaattgttgttcttgttgtcggtactgggtctgttcgggctggctttcgcgtttatcatcgagttgaaccagcagacagctccagtgaggtacttcctgttcggagtactgtttgcactgtgcttctcatgtcttctggcgcacgcatccaacctggtcaaactggtgcgggggtgcgtctcatttagttggactacaattctgtgcatcgccatcggttgctcactgctccagatcattatcgcaacagagtacgtcacactgatcatgactcgcggcatgatgttcgttaacatgacaccttgccagctgaacgtcgacttcgtggtgttactggtctacgttcttttcctgatggccctcactttctttgtgtcaaaggctaccttctgtgggccatgtgaaaattggaagcaacatgggcgtctcattttcatcaccgtcctgttttcaatcattatctgggtcgtctggatttcaatgttgctgagagggaatccccagttccagcgacagccccagtgggatgacccggttgtgtgcattgccctcgtgacaaacgcgtgggtgttcctgctcttatacatcgtgcccgaactgtgcattctgtacagatcctgcaggcaggagtgcccccttcagggaaatgcctgtccagttacagcttatcagcactcttttcaggtggagaaccaggaactctcccgcgcaagagattccgacggtgctgaagaggacgtggccttgacatcgtacggaacccctatccagcctcagacggtggatcccacccaggaatgcttcattcctcaggccaaattgagcccacaacaggatgcgggaggcgtgtag

SEQ ID NO: 199261 - DNA, 1038 bp, Artificial Sequence
  derived and/or modified sequence
atgtacaaggactgcatcgagagcactggagactacttcctgctgtgtgatgctgagggcccctggggcatcatcctggagagcctggccatcctgggcatcgtggtgaccatcctgctgctgctggccttcctgttcctgatgaggaagatccaggactgcagccagtggaatgtgctgcccacccagctgctcttcctgctgtctgtgctgggcctgtttggcctggcctttgccttcatcatcgagctgaaccagcagacagcccctgtgcgctacttcctgtttggagtgctgtttgccctgtgcttcagctgcctgctggcccacgccagcaacctggtgaagctggtgcggggctgtgtgtccttctcctggaccaccatcctgtgcatcgccatcggctgcagcctgctgcagatcatcatcgccacagaatatgtgaccctcatcatgacccggggcatgatgtttgtgaacatgaccccctgccagctgaatgtggactttgtggtgctgctggtgtatgtgctcttcctgatggccctgaccttctttgtgtccaaggccaccttctgtggcccctgtgagaactggaagcagcacggccgcctcatcttcatcaccgtgctcttcagcatcatcatctgggtggtgtggatctccatgctgctgcggggcaacccccagttccagaggcagccccagtgggatgatcctgtggtgtgcatcgccctggtgaccaatgcctgggtgttcctgctgctgtacatcgtgcctgagctgtgcatcctgtaccgcagctgccggcaggagtgccccctgcagggcaatgcctgccctgtgacagcctaccagcacagcttccaggtggagaaccaggagctgagccgggcccgggacagtgatggagcagaagaagatgtggccctgaccagctatggcacccccatccagccccagacagtggaccccacccaggagtgcttcatcccccaggccaagctgagcccccagcaggatgctgggggcgtgtag

SEQ ID NO: 199262 - DNA, 1038 bp, Artificial Sequence
  derived and/or modified sequence
atgtacaaggactgcatcgagagcaccggcgactacttcctgctgtgcgatgctgaaggtccttggggaattatactcgagtctctggccatcctgggcattgtagtaacgattctgctgctgttggcattcctctttctgatgcggaagatacaggactgctcacaatggaacgtattgcccactcagctgctcttcttgttgagtgtgctgggcttatttggcctggcattcgctttcatcatcgagctgaaccagcagacggcccctgtgcggtattttctgttcggtgttctgtttgccctgtgctttagttgcttactagcccacgcctctaacctggtgaagctggtgcggggttgcgtgagtttctcttggactaccattctgtgcatcgctattggatgttcattactgcaaattataattgctactgaatatgtaacactaatcatgacacgggggatgatgttcgtgaatatgactccatgccagctcaacgtggattttgtggtgctgctcgtttacgttctcttcctgatggccctcacgttcttcgtcagcaaagccactttctgcggcccatgtgaaaattggaagcagcacggtcgcttaatctttatcaccgttctgttctccatcattatttgggtggtttggatcagcatgttgctgcgcggcaatccacaatttcagcgtcaaccccagtgggatgatccggtggtgtgtattgctctcgtgaccaacgcctgggtatttttactgctctacattgtgccagaattgtgcatcttataccgctcttgtcgccaagagtgtccactgcagggaaatgcctgtccagttaccgcctatcagcactccttccaggtggagaaccaggaactgagtcgagccagggacagcgatggtgctgaggaggatgtcgctctcacatcttacggaacaccgatccagccgcaaacagttgatcctacccaggaatgctttattcctcaggccaagctgagtcctcaacaggacgctggcggcgtgtag

SEQ ID NO: 199263 - DNA, 1038 bp, Artificial Sequence
  derived and/or modified sequence
atgtataaagactgtatcgagagcacaggggactattttcttttgtgcgacgccgaaggaccctgggggatcatcctggaatctttggccatcctggggatcgtggtcaccattctgctgctgcttgcgtttcttttcttgatgagaaaaatccaagattgctctcagtggaatgttcttccgacccagttgttgttcttactgtccgtcctcgggctctttgggcttgccttcgctttcatcatcgagctgaatcagcagacggcccctgttcgctacttcctattcggtgtgcttttcgcgctgtgcttttcatgtctactggctcacgcatccaatcttgtgaaactcgtgcgcggttgtgtgtcattctcatggaccacaattctctgtatagcgattggctgcagcttgttacagatcattatagccaccgaatatgttacgttgattatgacccgaggcatgatgtttgtgaacatgacaccatgccagcttaatgtggattttgtagttttgcttgtttacgtcttgttcctgatggccctgacctttttcgtctctaaggcaaccttttgtgggccttgtgaaaactggaaacagcacggcagattaatcttcataacagtgctgttttcaataataatctgggttgtgtggatctccatgttgctccgtgggaaccctcagttccaacgacagccgcaatgggatgacccggtggtttgtatagctctggttacaaacgcctgggttttcctgcttctgtacatcgttcctgagctttgcatcctgtacagaagctgtcgacaggagtgtccactgcagggaaacgcatgccctgttaccgcgtatcaacacagctttcaggtagaaaaccaagagcttagtagggctagggattccgatggagcagaggaggatgtcgcgttaaccagctacgggactcctattcaaccacagaccgtggatcccacccaggaatgctttattcctcaggcaaagctgtcacctcaacaagatgcaggtggagtgtag

SEQ ID NO: 199264 - DNA, 1038 bp, Artificial Sequence
  derived and/or modified sequence
atgtacaaggactgcatcgagagcaccggcgactacttcctgctgtgcgacgccgagggcccctggggcatcatcctggagagcctggccatcctgggcatcgtggtgaccatcctgctgctgctggccttcctgttcctgatgagaaagatccaggactgcagccagtggaacgtgctgcccacccagctgctgttcctgctgagcgtgctgggcctgttcggcctggccttcgccttcatcatcgagctgaaccagcagaccgcccccgtgagatacttcctgttcggcgtgctgttcgccctgtgcttcagctgcctgctggcccacgccagcaacctggtgaagctggtgagaggctgcgtgagcttcagctggaccaccatcctgtgcatcgccatcggctgcagcctgctgcagatcatcatcgccaccgagtacgtgaccctgatcatgaccagaggcatgatgttcgtgaacatgaccccctgccagctgaacgtggacttcgtggtgctgctggtgtacgtgctgttcctgatggccctgaccttcttcgtgagcaaggccaccttctgcggcccctgcgagaactggaagcagcacggcagactgatcttcatcaccgtgctgttcagcatcatcatctgggtggtgtggatcagcatgctgctgagaggcaacccccagttccagagacagccccagtgggacgaccccgtggtgtgcatcgccctggtgaccaacgcctgggtgttcctgctgctgtacatcgtgcccgagctgtgcatcctgtacagaagctgcagacaggagtgccccctgcagggcaacgcctgccccgtgaccgcctaccagcacagcttccaggtggagaaccaggagctgagcagagccagagacagcgacggcgccgaggaggacgtggccctgaccagctacggcacccccatccagccccagaccgtggaccccacccaggagtgcttcatcccccaggccaagctgagcccccagcaggacgccggcggcgtgtag

SEQ ID NO: 199265 - protein, 136 aa, Artificial Sequence
  derived and/or modified sequence
MRTPGPLPVLLLLLAGAPAARPTPPTCYSRMRALSQEITRDFNLLQVSEPSEPCVRYLPRLYLDIHNYCVLDKLRDFVASPPCWKVAQVDSLKDKARKLYTIMNSFCRRDLVFLLDDCNALEYPIPVTTVLPDRQR

SEQ ID NO: 199266 - DNA, 411 bp, Artificial Sequence
  derived and/or modified sequence
atgagaacacctggcccactgcctgtcctgctgttgcttctcgccggcgccccagcagctcgaccaacacctcccacctgttactctcgcatgcgcgctttgagtcaggagatcacccgggactttaatctactccaagtatcagaaccctctgagccatgtgtgcgatacttgccaagattgtatttggatattcataattactgtgttttggacaagctgcgagatttcgtggccagtcccccatgctggaaggtggcgcaggtggacagcctgaaagacaaggcacgaaaactgtacacaattatgaattccttctgtcgacgggacctagttttcctcctcgatgactgcaacgcccttgaatatccgatccctgtaaccaccgtgctgccggataggcagaggtag

SEQ ID NO: 199267 - DNA, 411 bp, Artificial Sequence
  derived and/or modified sequence
atgaggaccccaggccccctgcctgtgctgctgctgctgctggccggggccccagctgcccggcccaccccacccacctgctacagcaggatgagggccctgagccaggagatcacccgggacttcaacctgctgcaggtgtctgagcccagcgagccctgtgtgcgctacctgccccggctgtacctggacatccacaactactgtgtgctggacaagctgcgggactttgtggccagccccccctgctggaaggtggcccaggtggacagcctgaaggacaaggccaggaagctgtacaccatcatgaacagcttctgccggcgggacctggtgttcctgctggatgactgcaatgccctggagtaccccatccctgtgaccaccgtgctgcctgaccggcagaggtag

SEQ ID NO: 199268 - DNA, 411 bp, Artificial Sequence
  derived and/or modified sequence
atgcggacccccggccccctgcccgtgctgctgctgctgctggccggagcgccagccgcccggcctaccccccccacgtgctactcgcggatgcgcgcgcttagccaggagataacgcgggatttcaatttgttgcaggtatcagaaccctctgagccatgcgtgcgctacctccctcgcctctacctggacatccataactactgcgtgttggataagctgagggacttcgtagccagcccgccatgctggaaagttgcacaggttgacagcttgaaggataaggccaggaagctctatacaattatgaacagcttctgccgaagagacctggtgttccttctcgacgactgtaatgccctggaatacccgattcccgtgaccactgttcttcctgatcgccagaggtag

SEQ ID NO: 199269 - DNA, 411 bp, Artificial Sequence
  derived and/or modified sequence
atgcgaactcctggccctctgccagtgctcctgctgttactggccggagcacccgctgcgaggcctaccccacctacctgttactcaagaatgagggccctgagccaagagataactagagatttcaaccttttgcaggttagcgagccctcagagccctgcgtacgctatttaccgcgtttgtacctcgatatccataactactgcgtcttagataagcttcgcgattttgtggcaagccccccttgttggaaggtggcccaagtagatagtttgaaagataaagcccgaaagttgtacacgattatgaacagcttctgccgcagggacttggtgtttttgctggacgattgcaatgcattggagtatccaattcctgtgaccactgtgttgccagaccggcagcgatag

SEQ ID NO: 199270 - DNA, 1003 bp, Artificial Sequence
  derived and/or modified sequence
ggcgaggctgcaccagcgcctggcaccatgaggacgcctgggcctctgcccgtgctgctgctgctcctggcgggagcccccgccgcgcggcccactcccccgacctgctactcccgcatgcgggccctgagccaggagatcacccgcgacttcaacctcctgcaggtctcggagccctcggagccatgtgtgagatacctgcccaggctgtacctggacatacacaattactgtgtgctggacaagctgcgggactttgtggcctcgcccccgtgttggaaagtggcccaggtagattccttgaaggacaaagcacggaagctgtacaccatcatgaactcgttctgcaggagagatttggtattcctgttggatgactgcaatgccttggaatacccaatcccagtgactacggtcctgccagatcgtcagcgctaagggaactgagaccagagaaagaacccaagagaactacagttatgtcagctacccagacttaatgggccagagccatgaccctcacaggtcttgtgttagttgtatctgaaactgttatgtatctctctaccttctggaaaacagggctggtattcctacccaggaacctcctttgagcatagagttagcaaccatgcttctcattcccttgactcatgtcttgccaggatggttagatacacagcatgttgatttggtcactaaaaagaagaaaaggactaacaagcttcacttttatgaacaactattttgagaacttgcacaatagtatgtttttattactggtttaatggagtaatggtacttttattctttcttgatagaaacctgcttacatttaaccaagcttctattatgcctttttctaacacagactttcttcactgtctttcatttaaaaagaaattaatgctcttaagatatatattttacgtagtgctgacaggacccactctttcattgaaaggtgatgaaaatcaaataaagaatctcttcacatgagaaa

SEQ ID NO: 199271 - DNA, 411 bp, Artificial Sequence
  derived and/or modified sequence
atgagaacccccggccccctgcccgtgctgctgctgctgctggccggcgcccccgccgccagacccaccccccccacctgctacagcagaatgagagccctgagccaggagatcaccagagacttcaacctgctgcaggtgagcgagcccagcgagccctgcgtgagatacctgcccagactgtacctggacatccacaactactgcgtgctggacaagctgagagacttcgtggccagccccccctgctggaaggtggcccaggtggacagcctgaaggacaaggccagaaagctgtacaccatcatgaacagcttctgcagaagagacctggtgttcctgctggacgactgcaacgccctggagtaccccatccccgtgaccaccgtgctgcccgacagacagagatag

SEQ ID NO: 199272 - protein, 513 aa, Artificial Sequence
  derived and/or modified sequence
MASVLSRRLGKRSLLGARVLGPSASEGPSAAPPSEPLLEGAAPQPFTTSDDTPCQEQPKEVLKAPSTSGLQQVAFQPGQKVYVWYGGQECTGLVEQHSWMEGQVTVWLLEQKLQVCCRVEEVWLAELQGPCPQAPPLEPGAQALAYRPVSRNIDVPKRKSDAVEMDEMMAAMVLTSLSCSPVVQSPPGTEANFSASRAACDPWKESGDISDSGSSTTSGHWSGSSGVSTPSPPHPQASPKYLGDAFGSPQTDHGFETDPDPFLLDEPAPRKRKNSVKVMYKCLWPNCGKVLRSIVGIKRHVKALHLGDTVDSDQFKREEDFYYTEVQLKEESAAAAAAAAAGTPVPGTPTSEPAPTPSMTGLPLSALPPPLHKAQSSGPEHPGPESSLPSGALSKSAPGSFWHIQADHAYQALPSFQIPVSPHIYTSVSWAAAPSAACSLSPVRSRSLSFSEPQQPAPAMKSHLIVTSPPRAQSGARKARGEAKKCRKVYGIEHRDQWCTACRWKKACQRFLD

SEQ ID NO: 199273 - protein, 47 aa, Artificial Sequence
  derived and/or modified sequence
MASVLSRRLGKRSLLGARVLGPSASEGPSAAPPSEPLLEGAAPQPFT

SEQ ID NO: 199274 - protein, 156 aa, Artificial Sequence
  derived and/or modified sequence
MASVLSRRLGKRSLLGARVLGPSASEGPSAAPPSEPLLEGAAPQPFTTSDDTPCQEQPKEVLKAPSTSGLQQVAFQPGQKVYVWYGGQECTGLVEQHSWMEGQVTVWLLEQKLQVCCRVEEVWLAELQGPCPQAPPLEPGAQALAYRPVSRNIDVP

SEQ ID NO: 199275 - protein, 124 aa, Artificial Sequence
  derived and/or modified sequence
MASVLSRRLGKRSLLGARVLGPSASEGPSAAPPSEPLLEGAAPQPFTTSDDTPCQEQPKEVLKAPSTSGLQQVAFQPGQKVYVWYGGQECTGLVEQHSWMEGQVTVWLLEQKLQVCCRVEEVWL

SEQ ID NO: 199276 - protein, 188 aa, Artificial Sequence
  derived and/or modified sequence
MASVLSRRLGKRSLLGARVLGPSASEGPSAAPPSEPLLEGAAPQPFTTSDDTPCQEQPKEVLKAPSTSGLQQVAFQPGQKVYVWYGGQECTGLVEQHSWMEGQVTVWLLEQKLQVCCRVEEVWLAELQGPCPQAPPLEPGAQALAYRPVSRNIDVPKRKSDAVEMDEMMAAMVLTSLSCSPVVQSPPG

SEQ ID NO: 199277 - protein, 102 aa, Artificial Sequence
  derived and/or modified sequence
MASVLSRRLGKRSLLGARVLGPSASEGPSAAPPSEPLLEGAAPQPFTTSDDTPCQEQPKEVLKAPSTSGLQQVAFQPGQKVYVWYGGQECTGLVEQHSWMEG

SEQ ID NO: 199278 - DNA, 4807 bp, Artificial Sequence
  derived and/or modified sequence
aagtgcgcatgtgcgcgaggagtcgctcgggcacttattgagcgccgactgtctacgggcggccgggggtgatgggcagaggcttcagtgtccccttcgcctccgcaggagaggagaggcagcagcatggcgagtgtcctgtcccgacgccttggaaagcggtccctcctgggagcccgggtgttgggacccagtgcctcggaggggccctcggctgccccaccctcggagccactgctagaaggggccgctccccagcctttcaccacctctgatgacaccccctgccaggagcagcccaaggaagtccttaaggctcccagcacctcgggccttcagcaggtggcctttcagcctgggcagaaggtttatgtgtggtacgggggtcaagagtgcacaggactggtggagcagcacagctggatggagggtcaggtgaccgtctggctgctggagcagaagctgcaggtctgctgcagggtggaggaggtgtggctggcagagctgcagggcccctgtccccaggcaccacccctggagcccggagcccaggccctggcctacaggcccgtctccaggaacatcgatgtcccaaagaggaagtcggacgcagtggaaatggatgagatgatggcggccatggtgctgacgtccctgtcctgcagccctgttgtacagagtcctcccgggaccgaggccaacttctctgcttcccgtgcggcctgcgacccatggaaggagagtggtgacatctcggacagcggcagcagcactaccagcggtcactggagtgggagcagtggtgtctccaccccctcgcccccccacccccaggccagccccaagtatttgggggatgcttttggttctccccaaactgatcatggctttgagaccgatcctgaccctttcctgctggacgaaccagctccacgaaaaagaaagaactctgtgaaggtgatgtacaagtgcctgtggccaaactgtggcaaagttctgcgctccattgtgggcatcaaacgacacgtcaaagccctccatctgggggacacagtggactctgatcagttcaagcgggaggaggatttctactacacagaggtgcagctgaaggaggaatctgctgctgctgctgctgctgctgccgcaggcaccccagtccctgggactcccacctccgagccagctcccacccccagcatgactggcctgcctctgtctgctcttccaccacctctgcacaaagcccagtcctccggcccagaacatcctggcccggagtcctccctgccctcaggggctctcagcaagtcagctcctgggtccttctggcacattcaggcagatcatgcataccaggctctgccatccttccagatcccagtctcaccacacatctacaccagtgtcagctgggctgctgccccctccgccgcctgctctctctctccggtccggagccggtcgctaagcttcagcgagccccagcagccagcacctgcgatgaaatctcatctgatcgtcacttctccaccccgggcccagagtggtgccaggaaagcccgaggggaggctaagaagtgccgcaaggtgtatggcatcgagcaccgggaccagtggtgcacggcctgccggtggaagaaggcctgccagcgctttctggactgagctgtgctgcaggttctactctgttcctggccctgccggcagccactgacaagaggccagtgtgtcaccagccctcagcagaaaccgaaagagaaagaacggaaacacggagtttgggctctgttggctaaggtgtaacacttaaagcaattttctcccattgtgcgaacattttattttttaaaaaaaagaaacaaaaatatttttccccctaaaataggagagagccaaaactgaccaaggctattcagcagtgaaccagtgaccaaagaattaattaccctccgtttcccacatccccactctctaggggattagcttgtgcgtgtcaaaagaaggaacagctcgttctgcttcctgctgagtcggtgaattctttgctttctaaactcttccagaaaggactgtgagcaagatgaatttacttttcttaaaaaaaaaaaaaaaaaaaaaaaaaaagagtttctggctgatgggtgactcagagtgcaggactgcctggccgtggggcagaggggtttgcccttctcggagggtacctcctgttccctgtctgagcatcctgcatggaagtcaaaggaaatccctttcttggtgacgacttaaatctgggttccctcagacattgggttgcaccccaacaaatattaaatggcttcttcttaaagcccagagaaagaggttttttaaaagactgtcgccaaatagctgagccaaaaggctgatcagaattcactttttggaatgtggcagttaaacactaccttgatcattctctcctctttcctcgaggaactcctggagggtttgagcgtctggaaactctctgctctgacccgaggaagcaccctcctgacgccgccttcctccggttattgaaaggacgcctcagaaatgctttgttttcttttacgatgtattcagaagcctttactgattaaagttttcttttatttgggtggccgggagagacccagggaggttctggaggttcctttctgtctcctggccccaccagggatttccccatttctgtttgctgcctgaaagcaggatgaggaaggccaaggagagtccttgcacccgtgagcgtcaggatgaggaaatgacaggaggaagacgtgggtttgggttagtggctgctggcgttttggcccttggtgtttctggagcctccagggatctaggggagcctgggctgcgtgcatgtcgataagcagagctgttcttggggagaaggagggaggtctcgggagtgtagcaccatgccaaccagccctgcgcgaagacagagtgagccacgcccggatggcagggcatgtttctgttttggtgtctcactttcctcccagcgtgacttatttggggattcctcagggcctactggaatgtgactgcccactgcccagctgcctcgggtacaagtcctggccctatgtcccagctgtcaggggctcagggaatcctacccagccacctgtcctgggatggagtgtcagcatccaccccttggttgtcatcgaggccgccctcccagtcctgggtgaagatatttgggccaccagggctcccttggccccttcacgtaggaaatagacacgtgctttttaatgcaggacactttgagtgttacaaaatctgtagacctggcagtagggtcatgatgttgggaagggtgtagtgccctaggttggtgacagaagggacagacacttgtgcacaggtgtctttggtgatggggtttttttttttataacttagtaaaaaaaaaaaaatgtatgtggaattctgtctcttggtaaagctcaaagccaggctagcctgaggtggcgcagggctctccttcctgtcccttcgatctccttgagaattaagagctggcagctgctgatggtgtttcccaacccccctcacttcccaagacaacccccagcttcaggtcctcatggggaggggagggcacgttcttgacacatgggaacttcgctcaggagggcctccccttcccctctccctcagagttttcactgccgtctcgtctttagaaagctgtttgaattccccccgcccccagtttggaccgtgtagatataactggatatacggatttttctctttgtgcaggcttcttatgccgttggtatacagggcaggaaagagaggaataaagggagagagcagtgtggaaaccacggtggttttgctttgttcttactaggttttggtgccaccttccctgcctgcgcttgtgccccctctcctccttggcactggcggcctccttgcctcccttccacccgtgctgccatcccgtgcctgtcgtgttggttcttcacacgtgctctgttctcggggttgttccattcatgccttcttggagggtgagggtggcttgggaaccgacccagtgatcatgcctactttcttctttgtatctccctccttcccagcccacccgggcagcagactctgatggaaggaaggtgccgtaggtgggcttttagaaactaacgggactggttttcaaagcagttatcttgggaaactgtttattccagcgatgtgacttttttcagaatatttcttggaatcatattcagagtctggggctgtgtgttgagcagccttaaggatgctagacactcatttagtgcccagggagtccagcgaatgacgtctgtggccaagcgaggtctcaggtgcaaagcaaaaggaccatttaaagtaaaatagcttggattcaatcatgtgacttttaaattggctcagaaagcaattttgtaatttcagagagtgttttgagccatggccacgttgtcattgtgagtctatagcttgactccttggagaacaatattcatttggttgtggagactgatttgctgggagaaatctgtcctgttactttctggtcatcccaggttctgacttttaccaggggcaaaaaaaaaaaaagcaagagggagataaatcccatctgtgagtttgtcttattggcgcctttttcctcagctgtcttccaagtattatttttactgttaaaaaattttttaaaaatgtgaaatgtaatgtttttacagcaacaatatgaaatatattttataaggaataaaatggtaccttgtctgatttaaaaaaa

SEQ ID NO: 199279 - DNA, 1542 bp, Artificial Sequence
  derived and/or modified sequence
atggccagcgtgctgagcagaagactgggcaagagaagcctgctgggcgccagagtgctgggccccagcgccagcgagggccccagcgccgccccccccagcgagcccctgctggagggcgccgccccccagcccttcaccaccagcgacgacaccccctgccaggagcagcccaaggaggtgctgaaggcccccagcaccagcggcctgcagcaggtggccttccagcccggccagaaggtgtacgtgtggtacggcggccaggagtgcaccggcctggtggagcagcacagctggatggagggccaggtgaccgtgtggctgctggagcagaagctgcaggtgtgctgcagagtggaggaggtgtggctggccgagctgcagggcccctgcccccaggccccccccctggagcccggcgcccaggccctggcctacagacccgtgagcagaaacatcgacgtgcccaagagaaagagcgacgccgtggagatggacgagatgatggccgccatggtgctgaccagcctgagctgcagccccgtggtgcagagcccccccggcaccgaggccaacttcagcgccagcagagccgcctgcgacccctggaaggagagcggcgacatcagcgacagcggcagcagcaccaccagcggccactggagcggcagcagcggcgtgagcacccccagccccccccacccccaggccagccccaagtacctgggcgacgccttcggcagcccccagaccgaccacggcttcgagaccgaccccgaccccttcctgctggacgagcccgcccccagaaagagaaagaacagcgtgaaggtgatgtacaagtgcctgtggcccaactgcggcaaggtgctgagaagcatcgtgggcatcaagagacacgtgaaggccctgcacctgggcgacaccgtggacagcgaccagttcaagagagaggaggacttctactacaccgaggtgcagctgaaggaggagagcgccgccgccgccgccgccgccgccgccggcacccccgtgcccggcacccccaccagcgagcccgcccccacccccagcatgaccggcctgcccctgagcgccctgcccccccccctgcacaaggcccagagcagcggccccgagcaccccggccccgagagcagcctgcccagcggcgccctgagcaagagcgcccccggcagcttctggcacatccaggccgaccacgcctaccaggccctgcccagcttccagatccccgtgagcccccacatctacaccagcgtgagctgggccgccgcccccagcgccgcctgcagcctgagccccgtgagaagcagaagcctgagcttcagcgagccccagcagcccgcccccgccatgaagagccacctgatcgtgaccagcccccccagagcccagagcggcgccagaaaggccagaggcgaggccaagaagtgcagaaaggtgtacggcatcgagcacagagaccagtggtgcaccgcctgcagatggaagaaggcctgccagagattcctggactag

SEQ ID NO: 199280 - DNA, 4808 bp, Artificial Sequence
  derived and/or modified sequence
aggttcaagtgcgcatgtgcgcgaggagtcgctcgggcacttattgagcgccgactgtctacgggcggccgggggtgatgggcagaggcttcagtgtccccttcgcctccgcaggagaggagaggcagcagcatggcgagtgtcctgtcccgacgccttggaaagcggtccctcctgggagcccgggtgttgggacccagtgcctcggaggggccctcggctgccccaccctcggagccactgctagaaggggccgctccccagcctttcaccacctctgatgacaccccctgccaggagcagcccaaggaagtccttaaggctcccagcacctcgggccttcagcaggtggcctttcagcctgggcagaaggtttatgtgtggtacgggggtcaagagtgcacaggactggtggagcagcacagctggatggagggtcaggtgaccgtctggctgctggagcagaagctgcaggtctgctgcagggtggaggaggtgtggctggcagagctgcagggcccctgtccccaggcaccacccctggagcccggagcccaggccctggcctacaggcccgtctccaggaacatcgatgtcccaaagaggaagtcggacgcagtggaaatggatgagatgatggcggccatggtgctgacgtccctgtcctgcagccctgttgtacagagtcctcccgggaccgaggccaacttctctgcttcccgtgcggcctgcgacccatggaaggagagtggtgacatctcggacagcggcagcagcactaccagcggtcactggagtgggagcagtggtgtctccaccccctcgcccccccacccccaggccagccccaagtatttgggggatgcttttggttctccccaaactgatcatggctttgagaccgatcctgaccctttcctgctggacgaaccagctccacgaaaaagaaagaactctgtgaaggtgatgtacaagtgcctgtggccaaactgtggcaaagttctgcgctccattgtgggcatcaaacgacacgtcaaagccctccatctgggggacacagtggactctgatcagttcaagcgggaggaggatttctactacacagaggtgcagctgaaggaggaatctgctgctgctgctgctgctgctgccgcaggcaccccagtccctgggactcccacctccgagccagctcccacccccagcatgactggcctgcctctgtctgctcttccaccacctctgcacaaagcccagtcctccggcccagaacatcctggcccggagtcctccctgccctcaggggctctcagcaagtcagctcctgggtccttctggcacattcaggcagatcatgcataccaggctctgccatccttccagatcccagtctcaccacacatctacaccagtgtcagctgggctgctgccccctccgccgcctgctctctctctccggtccggagccggtcgctaagcttcagcgagccccagcagccagcacctgcgatgaaatctcatctgatcgtcacttctccaccccgggcccagagtggtgccaggaaagcccgaggggaggctaagaagtgccgcaaggtgtatggcatcgagcaccgggaccagtggtgcacggcctgccggtggaagaaggcctgccagcgctttctggactgagctgtgctgcaggttctactctgttcctggccctgccggcagccactgacaagaggccagtgtgtcaccagccctcagcagaaaccgaaagagaaagaacggaaacacggagtttgggctctgttggctaaggtgtaacacttaaagcaattttctcccattgtgcgaacattttattttttaaaaaaaagaaacaaaaatatttttccccctaaaataggagagagccaaaactgaccaaggctattcagcagtgaaccagtgaccaaagaattaattaccctccgtttcccacatccccactctctaggggattagcttgtgcgtgtcaaaagaaggaacagctcgttctgcttcctgctgagtcggtgaattctttgctttctaaactcttccagaaaggactgtgagcaagatgaatttacttttcttaaaaaaaaaaaaaaaaaaaaaaaaaaagagtttctggctgatgggtgactcagagtgcaggactgcctggccgtggggcagaggggtttgcccttctcggagggtacctcctgttccctgtctgagcatcctgcatggaagtcaaaggaaatccctttcttggtgacgacttaaatctgggttccctcagacattgggttgcaccccaacaaatattaaatggcttcttcttaaagcccagagaaagaggttttttaaaagactgtcgccaaatagctgagccaaaaggctgatcagaattcactttttggaatgtggcagttaaacactaccttgatcattctctcctctttcctcgaggaactcctggagggtttgagcgtctggaaactctctgctctgacccgaggaagcaccctcctgacgccgccttcctccggttattgaaaggacgcctcagaaatgctttgttttcttttacgatgtattcagaagcctttactgattaaagttttcttttatttgggtggccgggagagacccagggaggttctggaggttcctttctgtctcctggccccaccagggatttccccatttctgtttgctgcctgaaagcaggatgaggaaggccaaggagagtccttgcacccgtgagcgtcaggatgaggaaatgacaggaggaagacgtgggtttgggttagtggctgctggcgttttggcccttggtgtttctggagcctccagggatctaggggagcctgggctgcgtgcatgtcgataagcagagctgttcttggggagaaggagggaggtctcgggagtgtagcaccatgccaaccagccctgcgcgaagacagagtgagccacgcccggatggcagggcatgtttctgttttggtgtctcactttcctcccagcgtgacttatttggggattcctcagggcctactggaatgtgactgcccactgcccagctgcctcgggtacaagtcctggccctatgtcccagctgtcaggggctcagggaatcctacccagccacctgtcctgggatggagtgtcagcatccaccccttggttgtcatcgaggccgccctcccagtcctgggtgaagatatttgggccaccagggctcccttggccccttcacgtaggaaatagacacgtgctttttaatgcaggacactttgagtgttacaaaatctgtagacctggcagtagggtcatgatgttgggaagggtgtagtgccctaggttggtgacagaagggacagacacttgtgcacaggtgtctttggtgatggggtttttttttttataacttagtaaaaaaaaaaaaatgtatgtggaattctgtctcttggtaaagctcaaagccaggctagcctgaggtggcgcagggctctccttcctgtcccttcgatctccttgagaattaagagctggcagctgctgatggtgtttcccaacccccctcacttcccaagacaacccccagcttcaggtcctcatggggaggggagggcacgttcttgacacatgggaacttcgctcaggagggcctccccttcccctctccctcagagttttcactgccgtctcgtctttagaaagctgtttgaattccccccgcccccagtttggaccgtgtagatataactggatatacggatttttctctttgtgcaggcttcttatgccgttggtatacagggcaggaaagagaggaataaagggagagagcagtgtggaaaccacggtggttttgctttgttcttactaggttttggtgccaccttccctgcctgcgcttgtgccccctctcctccttggcactggcggcctccttgcctcccttccacccgtgctgccatcccgtgcctgtcgtgttggttcttcacacgtgctctgttctcggggttgttccattcatgccttcttggagggtgagggtggcttgggaaccgacccagtgatcatgcctactttcttctttgtatctccctccttcccagcccacccgggcagcagactctgatggaaggaaggtgccgtaggtgggcttttagaaactaacgggactggttttcaaagcagttatcttgggaaactgtttattccagcgatgtgacttttttcagaatatttcttggaatcatattcagagtctggggctgtgtgttgagcagccttaaggatgctagacactcatttagtgcccagggagtccagcgaatgacgtctgtggccaagcgaggtctcaggtgcaaagcaaaaggaccatttaaagtaaaatagcttggattcaatcatgtgacttttaaattggctcagaaagcaattttgtaatttcagagagtgttttgagccatggccacgttgtcattgtgagtctatagcttgactccttggagaacaatattcatttggttgtggagactgatttgctgggagaaatctgtcctgttactttctggtcatcccaggttctgacttttaccaggggcaaaaaaaaaaaaagcaagagggagataaatcccatctgtgagtttgtcttattggcgcctttttcctcagctgtcttccaagtattatttttactgttaaaaaattttttaaaaatgtgaaatgtaatgtttttacagcaacaatatgaaatatattttataaggaataaaatggtaccttgtctgatttaa

SEQ ID NO: 199281 - DNA, 471 bp, Artificial Sequence
  derived and/or modified sequence
atggccagcgtgctgagcagaagactgggcaagagaagcctgctgggcgccagagtgctgggccccagcgccagcgagggccccagcgccgccccccccagcgagcccctgctggagggcgccgccccccagcccttcaccaccagcgacgacaccccctgccaggagcagcccaaggaggtgctgaaggcccccagcaccagcggcctgcagcaggtggccttccagcccggccagaaggtgtacgtgtggtacggcggccaggagtgcaccggcctggtggagcagcacagctggatggagggccaggtgaccgtgtggctgctggagcagaagctgcaggtgtgctgcagagtggaggaggtgtggctggccgagctgcagggcccctgcccccaggccccccccctggagcccggcgcccaggccctggcctacagacccgtgagcagaaacatcgacgtgccctag

SEQ ID NO: 199282 - DNA, 375 bp, Artificial Sequence
  derived and/or modified sequence
atggccagcgtgctgagcagaagactgggcaagagaagcctgctgggcgccagagtgctgggccccagcgccagcgagggccccagcgccgccccccccagcgagcccctgctggagggcgccgccccccagcccttcaccaccagcgacgacaccccctgccaggagcagcccaaggaggtgctgaaggcccccagcaccagcggcctgcagcaggtggccttccagcccggccagaaggtgtacgtgtggtacggcggccaggagtgcaccggcctggtggagcagcacagctggatggagggccaggtgaccgtgtggctgctggagcagaagctgcaggtgtgctgcagagtggaggaggtgtggctgtag

SEQ ID NO: 199283 - DNA, 567 bp, Artificial Sequence
  derived and/or modified sequence
atggccagcgtgctgagcagaagactgggcaagagaagcctgctgggcgccagagtgctgggccccagcgccagcgagggccccagcgccgccccccccagcgagcccctgctggagggcgccgccccccagcccttcaccaccagcgacgacaccccctgccaggagcagcccaaggaggtgctgaaggcccccagcaccagcggcctgcagcaggtggccttccagcccggccagaaggtgtacgtgtggtacggcggccaggagtgcaccggcctggtggagcagcacagctggatggagggccaggtgaccgtgtggctgctggagcagaagctgcaggtgtgctgcagagtggaggaggtgtggctggccgagctgcagggcccctgcccccaggccccccccctggagcccggcgcccaggccctggcctacagacccgtgagcagaaacatcgacgtgcccaagagaaagagcgacgccgtggagatggacgagatgatggccgccatggtgctgaccagcctgagctgcagccccgtggtgcagagcccccccggctag

SEQ ID NO: 199284 - DNA, 309 bp, Artificial Sequence
  derived and/or modified sequence
atggccagcgtgctgagcagaagactgggcaagagaagcctgctgggcgccagagtgctgggccccagcgccagcgagggccccagcgccgccccccccagcgagcccctgctggagggcgccgccccccagcccttcaccaccagcgacgacaccccctgccaggagcagcccaaggaggtgctgaaggcccccagcaccagcggcctgcagcaggtggccttccagcccggccagaaggtgtacgtgtggtacggcggccaggagtgcaccggcctggtggagcagcacagctggatggagggctag

SEQ ID NO: 199285 - DNA, 1542 bp, Artificial Sequence
  derived and/or modified sequence
atggcgtctgtcctgtcaaggcgccttggcaaaagatcactgctcggcgcgcgggtgctgggaccgtccgcctccgaggggccctctgctgctccaccctccgaacccttattggaaggtgctgccccccaacctttcacgacttcagatgacactccatgccaggaacagcctaaggaggttctcaaagcaccctctaccagcgggctccagcaggtggccttccaacccggacagaaggtgtatgtgtggtatggcgggcaggaatgcacagggttggtggagcagcacagttggatggagggacaggtgacagtgtggctgttggaacagaagctgcaagtttgttgtcgagtcgaggaagtgtggctcgctgaactccagggaccttgccctcaagcccccccactagaacccggcgcccaagctttggcttacagacctgtatctcggaatattgatgtgccaaagaggaaatcagacgccgtcgaaatggatgaaatgatggccgcaatggtcctgacctccctgtcgtgcagccccgtggtacagagcccgcccggcactgaggcgaacttttctgcttcgcgcgcggcatgcgacccatggaaagagtccggggatatcagcgactctggatcgagcactacatccggccactggagtggctctagcggagtgagtacaccgtcccctcctcacccccaggcctcccccaagtacctaggggacgccttcggctctcctcagacggatcacggtttcgagacagacccggatccatttcttttggacgaacctgccccccggaagagaaaaaatagcgtgaaggtcatgtataagtgcctgtggccaaattgcggtaaggttctgaggtcgatagtgggaattaaacgtcatgtgaaggcgctgcacctgggcgacaccgtggattctgaccagtttaagagggaagaagatttctactataccgaagttcagcttaaagaagaatcagcggcggctgccgctgccgccgcagcaggaacacctgttcccggcaccccaaccagcgaaccagcccctacgccaagtatgaccggtctgccattaagtgctctcccaccacctctccacaaggcacaaagttctggacccgaacatcccggacccgagagctctctgccatccggcgcccttagcaagtctgcacctggctccttttggcacatccaggcagaccatgcttaccaagctctcccgtctttccaaatccccgttagcccccacatctatacaagtgtgagttgggctgctgctcctagtgctgcatgctctctctctccagttaggtcccgctccttaagtttttccgagccccagcagcctgcccctgctatgaagagccacctcatcgtaacgagtcctccacgggcacagtctggcgcccgaaaggcacgaggcgaagctaagaagtgtaggaaggtctatggaatagaacaccgcgatcagtggtgcactgcctgccggtggaaaaaggcctgccagagattcttagattag

SEQ ID NO: 199286 - DNA, 471 bp, Artificial Sequence
  derived and/or modified sequence
atggcatcagtgctctcgaggcgtctgggcaaaagaagcctgttaggggctcgggttctcgggcccagcgcgtcagaggggccaagcgccgcccctccttcagagcctctgctcgagggcgcagccccccagccgttcaccacctctgacgatactccttgtcaggaacaaccaaaggaagtgctgaaggctccttccacttccgggctccagcaggttgcatttcagccagggcagaaggtatatgtatggtatggagggcaggaatgcacggggctagtggagcagcacagttggatggaaggccaggtgaccgtgtggctgctggagcagaaattgcaggtctgctgccgagtggaggaagtgtggctggcagagcttcaagggccttgcccccaagcaccccctctggagcccggggcccaggcccttgcctacaggcctgtaagccgtaatattgacgtcccttag

SEQ ID NO: 199287 - DNA, 375 bp, Artificial Sequence
  derived and/or modified sequence
atggcttctgtactcagcagacgactcgggaaacgaagcctgttaggcgctcgagtcctcggaccaagcgcctccgaaggccctagtgccgcaccaccaagcgagcccttgctggaaggggcagcacctcaacctttcacgacatcagacgataccccctgccaggaacagcccaaagaagtattgaaagctccatctacctcaggtctgcagcaggtcgcattccaacctgggcaaaaggtctacgtttggtacggcggacaggagtgcactgggcttgttgagcaacacagctggatggagggccaagtgaccgtgtggctgttagagcagaagctgcaggtgtgctgtagagtagaggaggtttggctgtag

SEQ ID NO: 199288 - DNA, 567 bp, Artificial Sequence
  derived and/or modified sequence
atggccagcgttctgtcccggaggctggggaagaggtcactgctgggcgcccgggtccttggaccatctgcttccgagggccccagcgctgctcccccaagtgaacccctgctagaaggagctgccccacagcctttcacaacctcagacgacactccatgtcaggaacaacccaaggaggtcctcaaagcaccatcaaccagtggtttgcagcaagtggcatttcagccaggacagaaggtgtatgtgtggtacggaggccaggagtgcactggactggtcgaacagcacagctggatggagggacaggtgacagtgtggctactggagcagaaactgcaggtgtgctgtagggtagaagaggtttggctcgcggagctacaggggccatgcccccaggccccacccctcgaaccaggagcccaagcgctggcttatagaccagtgagtaggaacatcgacgtaccaaagcggaaaagtgatgccgtggagatggacgagatgatggctgccatggtgctcacttcactgtcatgttccccggtagttcagtctccgccaggatag

SEQ ID NO: 199289 - DNA, 309 bp, Artificial Sequence
  derived and/or modified sequence
atggccagcgtgctgagccggcggctgggcaaaaggagtctgttaggcgcccgggtgttaggtccttcagcctctgaggggccatccgctgccccgcctagcgaacccctgctagaaggagccgccccacagcctttcacaacctccgatgatacaccatgtcaagagcaacccaaagaagtactgaaagctccttcaacgtccggccttcagcaggttgcttttcaacccggccaaaaggtatatgtctggtatgggggacaggagtgtaccggcctggtggagcaacactcctggatggaagggtag

SEQ ID NO: 199290 - DNA, 1542 bp, Artificial Sequence
  derived and/or modified sequence
atggcctccgtgttgtcccgaagactcggaaagcggtccctcctgggagcccgggtactgggcccaagcgcaagcgagggaccgtctgccgcgcccccgtctgagcctttgctcgagggtgcggctcctcaacctttcactacatccgatgataccccttgccaagagcagccgaaggaggtgttgaaagccccaagcacatccggattgcagcaagtggccttccagcctgggcagaaggtgtatgtctggtacggtgggcaggagtgcactggccttgtggaacagcatagctggatggagggccaggtgacagtgtggctgctggagcagaagttgcaggtctgttgtagggtggaggaggtgtggctggccgagctgcagggcccctgtccacaggctccacccctggagcccggagcccaggcactggcttataggcccgtgtcccgcaatatcgacgtgccaaagcgcaaaagtgatgctgtggagatggatgaaatgatggccgcgatggttctgaccagcctgtcatgctctcccgtggtgcagtctccacctgggactgaagctaatttctcggcatcccgggcagcatgcgatccatggaaggaaagtggggacatatctgactcaggtagctctaccacttcaggtcactggagcggcagcagtggcgtgagcaccccaagtcctcctcatcctcaggcttcccccaagtacctcggagatgccttcgggagccctcagaccgaccacggctttgagaccgacccagatccctttctgctggacgaacccgcccctagaaagaggaagaattctgttaaggtgatgtataagtgcttgtggcccaactgtggcaaggtgcttcggtcgattgtcggcatcaaaagacacgttaaagctctgcatctcggggacacggtggatagcgaccagttcaaaagagaagaggacttttactatacagaggtacagctgaaagaggagtctgccgccgccgcagcggcagcagccgccggaactcctgtccctggaaccccaactagtgagccagcccccacaccctccatgaccggcctgcccttgtcagccctgcccccaccccttcataaggcacagtcatcaggccctgaacaccctggccccgaaagctctctgccctcaggcgctctgagcaagtccgctccagggagcttctggcatatccaggccgaccacgcctatcaggcactcccaagcttccagataccggtgagcccacacatttatacatctgtatcctgggctgctgcccccagtgcagcttgctccctgtccccagtgagatcacgaagcttgtccttcagcgagcctcagcagccagcccctgcaatgaaaagccaccttattgtaacctctccaccccgggctcagagtggggcgagaaaagctaggggcgaagctaaaaagtgtaggaaggtctacgggatcgagcaccgagaccagtggtgcacggcctgtagatggaaaaaggcctgccagcgctttctggactag

SEQ ID NO: 199291 - DNA, 1542 bp, Artificial Sequence
  derived and/or modified sequence
atggcatccgtactgagcaggcgactcggaaaacggtccctccttggcgctcgcgtgttaggtcccagcgccagcgaaggcccctccgcagctccaccttcagagccccttctcgagggggccgcccctcagccattcactacttccgacgatacaccttgccaggagcagcccaaagaggtccttaaggctccatccacgtcagggttacagcaggtcgcattccagcccggacaaaaagtgtatgtttggtacggcggccaggaatgtaccggcctcgtagagcagcacagctggatggaaggccaggttactgtatggttgctggagcaaaagttacaagtgtgctgtcgagtcgaagaagtctggctggcggagctgcaaggcccgtgtccgcaggcacctcctttggagccaggcgcacaggctcttgcataccggcccgtgtcgaggaacatcgacgtccctaagaggaaatccgatgctgtcgagatggacgaaatgatggctgcgatggttctgacatcactatcttgctcgcccgtggtccagtcccctccaggcactgaagccaacttttccgcatcaagggccgcctgtgacccatggaaagagtccggcgatattagcgattccgggtcctcgacaacgagcggtcattggtccggatcatctggtgtatccacacctagcccccctcaccctcaagcaagccccaaatatctcggcgacgcatttggctccccccagactgatcacggctttgaaaccgatcccgacccattcctgctcgatgagccggcacccagaaaaagaaaaaattcagtgaaagttatgtataagtgcctgtggccaaattgtggaaaagttcttcgctcaattgtaggcatcaagcgtcacgtgaaggccttgcaccttggggataccgtggattcggaccagtttaaacgcgaggaggacttctactatacggaggtgcaactgaaggaggagagtgcagcagcagctgcagcggccgcggctggcacccccgtccccggcactccaacctcagaaccggccccgactccgagtatgacgggtctcccactgtcagcactccccccacccctgcacaaggcacaatcctctggccccgagcatcctggacctgagtcgagtctcccatccggagcactttctaaatccgcccctggctctttctggcacattcaagctgatcacgcataccaggccctcccaagtttccagatccctgtgtccccccatatatacacttctgtatcatgggccgctgccccatccgctgcctgttctctttctccagttaggtctaggagcctgtcctttagcgagccccagcagcctgcacctgcgatgaagtcccaccttatcgtaacaagtccaccacgcgctcagtccggtgctcgcaaggcacgcggggaggctaagaagtgcaggaaggtctacgggatcgaacaccgtgatcagtggtgcaccgcatgccgatggaagaaggcctgtcagcgctttctggattag

SEQ ID NO: 199292 - DNA, 1542 bp, Artificial Sequence
  derived and/or modified sequence
atggcctctgtgctgagccggcggctgggcaagaggagcctgctgggcgcccgggtgctgggccccagcgccagcgagggccccagcgctgccccacccagcgagcccctgctggagggcgccgccccccagcccttcaccaccagtgatgacaccccctgccaggagcagcccaaggaggtgctgaaggcccccagcaccagcggcctgcagcaggtggccttccagcccggccagaaggtgtatgtgtggtatggaggccaggagtgcaccggcctggtggagcagcacagctggatggagggccaggtgacagtgtggctgctggagcagaagctgcaggtgtgctgccgggtggaggaggtgtggctggccgagctgcagggcccctgcccccaggccccacccctggagcccggggcccaggccctggcctacagacctgtgtccagaaatattgatgtgcccaagaggaagagtgatgctgtggagatggatgagatgatggccgccatggtgctgaccagcctgagctgcagccctgtggtgcagagccccccaggcacagaggccaacttcagcgccagccgggccgcctgtgacccctggaaggagagcggggacatcagtgacagcggcagcagcaccaccagcggccactggagcggcagcagtggagtgtccacccccagccccccccacccccaggccagccccaagtacctgggagatgccttcggcagcccccagacagaccacggctttgaaacagatcctgaccccttcctgctggatgagcccgcccccaggaagaggaagaacagcgtgaaggtgatgtacaagtgcctgtggcccaactgtgggaaggtgctgcggagcatcgtgggcatcaagagacatgtgaaggccctgcacctgggggacacagtggacagcgaccagttcaagcgggaggaggacttctactacacagaggtgcagctgaaggaggagagcgctgctgctgctgctgctgctgctgctggcacccctgtgcccggcacccccaccagcgagcccgcccccacccccagcatgacaggcctgcccctgagcgccctgcccccacccctgcacaaggcccagagcagcggccctgagcaccctggccctgagagcagcctgcccagcggggccctgagcaagagcgcccctggcagcttctggcacatccaggccgaccacgcctaccaggccctgcccagcttccagatccctgtgagcccccacatctacacctctgtgtcctgggccgccgcccccagcgctgcctgcagcctgagccctgtgcgcagccgcagcctgtccttcagcgagccccagcagcctgccccagccatgaagagccacctgattgtgaccagccccccccgggcccagagcggggccaggaaggcccggggggaggccaagaagtgcaggaaggtgtatggcatcgagcaccgggaccagtggtgcacagcctgccgctggaagaaggcctgccagcgcttcctggactag

SEQ ID NO: 199293 - DNA, 471 bp, Artificial Sequence
  derived and/or modified sequence
atggcctctgtgctgagccggcggctgggcaagaggagcctgctgggcgcccgggtgctgggccccagcgccagcgagggccccagcgctgccccacccagcgagcccctgctggagggcgccgccccccagcccttcaccaccagtgatgacaccccctgccaggagcagcccaaggaggtgctgaaggcccccagcaccagcggcctgcagcaggtggccttccagcccggccagaaggtgtatgtgtggtatggaggccaggagtgcaccggcctggtggagcagcacagctggatggagggccaggtgacagtgtggctgctggagcagaagctgcaggtgtgctgccgggtggaggaggtgtggctggccgagctgcagggcccctgcccccaggccccacccctggagcccggggcccaggccctggcctacagacctgtgtccagaaatattgatgtgccctag

SEQ ID NO: 199294 - DNA, 375 bp, Artificial Sequence
  derived and/or modified sequence
atggcctctgtgctgagccggcggctgggcaagaggagcctgctgggcgcccgggtgctgggccccagcgccagcgagggccccagcgctgccccacccagcgagcccctgctggagggcgccgccccccagcccttcaccaccagtgatgacaccccctgccaggagcagcccaaggaggtgctgaaggcccccagcaccagcggcctgcagcaggtggccttccagcccggccagaaggtgtatgtgtggtatggaggccaggagtgcaccggcctggtggagcagcacagctggatggagggccaggtgacagtgtggctgctggagcagaagctgcaggtgtgctgccgggtggaggaggtgtggctgtag

SEQ ID NO: 199295 - DNA, 567 bp, Artificial Sequence
  derived and/or modified sequence
atggcctctgtgctgagccggcggctgggcaagaggagcctgctgggcgcccgggtgctgggccccagcgccagcgagggccccagcgctgccccacccagcgagcccctgctggagggcgccgccccccagcccttcaccaccagtgatgacaccccctgccaggagcagcccaaggaggtgctgaaggcccccagcaccagcggcctgcagcaggtggccttccagcccggccagaaggtgtatgtgtggtatggaggccaggagtgcaccggcctggtggagcagcacagctggatggagggccaggtgacagtgtggctgctggagcagaagctgcaggtgtgctgccgggtggaggaggtgtggctggccgagctgcagggcccctgcccccaggccccacccctggagcccggggcccaggccctggcctacagacctgtgtccagaaatattgatgtgcccaagaggaagagtgatgctgtggagatggatgagatgatggccgccatggtgctgaccagcctgagctgcagccctgtggtgcagagccccccaggatag

SEQ ID NO: 199296 - DNA, 309 bp, Artificial Sequence
  derived and/or modified sequence
atggcctctgtgctgagccggcggctgggcaagaggagcctgctgggcgcccgggtgctgggccccagcgccagcgagggccccagcgctgccccacccagcgagcccctgctggagggcgccgccccccagcccttcaccaccagtgatgacaccccctgccaggagcagcccaaggaggtgctgaaggcccccagcaccagcggcctgcagcaggtggccttccagcccggccagaaggtgtatgtgtggtatggaggccaggagtgcaccggcctggtggagcagcacagctggatggagggctag

SEQ ID NO: 199297 - DNA, 1542 bp, Artificial Sequence
  derived and/or modified sequence
atggccagcgtgctgagccggcggctgggcaagcggagcctgctgggggctagagtgcttgggccatccgcaagcgaaggaccaagcgctgccccgccttctgaaccactgctagagggcgctgcgccacagccattcactaccagcgatgacacaccttgtcaagagcagcctaaggaagtgctgaaggctcccagcacctcagggctgcagcaggtcgcatttcagccggggcagaaagtctacgtgtggtacggggggcaggaatgcacaggcctggtagagcagcattcgtggatggagggtcaggtcacagtatggctgcttgagcaaaagttgcaagtatgttgtcgggtggaggaggtgtggctcgcagaattgcaaggcccttgcccccaggcgccccctctcgagccaggcgcccaggctctggcctatagacccgtgagcagaaatatcgatgtgcctaagcggaaaagcgacgccgtcgagatggatgagatgatggccgccatggtattaacatcactctcgtgtagcccagtggtgcagagcccacccggcaccgaggccaacttctcggcaagtcgtgctgcctgcgatccttggaaagagagcggagatatctctgacagcggctcgagcaccacgagcggccactggtctggctctagtggtgtgtctaccccttcaccaccgcacccacaggcttcccccaaatacctcggagacgcgttcgggtctccgcagacggaccacggattcgaaacggatcctgacccatttttgctcgacgaaccagcaccaagaaaacgaaagaactctgtgaaagtgatgtataaatgcctctggccaaattgtgggaaggtcttacggagcattgttggaattaaaaggcatgtgaaagcccttcacctcggggatacagttgacagtgaccaattcaagcgggaggaggatttctattacacagaggtccagctgaaagaagaatcagccgccgccgccgcagccgctgccgctggtacacccgtacctggcacacccacatcagaacctgctcctaccccaagcatgactggcctcccgctgtctgcactgcctcccccccttcacaaagcgcagtcaagtgggcccgaacaccccggaccagagtcaagcctgccctctggagcactctcaaaaagcgcaccggggtcgttttggcacattcaagctgatcatgcctaccaggctcttcccagcttccagattcctgtttcgcctcatatttatacttcagtgtcttgggctgcagcccctagcgcagcgtgttcattgtcacccgttaggtcccgatccctgtctttttcagaaccccagcagcccgctcccgctatgaagtcacacttgattgtcacatcacctcccagagcccagagtggtgccagaaaggcacgaggcgaagctaaaaagtgtaggaaagtctatggcattgagcacagagatcaatggtgtacagcctgccgctggaagaaagcatgccagcgtttcttagactag

SEQ ID NO: 199298 - DNA, 471 bp, Artificial Sequence
  derived and/or modified sequence
atggccagcgtgctgagccggcggctgggcaagcggagcctgctgggagctagggtcctgggacccagcgcatctgagggacctagcgctgctcctccttctgagccactgctggaaggtgcagcaccccaaccatttacaacctcagacgacactccatgccaggagcagcctaaagaggtgctgaaggcccccagcacaagcgggctccagcaggtggcattccagccaggccaaaaagtgtacgtatggtatggcgggcaggagtgtaccggactggttgaacagcattcttggatggagggacaggttacagtctggcttctggaacagaagcttcaggtctgctgcagggtggaagaggtgtggctcgccgagctccagggcccctgtccccaggcaccccccctagaacccggcgctcaggcacttgcataccggccggtctccagaaacatagatgttccctag

SEQ ID NO: 199299 - DNA, 375 bp, Artificial Sequence
  derived and/or modified sequence
atggccagcgtgctgagccggcggctgggcaagcggagcctgctgggcgcgcgtgtgctgggaccgtctgcctctgagggaccgtcagccgccccccctagcgaacccttgttggaaggagcggcaccgcagcccttcaccacttccgatgacacaccctgccaggagcagcccaaagaggtgctcaaagcccccagcactagtggcctgcagcaggttgctttccagcccgggcagaaggtctatgtttggtacggcggacaagaatgtactggactagtcgagcaacatagttggatggaagggcaagtaacggtatggctactggagcagaaactgcaggtttgttgccgggtcgaggaagtctggctgtag

SEQ ID NO: 199300 - DNA, 567 bp, Artificial Sequence
  derived and/or modified sequence
atggccagcgtgctgagccggcggctgggcaagcggagcctgctgggcgctagagtgctggggccttctgcctcagagggaccctctgcagcacctccttctgagcccctccttgaaggcgccgctccccagccatttaccaccagtgacgacactccttgtcaggaacagcccaaagaagtactgaaggctcctagtacatcaggactgcagcaggttgcttttcagcccgggcagaaggtgtacgtttggtacggaggtcaagagtgtacaggcctggttgaacagcattcatggatggaaggccaggtgacagtgtggctacttgagcagaaactccaagtatgttgtagagtcgaggaagtgtggctcgccgagctgcaaggcccgtgtccccaggcacctcccctagaacccggtgctcaggccctggcctatcgccccgtctctcgaaatatcgatgtgcctaaaagaaaatccgatgccgtggagatggatgaaatgatggcggcaatggttttgacatcactgagttgctccccggttgtgcagagccccccaggctag

SEQ ID NO: 199301 - DNA, 309 bp, Artificial Sequence
  derived and/or modified sequence
atggccagcgtgctgagccggcggctgggcaagcggagcctgctgggcgcccgggtgcttggcccctccgccagcgaaggcccttcagctgctccacccagtgagcctctgctagaaggcgcagcccctcagccatttaccaccagtgacgataccccctgccaagaacagccgaaagaagtcctaaaggccccttctacgtcaggactccagcaggttgcattccaacctggccagaaggtatacgtgtggtatggggggcaagagtgcaccgggctggtggagcagcacagctggatggaaggttag

SEQ ID NO: 199302 - DNA, 1542 bp, Artificial Sequence
  derived and/or modified sequence
atggccagcgtgctgagccggcggctgggcaagcggagcctgctgggcgccagagtgcttgggccttccgccagtgaaggcccctctgccgctccgcctagtgaaccccttctggagggcgcagctccacaacctttcaccacaagtgatgataccccttgtcaggaacagccaaaggaagtgttgaaggccccaagtacttctggccttcaacaagtagcctttcagccaggtcaaaaggtctacgtctggtacggtgggcaagaatgtactggacttgtggagcagcattcttggatggaaggacaagtcactgtctggcttctggaacagaaattgcaggtctgttgcagggttgaggaagtgtggctggcagagcttcaggggccgtgtccccaggcccctcctcttgaacccggcgcccaagccctcgcgtaccgcccagttagccggaatatcgacgttccaaagcgcaaatcagacgccgttgagatggacgagatgatggcagctatggtgctaacctcactgtcttgtagcccggtggtgcagtcccctcctggcacagaagcaaatttctctgcctctcgagctgcatgcgacccttggaaggaatcaggcgacatatccgattctggcagttccaccacaagtggacattggtccggctcttctggggtatccacgccttccccaccccacccgcaggcatctcccaaatatctgggtgacgcatttgggtctccacaaacggatcacggtttcgaaaccgatccagatcctttcctgctggatgagccggccccgcgaaagcgtaaaaacagcgtgaaagttatgtacaagtgtctttggcccaactgcgggaaggtgctgaggtctatcgtaggaataaaaagacacgtcaaagctctgcacttgggcgacacagtggattccgaccaatttaagcgcgaagaggatttctattatacggaggtccagctcaaagaggaatctgccgcagctgctgctgccgctgcagccggaactcccgtgcccgggacccctacgtccgaaccagcccccacacccagtatgacgggcttgccactgtccgctttgcctccaccacttcataaagcccaaagttcagggcctgagcacccgggtccagagtcaagccttccctctggggcactctctaaaagcgcgcctggttctttttggcacatccaggccgatcatgcttatcaggcacttccttcatttcaaattcccgtgagtccccatatctacacaagcgtgtcttgggctgcagcccctagcgcagcttgttcccttagtccagtgaggagccgcagcctcagcttttccgaaccccagcagcccgctcctgccatgaagagccacttgatcgtgacaagccccccacgcgcccagtcgggggcaagaaaggcccgcggcgaagccaaaaaatgtaggaaagtgtacggtattgagcacagagaccaatggtgcaccgcatgcaggtggaaaaaggcttgtcaacgctttctcgactag

SEQ ID NO: 199303 - DNA, 1542 bp, Artificial Sequence
  derived and/or modified sequence
atggccagcgtgctgagccggcggctgggcaagcggagcctgctgggggcacgggtgctgggacctagcgccagtgaagggccctcagcagccccccctagcgaacccctgcttgagggtgccgccccacagccattcaccaccagtgacgacacaccgtgccaagagcagccaaaagaggtgctgaaagccccatcgacgtctggattacagcaggtcgccttccagcccgggcagaaagtgtacgtgtggtacgggggccaggaatgcacaggtctcgtcgaacaacactcttggatggagggccaggtcacagtctggctcctggaacagaaactgcaggtgtgctgccgcgttgaagaagtgtggctcgcggagctacagggtccttgtccacaggcgccaccactagagcctggtgcacaggcactagcatatcggccggtcagcagaaacatcgatgtgcctaaaagaaaatcagatgccgtagagatggacgagatgatggcagcgatggtcctgacctcactatcctgctcccccgtcgtgcagagcccccctgggacagaggccaatttctctgctagccgggctgcctgcgatccttggaaagagtccggggatatctctgacagcgggagctctacaacaagcggacattggagcggatcctctggcgtgagcactccctctccaccacatccgcaagcgagccctaaatacttgggagatgcctttggtagcccacagacagatcacggattcgagacagacccagaccccttcctactggacgagcccgctcccagaaagaggaagaattcggtgaaggtaatgtataagtgtctgtggccaaattgcggaaaagtgttaaggtccattgtggggatcaagagacacgtcaaagcgctgcatctgggcgacacggtggactcagatcaattcaagcgagaagaagatttttactatactgaggtgcagctcaaagaggagagcgctgctgccgcggcagcagcagccgctggtaccccagtgcccggaacccccacctccgagccagctccaacaccatccatgaccggcctgcctctgtccgccctcccccctccactgcataaagcacagtcctctggtcccgagcacccgggaccggaatccagcctgcccagcggcgccctctccaaaagtgctccgggaagcttttggcacatccaggcagatcacgcctaccaagcactccccagctttcaaattcccgtgtcacctcacatttatacttctgtcagttgggcggccgccccaagtgcggcatgcagcctgtcacctgtcagatctcgatcactctcatttagtgagcctcaacagccggctcctgccatgaagtctcacttgatagtcacttctcctccgagagctcagagcggagccagaaaggctcggggagaggccaagaagtgtagaaaagtttacggaatcgagcaccgggaccaatggtgcactgcatgtagatggaagaaggcttgccagcgcttcctggactag

SEQ ID NO: 199304 - DNA, 1542 bp, Artificial Sequence
  derived and/or modified sequence
atggcgagcgtgttgtcaagacgcttgggaaagcggtccctcttgggtgccagagtcctcgggccatccgcttctgaagggccatccgcggcaccaccttctgagccgcttctggagggtgctgcaccgcagcccttcacaacatcagacgatacgccatgtcaggaacagcccaaagaagtccttaaggccccatccacatcaggcctccagcaggtggcattccagcccggacaaaaagtttatgtgtggtacggtgggcaggagtgtaccgggctggtcgaacaacactcttggatggagggtcaggtcacagtgtggctcctcgagcaaaagctccaggtctgctgtagggtcgaggaagtttggctcgctgaactgcaagggccatgtcctcaggcgcctcccttggagcccggtgcccaggccctggcttatcgtccagtttcccgaaacatcgatgtgccaaaacgaaagtccgacgccgtggaaatggacgaaatgatggccgcaatggtgctgacttcacttagctgttcacctgtggtgcaatcaccacccggtactgaagctaacttttctgcttctcgtgccgcatgtgacccctggaaggagagtggtgacatctccgactcaggatcttccacgacgtctggccattggagcggatcctcaggtgtgagtaccccctcccctccacatccacaggcatctcctaagtatctgggcgacgcgttcggctctcctcagaccgaccacggattcgagacagaccctgatccctttctgctggatgaaccggctcccagaaagcggaaaaactcagtcaaagtgatgtacaagtgcctgtggcccaactgtggaaaggtgctcaggtcgatcgtgggaattaagcggcacgtaaaggccttgcacctaggagacactgtggattcagaccaatttaagagggaagaggatttttactatactgaggtccagctgaaggaagagtctgccgcagcggctgctgcagcggcagctggaacgcctgtacccggtacgccaaccagcgagccagccccaacccctagcatgaccggcctgccattaagcgctctgccacctccacttcataaggcgcagtcaagcggaccggagcaccctggccctgaatcgtccctgcccagtggcgctctgagtaaaagcgctccagggtccttttggcacatccaggctgaccacgcataccaggccctgccttcctttcagatcccagtttcaccgcatatctacacaagcgtttcatgggcagccgcacctagcgcagcttgctcccttagcccagtgcggtccagatccctatcattctcagagccccagcagccagctcctgctatgaaatcccatctgatcgtgacttctcctccccgagcccaaagcggtgcaagaaaagctaggggtgaggctaaaaaatgccgaaaggtgtatggaattgagcaccgggaccagtggtgcacagcatgtagatggaagaaagcttgccaacggtttttagactag

SEQ ID NO: 199305 - DNA, 471 bp, Artificial Sequence
  derived and/or modified sequence
atggcgtcggtgctttcgagacgtctcgggaaacgatccttactgggcgcacgggtcctcggtccttctgccagcgagggtccatcggccgctcccccttctgagccactcctcgagggcgcagcaccacagccattcactacaagcgacgacactccttgccaggaacagcccaaggaggtcctcaaagccccaagtacttcaggacttcagcaggttgccttccagcctggccagaaggtgtacgtctggtatggcggtcaggaatgcacagggttggtagaacagcactcatggatggaagggcaggttacagtctggctgctggagcaaaagctccaggtctgctgcagagtcgaggaagtgtggcttgcggagctccaagggccttgccctcaggcaccccctctagagccaggcgctcaggccctggcttacaggccagtatcccgtaatattgacgtgccgtag

SEQ ID NO: 199306 - DNA, 375 bp, Artificial Sequence
  derived and/or modified sequence
atggcttctgtgctcagccggagattggggaagcggtcgctgttgggtgcacgtgtgctcggcccttccgccagtgaaggcccatccgccgctccccctagtgagccattactcgaaggcgctgcgcctcaaccttttactacgagcgatgataccccctgccaggaacagcccaaagaagtgctgaaagcaccgtccacgagcggcctgcagcaggttgccttccagcctggccagaaagtctacgtgtggtatgggggtcaagaatgtactggcctagttgagcaacatagctggatggaaggtcaagtcacagtctggttgctggagcaaaaactgcaagtttgctgcagagtggaggaggtgtggctctag

SEQ ID NO: 199307 - DNA, 567 bp, Artificial Sequence
  derived and/or modified sequence
atggcctccgttctttcgagacgactgggaaagaggtctctgttgggggctcgcgttctcggacccagtgcttccgaagggcctagtgcagcccctccctccgaacctctgctcgaaggcgctgcacctcagccatttactacgtctgacgataccccatgccaggagcagcctaaggaagtccttaaggccccttctacatcagggctgcaacaggtcgcattccagcctggtcaaaaggtttatgtctggtatggtgggcaggaatgcaccggactcgtggagcagcattcatggatggaaggacaggtgactgtatggctacttgagcagaaactccaggtgtgctgcagagttgaagaggtgtggttggccgaactccagggaccctgcccacaagctcccccacttgaaccaggggcacaggcccttgcatatcggcctgtctcaagaaacattgacgtgcctaaacggaaaagcgacgctgttgaaatggacgaaatgatggccgctatggtgctaacatcactgtcttgtagccccgtggtccagtcaccccctggctag

SEQ ID NO: 199308 - DNA, 309 bp, Artificial Sequence
  derived and/or modified sequence
atggcaagcgtcttaagcagaagactaggaaagcgctcattactcggcgcaagggttctgggacctagcgcaagtgagggaccttcagccgctcctccctcagaacccctgctcgagggcgcagctcctcagccatttacaactagcgatgatacaccctgtcaggagcagcccaaagaggttctaaaagccccaagtacaagtggtttacagcaggtggcgttccaacctggtcagaaagtgtacgtatggtacgggggacaggagtgtaccggcctggtggaacagcattcctggatggaaggttag

SEQ ID NO: 199309 - DNA, 1542 bp, Artificial Sequence
  derived and/or modified sequence
atggccagcgtcctgtcaagacgcttagggaagagatcactgctgggggcaagagttctcggaccttccgcatcagaaggcccttccgccgctcctccgagcgaacccctgctggagggcgctgcccctcagccttttacgacaagcgacgacacaccttgtcaggagcagccaaaggaagtgctcaaagccccttccaccagcggcttgcaacaagtcgcgtttcagccagggcagaaggtatacgtctggtatggcggacaggagtgcacaggcctcgtcgaacagcattcctggatggagggtcaagtcacagtctggctgctcgaacagaagctacaggtttgttgtagagtagaagaggtctggctcgcagagttgcagggaccctgtccccaggcgccacctctggaacccggagctcaggcattagcttataggcctgtgtctcggaacattgatgtgccaaaacgcaaatctgatgctgtggagatggatgaaatgatggccgcaatggtgctgaccagtctctcgtgttctcccgtggtccagtccccccctgggaccgaggcgaattttagtgccagtcgcgctgcctgtgacccttggaaggagagcggagacatcagcgactccggctctagcacaacaagcgggcactggtctggcagtagtggagttagcacaccgtcacccccacaccctcaggcctccccaaaatatctgggagacgcctttggcagtcctcagacagaccatggcttcgagaccgatcctgacccttttctgctggatgaaccagcgcctagaaagagaaaaaactcagtaaaggtcatgtataaatgcctttggcctaattgtgggaaagttcttagaagcattgtgggcatcaagagacacgtgaaggcgctgcacctcggcgacaccgtcgactccgaccagttcaaacgggaagaggacttctactatacagaagttcagctgaaggaggagagcgcagcagccgcagctgccgcagcggcaggaacccccgtgcccggtacacctactagcgaacctgcacccacgcctagcatgacaggcctccccctcagtgctcttccccctccattacacaaagctcaaagtagcggtccagaacatccagggccagagtcgtccctcccgtcaggagccctgtccaagtcagccccaggtagtttttggcatattcaggccgaccatgcatatcaggccctacccagcttccaaatacctgtgagcccacacatttacaccagcgtcagttgggccgctgccccatccgctgcctgttctctcagccccgtgcgatccagatctcttagtttcagtgaaccccagcagcccgcacctgccatgaaatcacacttaatcgtcacttctccccctcgcgctcagtccggtgccagaaaagcgaggggcgaggccaagaagtgtagaaaggtgtacgggattgagcacagggaccagtggtgtaccgcctgtcggtggaagaaggcctgtcagaggttccttgattag

SEQ ID NO: 199310 - DNA, 1542 bp, Artificial Sequence
  derived and/or modified sequence
atggcgagcgtgctgtcacgccgactggggaaacggtccctcctgggggcacgggtcttgggaccatctgcgtctgaagggccttccgctgcaccgccttctgagcctctgctggaaggcgcagcaccccagcccttcaccactagcgacgacactccttgtcaggagcagcccaaagaggtgttaaaggctcccagcacgtcaggcttgcagcaggtggcctttcaaccagggcagaaagtctacgtctggtacgggggacaggagtgcactggacttgtcgagcagcacagttggatggagggacaggtgaccgtgtggctgctggagcagaagttgcaggtgtgctgccgcgttgaagaggtttggctggctgagttacaagggccatgtccccaagctcctccccttgagcctggtgcccaagcgcttgcgtatagacctgtgagccggaatattgacgtccccaaaagaaagtcggatgcagtagagatggacgagatgatggccgctatggtgctgactagcttgagctgcagcccagttgtccagtctccacccggaacggaggccaacttttctgcaagtagagccgcttgcgatccctggaaagagtccggcgacatatctgacagcggcagctcaacaaccagcggacactggtctggctcaagtggtgtctctactccttcacctccccatccccaggcaagtcccaaatacttaggagacgcattcggcagcccccagacagaccacggattcgagacagatccggatcctttcctgctcgatgaaccagcacctaggaagcgtaaaaattccgtgaaggtcatgtataaatgtctgtggcccaattgtgggaaggtactgcgtagcatcgttggcattaagcggcatgtgaaagcactccacctcggtgataccgttgacagcgatcaattcaagcgagaggaagacttttattacactgaagttcaattgaaggaggagtctgccgctgccgcagccgctgcagcggctggtacccctgtgcctggcactccgacatcagagcccgcacctacaccatctatgaccggcctgccactttcggcactcccacccccactgcacaaagcacagagcagcggacccgaacacccgggtcccgagtcaagcctgccctcaggcgctctttctaagtctgctccgggtagcttctggcacatacaggccgatcatgcttatcaggccctgccttcttttcagatccccgtgtccccgcacatctatacttcagtaagttgggcggctgcccctagcgccgcttgtagtctaagtcccgtacgctccaggtccctgtcattctcagagccccagcaacctgctcccgcaatgaaatcccatcttattgttacgagtcctccccgagcacaatctggagcccgaaaagctcgaggtgaggccaagaagtgtaggaaggtatacggtatcgaacatcgagaccagtggtgcactgcgtgccgttggaaaaaagcttgtcagcgttttctggattag

SEQ ID NO: 199311 - DNA, 703 bp, Artificial Sequence
  derived and/or modified sequence
gcgaggagtcgctcgggcacttattgagcgccgactgtctacgggcggccggggacagtcttgcactgtttcctaggctggagtgcagtggcacaatcacagctcactgcagccttgacttccccaggctcaagccattctcctacctcagcctcccaagcagttgggaccacaggtgatgggcagaggcttcagtgtccccttcgcctccgcaggagaggagaggcagcagcatggcgagtgtcctgtcccgacgccttggaaagcggtccctcctgggagcccgggtgttgggacccagtgcctcggaggggccctcggctgccccaccctcggagccactgctagaaggggccgctccccagcctttcaccacctctgatgacaccccctgccaggagcagcccaaggaagtccttaaggctcccagcacctcgggccttcagcaggtggcctttcagcctgggcagaaggtttatgtgtggtacgggggtcaagagtgcacaggactggtggagcagcacagctggatggagggtcaggtgaccgtctggctgctggagcagaagctgcaggtctgctgcagggtggaggaggtgtggctggcagagctgcagggcccctgtccccaggcaccacccctggagcccggagcccaggccctggcctacaggcccgtctccaggaacatcgatgtcccaaa

SEQ ID NO: 199312 - DNA, 584 bp, Artificial Sequence
  derived and/or modified sequence
acttattgagcgccgactgtctacgggcggccgggggcctgagccgcgccttgctgctgggtctccacttgtggggaagagagaactggaccaggacagcgcgggaaactgacaatgccactgcttgctagctttgggattttggacaaataggtgatgggcagaggcttcagtgtccccttcgcctccgcaggagaggagaggcagcagcatggcgagtgtcctgtcccgacgccttggaaagcggtccctcctgggagcccgggtgttgggacccagtgcctcggaggggccctcggctgccccaccctcggagccactgctagaaggggccgctccccagcctttcaccacctctgatgacaccccctgccaggagcagcccaaggaagtccttaaggctcccagcacctcgggccttcagcaggtggcctttcagcctgggcagaaggtttatgtgtggtacgggggtcaagagtgcacaggactggtggagcagcacagctggatggagggtcaggtgaccgtctggctgctggagcagaagctgcaggtctgctgcagggtggaggaggtgtggctgg

SEQ ID NO: 199313 - DNA, 699 bp, Artificial Sequence
  derived and/or modified sequence
gtcttgcactgtttcctaggctggagtgcagtggcacaatcacagctcactgcagccttgacttccccaggctcaagccattctcctacctcagcctcccaagcagttgggaccacaggagaggagaggcagcagcatggcgagtgtcctgtcccgacgccttggaaagcggtccctcctgggagcccgggtgttgggacccagtgcctcggaggggccctcggctgccccaccctcggagccactgctagaaggggccgctccccagcctttcaccacctctgatgacaccccctgccaggagcagcccaaggaagtccttaaggctcccagcacctcgggccttcagcaggtggcctttcagcctgggcagaaggtttatgtgtggtacgggggtcaagagtgcacaggactggtggagcagcacagctggatggagggtcaggtgaccgtctggctgctggagcagaagctgcaggtctgctgcagggtggaggaggtgtggctggcagagctgcagggcccctgtccccaggcaccacccctggagcccggagcccaggccctggcctacaggcccgtctccaggaacatcgatgtcccaaagaggaagtcggacgcagtggaaatggatgagatgatggcggccatggtgctgacgtccctgtcctgcagccctgttgtacagagtcctcccgg

SEQ ID NO: 199314 - DNA, 501 bp, Artificial Sequence
  derived and/or modified sequence
ggagccgggccgcgggccgcgccgggagggcgggcagggccgcggccgctgcagcccggagctgagctagccgtccgagccgagccgtccgagccggggaagccgggcgcgtgctgccgctcgtggcgggccgaggtgatgggcagaggcttcagtgtccccttcgcctccgcaggagaggagaggcagcagcatggcgagtgtcctgtcccgacgccttggaaagcggtccctcctgggagcccgggtgttgggacccagtgcctcggaggggccctcggctgccccaccctcggagccactgctagaaggggccgctccccagcctttcaccacctctgatgacaccccctgccaggagcagcccaaggaagtccttaaggctcccagcacctcgggccttcagcaggtggcctttcagcctgggcagaaggtttatgtgtggtacgggggtcaagagtgcacaggactggtggagcagcacagctggatggagggtca

SEQ ID NO: 199315 - DNA, 1790 bp, Artificial Sequence
  derived and/or modified sequence
gctagccgtccgagccgagccgtccgagccggggaagccgggcgcgtgctgccgctcgtggcgggccgaggagaggagaggcagcagcatggcgagtgtcctgtcccgacgccttggaaagcggtccctcctgggagcccgggtgttgggacccagtgcctcggaggggccctcggctgccccaccctcggagccactgctagaaggggccgctccccagcctttcaccacctctgatgacaccccctgccaggagcagcccaaggaagtccttaaggctcccagcacctcgggccttcagcaggtggcctttcagcctgggcagaaggtttatgtgtggtacgggggtcaagagtgcacaggactggtggagcagcacagctggatggagggtcaggtgaccgtctggctgctggagcagaagctgcaggtctgctgcagggtggaggaggtgtggctggcagagctgcagggcccctgtccccaggcaccacccctggagcccggagcccaggccctggcctacaggcccgtctccaggaacatcgatgtcccaaagaggaagtcggacgcagtggaaatggatgagatgatggcggccatggtgctgacgtccctgtcctgcagccctgttgtacagagtcctcccgggaccgaggccaacttctctgcttcccgtgcggcctgcgacccatggaaggagagtggtgacatctcggacagcggcagcagcactaccagcggtcactggagtgggagcagtggtgtctccaccccctcgcccccccacccccaggccagccccaagtatttgggggatgcttttggttctccccaaactgatcatggctttgagaccgatcctgaccctttcctgctggacgaaccagctccacgaaaaagaaagaactctgtgaaggtgatgtacaagtgcctgtggccaaactgtggcaaagttctgcgctccattgtgggcatcaaacgacacgtcaaagccctccatctgggggacacagtggactctgatcagttcaagcgggaggaggatttctactacacagaggtgcagctgaaggaggaatctgctgctgctgctgctgctgctgccgcaggcaccccagtccctgggactcccacctccgagccagctcccacccccagcatgactggcctgcctctgtctgctcttccaccacctctgcacaaagcccagtcctccggcccagaacatcctggcccggagtcctccctgccctcaggggctctcagcaagtcagctcctgggtccttctggcacattcaggcagatcatgcataccaggctctgccatccttccagatcccagtctcaccacacatctacaccagtgtcagctgggctgctgccccctccgccgcctgctctctctctccggtccggagccggtcgctaagcttcagcgagccccagcagccagcacctgcgatgaaatctcatctgatcgtcacttctccaccccgggcccagagtggtgccaggaaagcccgaggggaggctaagaagtgccgcaaggtgtatggcatcgagcaccgggaccagtggtgcacggcctgccggtggaagaaggcctgccagcgctttctggactgagctgtgctgcaggttctactctgttcctggccctgccggcagccactgacaagaggccagtgtgtcaccagccctcagcagaaaccgaaagagaaagaacggaaacacggagtttgggctctgttggctaaggtgtaacacttaaagcaattttctccca

SEQ ID NO: 199316 - DNA, 2068 bp, Artificial Sequence
  derived and/or modified sequence
ctgcacagggagtttgtcttgtgcaaacaatttccaaggcagcgttttcttccctgcctgggagtgcagggctcagcgccttcactttggaactgactcagagacctaaagaagcccacctggccagcgggaaggggggccgccgccgcctcccggttttgggcagccctggccagctccctgtggccttggaggacttccaccgggcaggcgttcccatgatgccaggctaccaggcgcgggggattcctgcaggccggcgctgcttttcttagaaccccctttctagaaaagtacacctgggggttttgcttcaaagagaggagaggcagcagcatggcgagtgtcctgtcccgacgccttggaaagcggtccctcctgggagcccgggtgttgggacccagtgcctcggaggggccctcggctgccccaccctcggagccactgctagaaggggccgctccccagcctttcaccacctctgatgacaccccctgccaggagcagcccaaggaagtccttaaggctcccagcacctcgggccttcagcaggtggcctttcagcctgggcagaaggtttatgtgtggtacgggggtcaagagtgcacaggactggtggagcagcacagctggatggagggtcaggtgaccgtctggctgctggagcagaagctgcaggtctgctgcagggtggaggaggtgtggctggcagagctgcagggcccctgtccccaggcaccacccctggagcccggagcccaggccctggcctacaggcccgtctccaggaacatcgatgtcccaaagaggaagtcggacgcagtggaaatggatgagatgatggcggccatggtgctgacgtccctgtcctgcagccctgttgtacagagtcctcccgggaccgaggccaacttctctgcttcccgtgcggcctgcgacccatggaaggagagtggtgacatctcggacagcggcagcagcactaccagcggtcactggagtgggagcagtggtgtctccaccccctcgcccccccacccccaggccagccccaagtatttgggggatgcttttggttctccccaaactgatcatggctttgagaccgatcctgaccctttcctgctggacgaaccagctccacgaaaaagaaagaactctgtgaaggtgatgtacaagtgcctgtggccaaactgtggcaaagttctgcgctccattgtgggcatcaaacgacacgtcaaagccctccatctgggggacacagtggactctgatcagttcaagcgggaggaggatttctactacacagaggtgcagctgaaggaggaatctgctgctgctgctgctgctgctgccgcaggcaccccagtccctgggactcccacctccgagccagctcccacccccagcatgactggcctgcctctgtctgctcttccaccacctctgcacaaagcccagtcctccggcccagaacatcctggcccggagtcctccctgccctcaggggctctcagcaagtcagctcctgggtccttctggcacattcaggcagatcatgcataccaggctctgccatccttccagatcccagtctcaccacacatctacaccagtgtcagctgggctgctgccccctccgccgcctgctctctctctccggtccggagccggtcgctaagcttcagcgagccccagcagccagcacctgcgatgaaatctcatctgatcgtcacttctccaccccgggcccagagtggtgccaggaaagcccgaggggaggctaagaagtgccgcaaggtgtatggcatcgagcaccgggaccagtggtgcacggcctgccggtggaagaaggcctgccagcgctttctggactgagctgtgctgcaggttctactctgttcctggccctgccggcagccactgacaagaggccagtgtgtcaccagccctcagcagaaaccgaaagagaaagaacggaaacacggagtttgggctctgttggctaaggtgtaacacttaaagcaattttctcccattgtgcgaacattttattttttaaaaaaaa

SEQ ID NO: 199317 - protein, 36 aa, Artificial Sequence
  derived and/or modified sequence
QRYFCRVRGGRCAALTCLPRETQIGRCSVKGRKCCR

SEQ ID NO: 199318 - protein, 45 aa, Artificial Sequence
  derived and/or modified sequence
GIINTLQKYYCRVRGGRCAVLSCLPKEEQIGKCSTRGRKCCRRKK

SEQ ID NO: 199319 - protein, 36 aa, Artificial Sequence
  derived and/or modified sequence
QKYYCRVRGGRCAVLSCLPKEEQIGKCSTRGRKCCR

SEQ ID NO: 199320 - protein, 36 aa, Artificial Sequence
  derived and/or modified sequence
QKYYCRVRGGRCAVLTCLPKEEQIGKCSTRGRKCCR

SEQ ID NO: 199321 - protein, 45 aa, Artificial Sequence
  derived and/or modified sequence
FLPKTLRKFFCRIRGGRCAVLNCLGKEEQIGRCSNSGRKCCRKKK

SEQ ID NO: 199322 - protein, 35 aa, Artificial Sequence
  derived and/or modified sequence
SFSCSQNGGFCISPKCLPGSKQIGTCILPGSKCCR

SEQ ID NO: 199323 - protein, 45 aa, Artificial Sequence
  derived and/or modified sequence
GIINTLQKYYCRVRGGRCAVLTCLPKEEQIGKCSTRGRKCCRRKK

SEQ ID NO: 199324 - protein, 45 aa, Artificial Sequence
  derived and/or modified sequence
GIINMLQKSYCKIRKGRCALLGCLPKEEQIGSCSVSGRKCCRKKK

SEQ ID NO: 199325 - protein, 45 aa, Artificial Sequence
  derived and/or modified sequence
FIPKSLRRFFCRVRGGRCAILNCLGKEEQIGRCSNRGQKCCRKKK

SEQ ID NO: 199326 - protein, 67 aa, Artificial Sequence
  derived and/or modified sequence
MRIHYLLFALLFLFLVPVPGHGGIINTLQKYYCRVRGGRCAVLSCLPKEEQIGKCSTRGRKCCRRKK

SEQ ID NO: 199327 - DNA, 201 bp, Artificial Sequence
  derived and/or modified sequence
atgcgcatccattacttactgttcgccttgttattcttgtttctggtgcccgtaccaggacacggcgggataatcaatacactgcagaagtattattgtcgggtgcgcggcggcaggtgtgcagtgctgtcttgcttaccgaaggaggagcagataggaaagtgttccactcggggaaggaagtgctgtagacggaaaaag

SEQ ID NO: 199328 - DNA, 201 bp, Artificial Sequence
  derived and/or modified sequence
atgagaatccactacttgctcttcgcgctgctgtttcttttcttggtgccagtgcctggccacggtggcatcatcaacacccttcaaaagtattactgtagagtccggggaggtaggtgcgccgtgctgagctgcctgccgaaggaagaacagatcgggaagtgctcgacccgcgggcgcaagtgctgccggcgcaagaag

SEQ ID NO: 199329 - DNA, 201 bp, Artificial Sequence
  derived and/or modified sequence
atgcgaattcattaccttctctttgctctgctgttcctttttctggtgccagtgcctggccacggtgggattattaatacactccagaagtactattgtagagtccggggaggtcggtgtgcagtgctcagttgcctaccaaaggaggagcagattggaaaatgctctaccaggggccgcaaatgttgccggagaaaaaaa

SEQ ID NO: 199330 - DNA, 201 bp, Artificial Sequence
  derived and/or modified sequence
atgagaatacactacctcctgtttgcacttttgttccttttcctggtgcccgttccgggtcacggaggaatcatcaatacccttcagaaatactattgtcgcgttcggggcgggcgatgcgctgtgcttagttgtttgcccaaagaggagcagatcgggaagtgctctacgcgcggcagaaaatgctgtagaagaaaaaag

SEQ ID NO: 199331 - DNA, 201 bp, Artificial Sequence
  derived and/or modified sequence
atgcggatccactatctgctattcgcccttctcttcctgttcctcgtcccagtgcctggacatggcgggatcatcaacacactgcagaaatattattgtcgcgtgcgaggggggagatgtgccgtgttgtcctgtctgccaaaggaagagcagatcggcaaatgctcaaccaggggtcgcaaatgttgcaggcgcaagaaa

SEQ ID NO: 199332 - DNA, 201 bp, Artificial Sequence
  derived and/or modified sequence
atgagaatccattatttgctcttcgcacttctgttcctttttctggtgccagtacctggccacggaggcatcatcaatacactgcagaaatactactgtagggttagaggaggccgctgtgctgtgctgtcctgtctgcccaaggaggaacaaatcggtaaatgcagcacaaggggaagaaagtgctgtcgcagaaagaag

SEQ ID NO: 199333 - DNA, 201 bp, Artificial Sequence
  derived and/or modified sequence
atgcgcatacactaccttctgttcgccctgctttttctgttcctggtgcccgtgccagggcatggaggtatcataaacacccttcagaagtattactgtcgtgtcaggggaggcaggtgtgcagtgctgtcatgcctccccaaggaggaacaaattggaaaatgctctactagagggagaaaatgctgtagacggaagaag

SEQ ID NO: 199334 - DNA, 201 bp, Artificial Sequence
  derived and/or modified sequence
atgagaattcattacctgctgtttgccctcttgttcctgttcttggtgccagtcccggggcacggaggaatcatcaacaccttgcaaaagtattactgtcgtgttaggggaggccgctgtgcggtgctgtcatgcctccctaaagaagagcagatcggcaaatgctccactcgaggacggaagtgctgcaggcgtaagaaa

SEQ ID NO: 199335 - DNA, 201 bp, Artificial Sequence
  derived and/or modified sequence
atgagaattcactatttgttgtttgccttgctgttcctgtttctggtgcctgtcccgggccatgggggcattatcaacaccctgcaaaagtactactgccgggtaagaggcggacggtgcgccgtgctgagctgtctgccaaaagaagagcagatcgggaagtgttccactcgagggaggaaatgttgccgccgtaaaaaa

SEQ ID NO: 199336 - DNA, 201 bp, Artificial Sequence
  derived and/or modified sequence
atgcgaattcactacctgctttttgcccttctgttcctttttctggtcccggtgcccggacatggaggaattatcaacacgctgcagaagtactactgccgcgtccgcgggggtaggtgcgcagtgctgtcctgtctcccaaaggaggaacaaatcgggaaatgcagcactcgtggtcgaaagtgttgtcgtaggaagaaa

SEQ ID NO: 199337 - DNA, 201 bp, Artificial Sequence
  derived and/or modified sequence
atgcggatccactatctgctgtttgccttgctgttcctgttcctggttccagtgcctgggcacggcggaattatcaataccttacagaagtattattgtagagttcggggcggccgatgcgcagtgctgtcctgtttacccaaggaagagcagattgggaagtgtagtacacgcggcagaaagtgctgccgtaggaaaaaa

SEQ ID NO: 199338 - DNA, 201 bp, Artificial Sequence
  derived and/or modified sequence
atgcgtatccattaccttctcttcgccttgctgttcctctttcttgtcccagtgccgggccacgggggaatcatcaacaccctccagaagtactactgccgcgttcggggtggacggtgcgctgtgctctcgtgcctgcctaaggaggaacaaatcggcaagtgcagcactcggggaaggaaatgttgccggcggaagaag

SEQ ID NO: 199339 - DNA, 201 bp, Artificial Sequence
  derived and/or modified sequence
atgcggatccactacctcctttttgccttgttgttcctgtttctcgtgcccgtgccaggacatgggggaatcatcaacacccttcagaaatactactgtcgcgtcagaggtgggcgctgtgcagtgctgtcctgccttccaaaggaagagcaaattggtaaatgctccactaggggacgcaagtgttgtaggcgcaagaag

SEQ ID NO: 199340 - DNA, 201 bp, Artificial Sequence
  derived and/or modified sequence
atgagaatccactaccttctgttcgcgctcctattcctcttcctagtccctgtgccgggtcatggcggcataatcaacaccttgcagaagtactactgtcgagttcgaggtggccgctgtgcggtcttgtcctgcctgcccaaggaggagcagattggcaaatgcagcactaggggccgtaagtgttgccgcagaaagaag

SEQ ID NO: 199341 - DNA, 201 bp, Artificial Sequence
  derived and/or modified sequence
atgaggatacattacctccttttcgcactcttgtttctcttcctggtgcctgtgcctggacacggtggaatcataaacaccttgcagaagtactactgtcgtgtgaggggtgggcggtgcgccgtcctgtcctgtctgccaaaggaagagcagattggaaagtgctccaccagaggtcgcaagtgttgccgtcgcaaaaag

SEQ ID NO: 199342 - DNA, 201 bp, Artificial Sequence
  derived and/or modified sequence
atgcgcatacattatctcctcttcgcactcctgtttctattcctggtacctgtccctggacacgggggaatcataaacacactccagaaatattattgtcgcgtgcgcggagggagatgcgccgtgctgtcatgcctaccaaaagaagaacagattgggaaatgctccactcgcggaaggaaatgctgcaggcgcaaaaaa

SEQ ID NO: 199343 - DNA, 201 bp, Artificial Sequence
  derived and/or modified sequence
atgagaatccattacctgctgttcgctctgcttttcctcttcctggtcccagtccccgggcacggtgggattattaataccttgcagaagtactactgcagagtcaggggaggacggtgtgcagtcttgagctgccttcccaaggaggagcagatcggcaagtgcagtaccagagggcggaagtgttgccgccgaaagaag

SEQ ID NO: 199344 - DNA, 201 bp, Artificial Sequence
  derived and/or modified sequence
atgcggattcattaccttctgttcgcattgctgtttttgttcttggtgccggtccccgggcacggtggtattataaacactttacagaagtactactgcagagtacggggcggacgttgcgccgttcttagttgtctaccaaaagaagagcagattggcaagtgttctacccgagggcgtaaatgttgccgccggaagaaa

SEQ ID NO: 199345 - DNA, 201 bp, Artificial Sequence
  derived and/or modified sequence
atgcggatacactaccttctgttcgccctccttttcctcttcttggtgcccgtgcctggacatggtgggattatcaatacattacagaagtattattgccgtgtgcggggaggtcgttgcgcagttttgtcgtgtttgccaaaggaggaacagattggcaaatgcagcactaggggaaggaagtgttgcagacggaaaaaa

SEQ ID NO: 199346 - DNA, 201 bp, Artificial Sequence
  derived and/or modified sequence
atgcggatacactatctgctgttcgcccttctgttcttgttcttggtgcccgtcccagggcatggcggcataataaacacgcttcaaaaatactactgcagagttaggggcggcaggtgtgcagtcctcagctgcctcccaaaggaagaacagatcggcaaatgtagtactcgcggccggaagtgttgcagacgaaagaaa

SEQ ID NO: 199347 - DNA, 201 bp, Artificial Sequence
  derived and/or modified sequence
atgcggattcattacttgctctttgccctgctctttctcttcttagttccagtacccggtcatggcgggatcataaacaccctccaaaaatattactgccgagtgcgcggtggccgttgtgcagtgctcagctgtcttcccaaggaagaacaaattggaaaatgttcaacacgcggacgaaagtgttgtagacggaagaag

SEQ ID NO: 199348 - DNA, 201 bp, Artificial Sequence
  derived and/or modified sequence
atgagaattcattaccttctcttcgcactgctgtttttgttcctagtgcctgtccccggacatggaggcataattaatacactccagaaatattactgtagggtgaggggcggcagatgtgccgtcctgagttgccttcctaaggaggagcaaatcgggaagtgcagcactagggggagaaagtgctgcagacgtaaaaaa

SEQ ID NO: 199349 - DNA, 201 bp, Artificial Sequence
  derived and/or modified sequence
atgagaatccactatctcttattcgcgttacttttcctgttccttgtgcctgtacctggtcatggcgggatcattaacaccctgcagaagtactattgccgggtccgcggaggacgatgcgctgttttatcctgtctgcctaaggaggaacaaattggcaaatgcagcaccagagggcggaaatgttgtagacgaaagaag

SEQ ID NO: 199350 - DNA, 201 bp, Artificial Sequence
  derived and/or modified sequence
atgcggatccactacctgctctttgctcttttatttctatttcttgtacctgtccccggacacggagggataatcaacactctacaaaagtattactgccgagtgcgtggaggccgttgcgccgtcttgtcttgtctgcccaaggaagagcagatcggaaagtgctccactcgcggcagaaaatgttgcaggcgtaaaaag

SEQ ID NO: 199351 - DNA, 201 bp, Artificial Sequence
  derived and/or modified sequence
atgcggatccactaccttctcttcgcgctgctgtttctgttcctcgtgccggtgccaggacacggcggcatcatcaacactctgcagaagtattactgtcgcgtccggggtggtcggtgcgcggtgttgtcctgccttccaaaggaggagcaaatcggaaagtgcagcacccgcgggcgtaaatgctgcaggagaaagaaa

SEQ ID NO: 199352 - DNA, 201 bp, Artificial Sequence
  derived and/or modified sequence
atgaggattcattatttgctttttgccttgttattcctctttcttgtgcctgtacctggacacggtggaattatcaacactcttcagaagtactattgcagggtgagagggggtagatgtgcggtactttcttgtctcccaaaagaggaacaaattggaaagtgttccactcgtggcaggaagtgctgtagacgaaagaag

SEQ ID NO: 199353 - DNA, 201 bp, Artificial Sequence
  derived and/or modified sequence
atgaggatccactacctgctctttgcactcctgtttcttttcctcgtgccagtgccgggacacggtggaattatcaataccctccagaaatactattgtagagttcgcggaggacgatgcgccgtcctttcgtgtttgccaaaggaagagcagatcggtaagtgttcgactcgtggcagaaagtgttgtcgaagaaaaaag

SEQ ID NO: 199354 - DNA, 201 bp, Artificial Sequence
  derived and/or modified sequence
atgcggatccactatctgttgttcgccctcttgtttctgtttctcgtgccagttccaggtcacggtggcattatcaatactttgcagaagtactattgcagagtgcggggaggccgatgcgcagttttgtcttgcttgcccaaggaagaacagatagggaagtgcagtacaaggggcaggaagtgctgcagaaggaagaag

SEQ ID NO: 199355 - DNA, 201 bp, Artificial Sequence
  derived and/or modified sequence
atgcgtatacattatctactatttgcgctattatttctatttttagtaccggttccgggtcatggtggtataataaatacgttacaaaaatattattgtcgtgttcgaggtggtcgttgtgcggttctatcgtgtctaccgaaagaagaacaaataggtaaatgttcgacgcgtggtcgtaaatgttgtcgacgaaaaaaa

SEQ ID NO: 199356 - DNA, 201 bp, Artificial Sequence
  derived and/or modified sequence
atgcgcatccactacttgttgttcgctctgctgtttttgtttcttgtgccagtgccgggacacgggggaattatcaacactcttcagaaatactactgcagagtgcgcgggggacgctgcgcagtgctgagctgcttgccgaaggaagagcaaattggtaagtgctcgacccgggggcggaagtgttgtcgcagaaagaag

SEQ ID NO: 199357 - DNA, 201 bp, Artificial Sequence
  derived and/or modified sequence
atgcgtattcactatttgctctttgcccttttgtttcttttcctggtgccggtgccaggacatggtggtattatcaacaccttgcagaagtactactgtagggtgagaggaggacgttgtgcagtgctctcctgcctgcctaaagaagagcagatcggaaaatgttcaactcgcggtcggaaatgttgcaggcgcaagaag

SEQ ID NO: 199358 - DNA, 201 bp, Artificial Sequence
  derived and/or modified sequence
atgagaattcactatctgctgtttgcccttctgttcctgttccttgtccccgtccctggtcacggcgggatcattaacactctccaaaaatactactgtcgagttcgagggggacgatgtgcagtgctgtcatgtcttccaaaggaagaacagattggcaaatgtagcacaaggggtagaaagtgctgccgtcgaaagaaa

SEQ ID NO: 199359 - DNA, 201 bp, Artificial Sequence
  derived and/or modified sequence
atgcgtatccattacttactgtttgcactccttttcctgtttctggtccccgtccccgggcatgggggaattattaacactttacagaagtattactgtcgggtgcgcgggggacgctgcgctgtgttatcctgccttcccaaggaggagcagattggaaagtgctcgaccagaggaaggaaatgttgccgacggaaaaag

SEQ ID NO: 199360 - DNA, 201 bp, Artificial Sequence
  derived and/or modified sequence
atgcggatccactacctgctattcgctttgctgttcctcttccttgtaccagtccccggtcacggcggaataattaacacactgcagaagtattactgtagggtgaggggaggccgttgcgctgtcctgtcttgtctgcccaaagaggagcagatcggtaaatgcagcacacgcggacgaaagtgttgtcggcggaagaaa

SEQ ID NO: 199361 - DNA, 201 bp, Artificial Sequence
  derived and/or modified sequence
atgagaatccactatctactgtttgccttgttgtttctgttcctggttcctgttcccgggcacggtggaatcatcaacacactgcaaaagtattattgccgagttaggggtgggcgctgcgctgtcctcagctgcctgccgaaggaggagcagattggtaaatgtagcacccgggggagaaaatgctgccgccgaaaaaaa

SEQ ID NO: 199362 - DNA, 201 bp, Artificial Sequence
  derived and/or modified sequence
atgcgtatccattacctgctctttgccctgctgtttctgtttctggttccagtgcctggccatgggggcataattaataccctgcagaagtactattgtcgggtccgaggcggtcgctgcgctgttctgtcctgcctgcctaaggaggagcagatcggtaagtgttccacccgcggacgaaagtgctgccgccgcaagaag

SEQ ID NO: 199363 - DNA, 201 bp, Artificial Sequence
  derived and/or modified sequence
atgcgcatccattacctgctgttcgcgctgttgttcctgtttcttgtgccggtcccaggacatggaggaatcatcaacaccctgcagaaatactactgccgcgtgaggggagggcggtgcgccgtgctttcgtgtctgccgaaggaagagcagataggcaagtgttcgactagaggacgcaaatgttgccgccgcaaaaag

SEQ ID NO: 199364 - DNA, 201 bp, Artificial Sequence
  derived and/or modified sequence
atgcgcattcactatcttctctttgccttactctttctttttctagtaccagtgcctggacacgggggaataatcaacacattacagaaatattattgtcgggtacggggaggaagatgtgcagtactttcttgccttcccaaagaagaacagatcgggaagtgctctacacgcggacgcaaatgctgcagaaggaaaaag

SEQ ID NO: 199365 - DNA, 201 bp, Artificial Sequence
  derived and/or modified sequence
atgagaatccattacctgttgttcgccctgctcttcctgtttctcgtgccggtgcctggccacggaggcatcatcaacacccttcagaaatactactgccgcgtcagagggggtaggtgtgcggtgctgtcgtgcctgccaaaagaagagcaaattggaaagtgctccactcggggacgcaagtgttgccgccggaagaag

SEQ ID NO: 199366 - DNA, 201 bp, Artificial Sequence
  derived and/or modified sequence
atgcgcatccattatctcctctttgccctgctattcctgttcctggtccctgtgccgggtcacggcggcatcattaacaccctacagaagtactactgccgcgttcggggcgggaggtgcgctgtgctctcatgtctcccaaaggaggagcagatcggcaaatgttccactcgcggaagaaaatgctgtcgtcgcaagaag

SEQ ID NO: 199367 - DNA, 201 bp, Artificial Sequence
  derived and/or modified sequence
atgagaatccactatctcctcttcgcactcctcttcttgtttctggtccctgtccctggtcacggaggtatcatcaatacactgcaaaagtactactgcagagtcagaggtggacgctgtgccgtgctgagctgcctccctaaggaggaacagatcggtaaatgctctactagaggcagaaaatgctgccgcagaaaaaaa

SEQ ID NO: 199368 - DNA, 201 bp, Artificial Sequence
  derived and/or modified sequence
atgagaattcattacctgcttttcgcgctgctcttcctgttcctcgtgccagtacccggacatgggggaataataaatacccttcagaagtattattgccgagtgagaggagggcgatgcgcggtgctctcatgtctgcctaaagaagaacagatcggcaagtgtagcacacggggccgcaagtgctgcaggagaaagaaa

SEQ ID NO: 199369 - DNA, 201 bp, Artificial Sequence
  derived and/or modified sequence
atgcgcatccactatctcttgttcgcgttactttttttattcttggttccggtgcccggccacgggggtataataaacactcttcagaagtattattgccgggtgcgcggcgggagatgtgccgttttatcttgtttgcctaaggaagagcaaattgggaagtgttccactcgtggaagaaaatgctgtagaagaaagaag

SEQ ID NO: 199370 - DNA, 201 bp, Artificial Sequence
  derived and/or modified sequence
atgcggatccattacctgctcttcgcccttctctttctttttcttgtgcctgtgcctggtcacggtggaatcattaacactctgcaaaagtactactgtagagtgagaggaggtcgttgtgcagtgcttagctgtctgcccaaagaagaacagattggcaagtgttcaacgcgcggcagaaagtgttgtagaagaaagaaa

SEQ ID NO: 199371 - DNA, 201 bp, Artificial Sequence
  derived and/or modified sequence
atgcgcatccactaccttctgttcgcacttttgttcctgtttctcgtgccggtgccaggacatggcggtattatcaacacccttcaaaagtactactgcagagttcgtgggggcaggtgcgccgtgctcagctgtctcccgaaagaggaacagatcgggaaatgctccaccagaggccgcaaatgttgccgccgcaagaag

SEQ ID NO: 199372 - DNA, 201 bp, Artificial Sequence
  derived and/or modified sequence
atgaggatccattacttgctttttgctctgctgttcctgttcctcgtcccggtgccaggacacggtggaatcattaacactttgcaaaagtactattgcagagtgcgtgggggccgttgcgccgtgttgagctgcctccccaaagaagagcagataggaaagtgttccaccagaggccggaaatgttgccgccgcaagaaa

SEQ ID NO: 199373 - DNA, 201 bp, Artificial Sequence
  derived and/or modified sequence
atgcgaattcattacctgctttttgcgttgcttttcctgtttctcgtgcctgtgccgggtcatggcggaataatcaacacccttcagaagtactactgccgtgtgagaggcggaagatgtgcggtcctgtcatgccttcccaaagaagaacaaatcggaaaatgcagcactagagggcggaaatgttgtaggagaaagaag

SEQ ID NO: 199374 - DNA, 201 bp, Artificial Sequence
  derived and/or modified sequence
atgcgcatccattacctcctgtttgccctgctgtttctgtttctggttccagtgcctggacacggcggtatcatcaacaccctgcagaagtactactgcagagtgcggggtggcagatgcgccgttctgagctgtctgccgaaggaagagcaaattggtaagtgtagtacccgtggacggaagtgctgccgccgtaaaaag

SEQ ID NO: 199375 - DNA, 201 bp, Artificial Sequence
  derived and/or modified sequence
atgcgcatccactacctcctctttgccctcttgttccttttcctggtaccagtccctggacacggcggaatcattaataccctgcaaaagtattactgtagagtgaggggaggcagatgtgctgttttgtcttgtctgcctaaggaagagcagatcgggaaatgtagtacacgaggaagaaagtgctgcaggaggaagaaa

SEQ ID NO: 199376 - DNA, 201 bp, Artificial Sequence
  derived and/or modified sequence
atgcggatccactaccttcttttcgctcttctgtttcttttcctggtccctgtgcccggacacggtggaattatcaacactctgcagaagtactactgtcgcgtgcgcggtgggcgttgtgcggtgctttcgtgtctccctaaagaagaacaaatcggtaaatgttcaacccggggacgcaagtgctgtcggaggaagaag

SEQ ID NO: 199377 - DNA, 201 bp, Artificial Sequence
  derived and/or modified sequence
atgaggatacattacctattgttcgccttacttttcctctttctcgttccagtccctggacatggaggaattattaatactttgcaaaagtactattgccgtgttcgcggaggtcggtgtgcggttcttagctgcctaccgaaggaagagcaaattgggaaatgttccacaaggggtcgaaaatgctgtcgacgcaaaaag

SEQ ID NO: 199378 - DNA, 201 bp, Artificial Sequence
  derived and/or modified sequence
atgcgaatccattacttgctgttcgcactactgttcctgttcctcgtgcccgtccccggacacggagggatcattaatacattgcagaagtactactgccgggtgcgaggaggccgctgtgccgtcctgagttgcctaccaaaggaagagcagattgggaagtgctctacacgtggacgcaagtgctgccgacggaagaaa

SEQ ID NO: 199379 - DNA, 201 bp, Artificial Sequence
  derived and/or modified sequence
atgagaatccattacctgctttttgcattgcttttcctcttcttggtgccagtgccagggcacggaggtatcattaacaccctgcaaaagtattactgtcgtgtgagaggcggtaggtgtgccgtgctctcgtgtctgcccaaggaggagcaaattggcaagtgctccactaggggtcgcaaatgctgtaggcggaagaag

SEQ ID NO: 199380 - DNA, 201 bp, Artificial Sequence
  derived and/or modified sequence
atgcggatccattacctgctgtttgcccttctgtttttgttcttggtgccggtgcctggtcatggtgggataatcaataccctgcagaagtactactgtcgcgtgcgaggtggccgttgcgcagtgctctcctgtctcccaaaggaagagcaaattgggaagtgttccactagaggaaggaagtgctgtagaagaaagaag

SEQ ID NO: 199381 - DNA, 201 bp, Artificial Sequence
  derived and/or modified sequence
atgaggatccactacctgctgtttgctttactattcctgtttttggtgcctgtgcctgggcatggaggcatcattaatacgctgcagaagtactactgtcgcgtacgcggaggcagatgcgccgtgctcagctgcttgccaaaggaggagcagattggaaagtgctccacacggggcaggaagtgctgtcgacgcaagaaa

SEQ ID NO: 199382 - DNA, 201 bp, Artificial Sequence
  derived and/or modified sequence
atgagaatccattacctgctgtttgcactcttatttttgttcttggtgcctgtcccgggccacggaggcattattaataccttacagaagtactattgcagagtaagaggagggcgctgtgcagtattgagctgcttgccgaaggaagagcagattggcaagtgttcaacacgtggaaggaaatgttgccgccgcaaaaag

SEQ ID NO: 199383 - DNA, 201 bp, Artificial Sequence
  derived and/or modified sequence
atgagaatccattaccttttgttcgccctgctcttcctctttctggtcccggtgccaggccacgggggaatcatcaacaccttgcagaagtactattgcagagttaggggtggacggtgcgctgtgttgagctgcctgcctaaagaagagcaaataggaaagtgctccactcgggggcgcaagtgttgtagacgcaaaaag

SEQ ID NO: 199384 - DNA, 201 bp, Artificial Sequence
  derived and/or modified sequence
atgaggatccattacctcctctttgcattgctgttcttgtttctggtgcccgtacccggccatggaggtatcataaatacactacagaaatattattgccgcgtccggggcggcaggtgtgccgtgctttcttgccttccaaaggaagaacagatcgggaaatgcagtacgcgcggccggaagtgctgcaggaggaaaaag

SEQ ID NO: 199385 - DNA, 201 bp, Artificial Sequence
  derived and/or modified sequence
atgagaatacattatttgttatttgctttattgtttctattcttagttccagttccaggacatggaggtattattaatactcttcaaaaatattattgtagagttagaggaggaagatgtgcagttttaagttgtttaccaaaagaggaacaaattggaaaatgttcaactagaggaagaaagtgttgtagaagaaaaaag

SEQ ID NO: 199386 - DNA, 201 bp, Artificial Sequence
  derived and/or modified sequence
atgaggattcattatttgctgtttgcactgttgtttctgttcctggtcccagtgcctgggcacggaggcataataaacactctgcagaagtactactgccgcgtgagagggggtcggtgtgccgtgctgtcatgcctgcccaaggaagaacagatcggcaagtgctccacacgtggacgcaaatgctgcaggcgcaagaag

SEQ ID NO: 199387 - DNA, 201 bp, Artificial Sequence
  derived and/or modified sequence
atgcgcattcactacctactgttcgcactattattcttatttttagtacctgttcccggtcatggtggcattataaataccttacagaagtattattgccgagtgagaggtggccgctgcgcggtgctttcctgtcttcccaaagaggagcagatcggcaaatgtagcacacgcgggagaaagtgctgccgccggaagaag

SEQ ID NO: 199388 - DNA, 201 bp, Artificial Sequence
  derived and/or modified sequence
atgcggatccattacctgctgtttgcgctgctgttcttgttcctggtgccagtgccgggacatggaggcattatcaacactctgcagaagtactactgtcgggtgcggggcggccgctgcgccgttctgtcatgcctgccaaaggaagagcaaatcggaaaatgctccacccgcgggcgaaagtgctgtcgaagaaaaaag

SEQ ID NO: 199389 - DNA, 201 bp, Artificial Sequence
  derived and/or modified sequence
atgcggatccattacctgctttttgccctcctgttcctcttccttgtgcccgtccctgggcacggcggaatcattaacactcttcagaagtattactgcagggttcgcggtggaagatgcgccgtgctgtcgtgccttccgaaagaagagcagatcggaaagtgttccaccagaggaaggaagtgctgtcgccgtaagaaa

SEQ ID NO: 199390 - DNA, 201 bp, Artificial Sequence
  derived and/or modified sequence
atgcgaatccattacctgctgttcgccctcctcttcctgtttctggtcccggtgccagggcacggcggaatcatcaacactcttcaaaagtattactgtagagtgaggggaggacggtgcgcagtgctgtcctgcttgcccaaagaagagcaaatcggtaagtgctcgactcggggccggaagtgttgtcggcgcaagaag

SEQ ID NO: 199391 - DNA, 201 bp, Artificial Sequence
  derived and/or modified sequence
atgcggattcattaccttctgtttgcactcctgtttctgttcttggtcccggtgcccgggcatggcggtatcataaacactctgcaaaagtactactgtcgcgttcgaggaggtcggtgcgccgtgttgtcatgtctgccaaaggaggaacagatcgggaaatgctccaccagaggccgaaagtgttgccggcgcaagaag

SEQ ID NO: 199392 - DNA, 201 bp, Artificial Sequence
  derived and/or modified sequence
atgagaattcactatctactcttcgccctgctcttcctgtttttagtgccagtgccgggacacggtgggatcataaacaccctgcaaaagtactattgccgggtgcgcggcggccgatgcgccgtattgagctgtctgcctaaggaagagcagatcggtaagtgttccaccagaggccggaagtgctgcaggagaaaaaag

SEQ ID NO: 199393 - DNA, 201 bp, Artificial Sequence
  derived and/or modified sequence
atgaggattcactatctgctcttcgccttgttattcctattccttgttccagtgcctggccatgggggaatcatcaataccctccagaagtactactgtagggttagaggcggtaggtgcgcagttctgagctgccttcctaaagaggagcagattggaaaatgcagcacacggggacgtaaatgttgccggcgcaagaaa

SEQ ID NO: 199394 - DNA, 201 bp, Artificial Sequence
  derived and/or modified sequence
atgcgtatacattacctcctgtttgcgctcctgtttctcttcttggtgccagtgccgggacacggcggaatcattaacaccttgcagaaatactattgtcgggttaggggaggccggtgcgccgtgctgagctgcctgcctaaagaggaacaaatcggtaagtgttccactcgcggcagaaaatgctgccggagaaagaag

SEQ ID NO: 199395 - DNA, 201 bp, Artificial Sequence
  derived and/or modified sequence
atgagaatccactacctcctgttcgcccttttgtttctgttcttggtgccggtcccgggtcatggtgggatcatcaacaccctgcagaaatactactgtcgggtgaggggaggtcgctgcgcggttctgtcctgtctgcctaaggaggaacaaattggcaaatgttcgaccagaggtcgtaagtgctgcaggagaaagaag

SEQ ID NO: 199396 - DNA, 201 bp, Artificial Sequence
  derived and/or modified sequence
atgcggatccattacttgctgttcgccctgctttttctgttcttggtcccggtccctggacacggaggaatcattaacaccctgcagaagtactactgtcgtgtgcgcggaggtcggtgtgcagtgctctcgtgcctcccaaaggaggaacagatcggaaagtgctctactcgcggacggaagtgctgtcgcaggaagaaa

SEQ ID NO: 199397 - DNA, 201 bp, Artificial Sequence
  derived and/or modified sequence
atgcgaatccattacctcctttttgcactcctctttttgtttcttgtgccggtgccaggccacggaggtatcataaacactcttcaaaagtactactgcagagtgcgcggcgggcgctgcgcagtgctgtcgtgtctgcctaaggaagaacaaattggaaagtgcagcacccgcggtagaaaatgttgtcggcggaaaaaa

SEQ ID NO: 199398 - DNA, 201 bp, Artificial Sequence
  derived and/or modified sequence
atgcgcatccattacctcctttttgcactgctgtttctatttctagtcccagtccccgggcatggcggaataattaatacccttcagaaatattactgtagagttagaggcggaaggtgtgcagtcttatcctgccttcccaaggaggaacaaatcggaaaatgctctacccggggacggaagtgttgtagacggaaaaag

SEQ ID NO: 199399 - DNA, 201 bp, Artificial Sequence
  derived and/or modified sequence
atgcgcatccattacctgctcttcgcgctcctgttcctgttcctggtgccagtccctggtcatggggggattatcaacaccctgcaaaagtactactgcagagttcgagggggacgctgcgccgtgctctcatgtcttccaaaagaagagcagattggaaaatgtagcaccagaggacggaagtgctgccgccgcaagaag

SEQ ID NO: 199400 - DNA, 201 bp, Artificial Sequence
  derived and/or modified sequence
atgaggatacactacctgttgttcgctttgttgtttttgtttcttgtgccggttcctgggcatggaggaatcattaataccttgcagaaatattactgtcgggtgcggggcggtcgctgcgcggtgttgtcttgcctgccaaaggaggaacagatcggcaaatgcagtaccagaggccgaaagtgttgcaggcgcaagaag

SEQ ID NO: 199401 - DNA, 201 bp, Artificial Sequence
  derived and/or modified sequence
atgcgcatccattacctcttgttcgctcttctcttcttgttccttgttcccgtcccaggacacggtggcattatcaatacattgcagaaatattactgccgcgttaggggcggaagatgcgccgtgttgtcctgcctgcctaaggaagagcagatcggcaagtgttccacacgcggtaggaagtgttgtcgtagaaagaag

SEQ ID NO: 199402 - DNA, 201 bp, Artificial Sequence
  derived and/or modified sequence
atgcgaatccactaccttttgtttgcactgctgtttctgttcctggtccccgtgccagggcatggtggaatcatcaacaccctccagaagtattactgcagagtgaggggaggtagatgcgccgtgctgtcgtgtttgcctaaggaggaacaaatcggaaaatgtagcactcggggtagaaaatgctgtagacgcaagaag

SEQ ID NO: 199403 - DNA, 201 bp, Artificial Sequence
  derived and/or modified sequence
atgcgaatacattatttgctgttcgccctgttgttcctatttttggtgccggtgcccgggcacggggggattatcaacacactccagaagtattactgcagagtccgtggtggtcgatgtgctgtgctgtcatgccttccaaaggaagagcaaataggaaaatgctccacgaggggccggaagtgctgccgaaggaagaag

SEQ ID NO: 199404 - DNA, 201 bp, Artificial Sequence
  derived and/or modified sequence
atgcggatccattatctgttgtttgccctgcttttcctctttctggtacctgtgcccggacatggaggaattatcaacactctgcagaagtattactgtcgggtccgcgggggacgctgtgccgtcctgagttgcctgcctaaagaggagcagatcgggaagtgtagcactagaggcagaaaatgttgtcgccgaaagaaa

SEQ ID NO: 199405 - DNA, 201 bp, Artificial Sequence
  derived and/or modified sequence
atgcggattcactacctgcttttcgctctgctgttcctcttcttggtacctgttccaggccacgggggcatcattaacacgctgcagaagtattactgtcgcgtccgcggggggagatgcgctgtgctgtcttgcttaccaaaagaggagcaaattggcaagtgctccacacgcggtcgaaagtgctgtcgcaggaaaaag

SEQ ID NO: 199406 - DNA, 201 bp, Artificial Sequence
  derived and/or modified sequence
atgcggatccattacctcctgttcgccctgctgttcttgttcctcgtgcctgtgcccggacatggcggaatcatcaataccctgcagaagtactattgtagggtgcggggaggaagatgcgctgtcctgtcctgcctgcctaaggaggaacagattggtaagtgttcaaccaggggcagaaagtgttgcagacggaagaaa

SEQ ID NO: 199407 - DNA, 201 bp, Artificial Sequence
  derived and/or modified sequence
atgaggattcattatctcctcttcgctctgttattcctatttttagtgccagtgccaggccacggaggaataattaatactctgcagaagtattactgtcgcgtgcgtggaggaagatgcgccgtcctctcatgtctgcccaaagaggaacagataggcaagtgcagcacccgaggacggaaatgttgccggcgcaaaaag

SEQ ID NO: 199408 - DNA, 201 bp, Artificial Sequence
  derived and/or modified sequence
atgagaattcactacctgctttttgcgctcctctttctgttccttgttcctgtgccaggccatggtggaataatcaacaccctgcaaaagtactactgtcgggtcagaggaggacgctgcgccgtgctttcgtgccttcccaaagaagagcagattggtaaatgttcgacccgcggtcggaagtgttgtcggagaaagaag

SEQ ID NO: 199409 - DNA, 201 bp, Artificial Sequence
  derived and/or modified sequence
atgaggatccattacctccttttcgcattgctgttcctctttctcgtgcctgtccccggacacgggggaatcatcaacactcttcagaagtactactgtcgggtccggggaggacgatgtgctgtgctgtcctgcctgccgaaggaggaacaaattggtaaatgctcaaccagaggacggaagtgctgtcggcgcaagaaa

SEQ ID NO: 199410 - DNA, 201 bp, Artificial Sequence
  derived and/or modified sequence
atgaggatccactacctgctcttcgcactcctctttttgtttctcgtccccgtcccagggcacggaggcattattaacaccctgcagaaatattactgtcgcgtccgagggggccgttgtgctgtcctgtcctgtctccccaaggaagaacagatcggcaagtgctccaccaggggcaggaagtgctgtcgacgaaagaaa

SEQ ID NO: 199411 - DNA, 201 bp, Artificial Sequence
  derived and/or modified sequence
atgagaattcattacctgctgtttgcactcctttttctgttcttggtacctgtccccggtcacggcggcataatcaacacgctgcaaaagtactactgtcgagtgcgcggcggtcgatgtgccgtgctttcctgcttgccgaaggaggaacagattggcaagtgttcaacccggggtaggaaatgttgtcgacgcaagaag

SEQ ID NO: 199412 - DNA, 201 bp, Artificial Sequence
  derived and/or modified sequence
atgaggatccattacttgctgtttgcgctcctgtttcttttccttgtcccagtgcctggacacggtgggattatcaatactcttcagaaatactactgtcgggtgaggggtggacgctgtgcagtgctgtcatgtctgcctaaagaagaacagattggaaagtgtagcactcgcgggagaaagtgttgtagaaggaagaaa

SEQ ID NO: 199413 - DNA, 347 bp, Artificial Sequence
  derived and/or modified sequence
gggaaataagagagaaaagaagagtaagaagaaatataagagccaccatgaggatccactacttgctcttcgcgttgctgtttctcttcctggtgcccgtccctggccatggtggaatcattaacacacttcagaagtattactgtcgggtgagagggggacgatgcgccgtactttcatgtctcccgaaagaagagcaaatcggaaagtgctcgacgagagggcggaaatgttgcaggcgcaaaaagtaatgagctgccttctgcggggcttgccttctggccatgcccttcttctctcccttgcacctgtacctcttggtctttgaataaagcctgagtaggaag

SEQ ID NO: 199414 - DNA, 204 bp, Artificial Sequence
  derived and/or modified sequence
atgagaatccactacctgctgttcgccctgctgttcctgttcctggtgcccgtgcccggccacggcggcatcatcaacaccctgcagaagtactactgcagagtgagaggcggcagatgcgccgtgctgagctgcctgcccaaggaggagcagatcggcaagtgcagcaccagaggcagaaagtgctgcagaagaaagaagtag

SEQ ID NO: 199415 - DNA, 204 bp, Artificial Sequence
  derived and/or modified sequence
atgcggatccattaccttttgttcgccctgttgtttttgttcttggtccccgtgcccggacacggcggaataattaataccctgcagaagtactactgccgtgtgaggggtggacgttgtgcagtcttgtcttgcctgcctaaggaagaacagatcggaaaatgcagcacccgaggtaggaagtgttgtcggcgaaagaagtag

SEQ ID NO: 199416 - DNA, 204 bp, Artificial Sequence
  derived and/or modified sequence
atgagaattcactaccttctattcgccttgctctttttattcctggtgccagtaccgggacatggtgggattatcaataccctgcagaaatactactgccgggtgagaggagggcgctgcgccgtgttaagttgtctgcccaaagaggagcagattggtaagtgttccaccaggggccggaaatgttgtcggaggaagaagtag

SEQ ID NO: 199417 - DNA, 204 bp, Artificial Sequence
  derived and/or modified sequence
atgaggatccactacctgctgtttgccctgctcttcctgttcctggtgcctgtgcccggccatggaggcatcatcaacaccctgcagaagtactactgccgggtgcggggcggccgctgtgctgtgctgagctgcctgcccaaggaggagcagatcggcaagtgcagcacccggggcaggaagtgctgcaggaggaagaagtag

SEQ ID NO: 199418 - DNA, 518 bp, Artificial Sequence
  derived and/or modified sequence
caaatccatagggagctctgccttaccattgggttcctaattaactgagtgagtgggtgtgttctgcatggtgagaggcattggaatgatgcatcagaaaacatgtcataatgtcatcactgtaatatgacaagaattgcagctgtggctggaacctttataaagtgaccaagcacaccttttcatccagtctcagcgtggggtgaagcctagcagctatgaggatccattatcttctgtttgctttgctcttcctgtttttggtgcctgttccaggtcatggaggaatcataaacacattacagaaatattattgcagagtcagaggcggccggtgtgctgtgctcagctgccttccaaaggaggaacagatcggcaagtgctcgacgcgtggccgaaaatgctgccgaagaaagaaataaaaaccctgaaacatgacgagagtgttgtaaagtgtggaaatgccttcttaaagtttataaaagtaaaatcaaattacatttttttttcaaaaaaaa

SEQ ID NO: 199419 - DNA, 204 bp, Artificial Sequence
  derived and/or modified sequence
atgcggatccactacctgctgttcgccctgctgttcctgttcctggtccctgttccagggcacgggggcatcattaacacccttcagaaatattactgccgggtgcgaggtggccgatgcgccgtgcttagctgcctgcccaaagaggaacagattgggaagtgctcaactagggggcggaaatgctgccggcggaagaagtag

SEQ ID NO: 199420 - DNA, 204 bp, Artificial Sequence
  derived and/or modified sequence
atgcggatccactacctgctgttcgccctgctgttcctgttcctggtaccagtacctggacacggcggtattattaatactttgcaaaagtattattgcagggtgcgggggggacgctgcgcggtcctatcgtgcctgcctaaagaggagcagatcgggaaatgcagtacccgggggcgcaagtgctgccgacgtaagaaatag

SEQ ID NO: 199421 - DNA, 204 bp, Artificial Sequence
  derived and/or modified sequence
atgcgaatccactatctgctctttgctcttctgttcttattcttggtccctgtccccggacacggcggaatcataaacacgctgcaaaagtactactgccgggttaggggagggcgttgcgcggtcttgagctgcttgccgaaagaagaacagatcgggaagtgcagtactcgaggacgtaaatgctgtcgaagaaagaagtag

SEQ ID NO: 199422 - DNA, 204 bp, Artificial Sequence
  derived and/or modified sequence
atgcgaatccactacttgctctttgctttgttgtttttgttcttagtgcccgtccctgggcacggaggaattattaacaccttacaaaaatattattgccgcgtgagaggaggcagatgcgctgtactttcatgtctacccaaggaggaacagataggaaagtgctccactaggggcaggaagtgttgcagacggaaaaaatag

SEQ ID NO: 199423 - DNA, 204 bp, Artificial Sequence
  derived and/or modified sequence
atgcggattcattacttgctctttgctctcctgtttttatttttggttccagtgcctggtcacggagggattattaatactttacagaagtattattgccgagtacgcggaggtagatgcgccgttctgtcatgtctgccaaaggaggaacaaatcggtaaatgctccactcgcggaagaaaatgctgcagacgtaagaagtag

SEQ ID NO: 199424 - DNA, 204 bp, Artificial Sequence
  derived and/or modified sequence
atgagaatccattaccttctttttgcccttctatttctgtttctcgtgccagtgccaggccacggtggaatcataaatacactccagaaatactactgcagggtgaggggcggccgctgcgcagttctctcgtgtctacccaaggaggaacaaatcggaaagtgctcaacgcgcggaagaaagtgttgccgaaggaagaaatag

SEQ ID NO: 199425 - RNA, 347 nt, Artificial Sequence
  derived and/or modified sequence
gggaaauaagagagaaaagaagaguaagaagaaauauaagagccaccaugaggauccacuacuugcucuucgcguugcuguuucucuuccuggugcccgucccuggccaugguggaaucauuaacacacuucagaaguauuacugucgggugagagggggacgaugcgccguacuuucaugucucccgaaagaagagcaaaucggaaagugcucgacgagagggcggaaauguugcaggcgcaaaaaguaaugagcugccuucugcggggcuugccuucuggccaugcccuucuucucucccuugcaccuguaccucuuggucuuugaauaaagccugaguaggaag

SEQ ID NO: 199426 - RNA, 204 nt, Artificial Sequence
  derived and/or modified sequence
augcggauucauuacuugcucuuugcucuccuguuuuuauuuuugguuccagugccuggucacggagggauuauuaauacuuuacagaaguauuauugccgaguacgcggagguagaugcgccguucugucaugucugccaaaggaggaacaaaucgguaaaugcuccacucgcggaagaaaaugcugcagacguaagaaguag

SEQ ID NO: 199427 - RNA, 204 nt, Artificial Sequence
  derived and/or modified sequence
augagaauccauuaccuucuuuuugcccuucuauuucuguuucucgugccagugccaggccacgguggaaucauaaauacacuccagaaauacuacugcagggugaggggcggccgcugcgcaguucucucgugucuacccaaggaggaacaaaucggaaagugcucaacgcgcggaagaaaguguugccgaaggaagaaauag

SEQ ID NO: 199428 - protein, 854 aa, Artificial Sequence [sequence omitted]

SEQ ID NO: 199429 - DNA, 2565 bp, Artificial Sequence
  derived and/or modified sequence
atgccaggagggggtcctcagggcgcgccagccgcagcaggtggggggggcgtcagtcatcgtgctgggagcagggattgcctaccgcccgccgcttgcttcagacgaaggcgactcgccagacgccccggatacatgagatcaagcactgggcccggcatcggatttctttcgcccgcggtgggtaccctgtttcggtttcccggaggcgtgagcggggaagaaagtcatcacagtgagagccgggcacgccagtgcggactagacagtcgcgggttactggtccggtcccctgtaagcaagtctgctgcagctccgaccgttacctctgttcgtggtactagtgctcacttcgggatccaactcagagggggaacacgcctgcctgataggctgagctggccctgtggacccggtagcgctgggtggcagcaggaattcgcagccatggatagttcagaaacgttagacgcctcctgggaggctgcatgcagcgacggagcacggagggttagggccgctggatctctgccaagcgctgaactgtcatctaactcctgctcccccggctgcggacccgaggtcccgcctacgccaccaggaagccattcagcatttaccagcagtttttcattcatacgcttgagtctcgggagcgccggagaacggggcgaggcggagggctgtccgccatcccgagaagctgagagccactgtcagtccccgcaagagatgggcgccaaggcagcttctctcgacggcccacacgaggacccccgttgcctttctcgccccttcagcctgttggcgacccgggtgagcgcagacttggcgcaggcagcccgaaacagctctagacccgaaagagatatgcacagtttgcccgatatggaccctggtagtagtagctccctcgacccatcccttgcgggatgcgggggcgacgggtcctcagggagtggggacgcccacagctgggacactctcctacggaagtgggaacctgtactcagggactgtctcctgcgcaataggcggcagatggaggtcatttcgctgaggctcaaattacagaagctgcaggaggacgccgtggaaaacgatgattacgacaaagctgaaactctgcagcagcgacttgaagatctggagcaggagaagattagtctgcacttccagttgccatcaaggcagcctgcactctcgtcattcctgggccacctcgcagcacaagtccaagctgccctacgccggggtgccacacagcaggcatcaggagacgacacccatactcccttgaggatggaaccacggctgttagaaccaacagctcaggattctctgcacgttagcattaccagacgggattggctactgcaggagaaacagcagctgcaaaaggaaatcgaggctctccaggccaggatgttcgtactcgaagccaaggatcagcagctaaggcgcgagatcgaggaacaggagcaacagctgcagtggcaagggtgcgacctgactccgttggtgggacagctttcattagggcagttacaggaggtctctaaggctcttcaggacaccttggcatccgctggtcaaatcccctttcatgctgaacctccagagaccataaggtcactgcaagaacgaatcaagtcgctgaatctctcgctgaaggaaataaccaccaaggtgtgcatgagcgagaagttttgctccactctccggaagaaagtaaatgacatagagactcagctgcctgctctcctggaagccaaaatgcacgccatctccgggaatcacttctggaccgccaaggacctcaccgaagaaataaggtccctgacatctgaacgtgagggtctggagggactactgagtaagttgctggttcttagctcccgcaacgtcaaaaaactgggatctgtgaaagaggattacaaccgccttcggcgcgaggtagagcatcaggagaccgcctatgaaacaagcgtcaaggaaaacacaatgaaatacatggaaacactgaagaacaagctgtgttcctgcaaatgcccactcttggggaaagtttgggaagctgatctggaggcctgccgcctgttgatccagagcctgcagcttcaagaagcccgcggaagcttgtctgtggaggacgagaggcaaatggacgacctcgaaggcgccgccccccctatcccccctcgattgcattccgaggataaaagaaagactcccctgaaagtactggaggagtggaagacgcatctcattcccagcctccactgcgccggcggcgaacaaaaggaggaatcttatatcctatcagctgagctgggagaaaaatgcgaggatattggcaaaaaactcttgtacctggaagaccaactccacactgctatacattcacacgacgaggatctgattcacagcctgcgtagagaactgcaaatggtgaaagagaccttacaggccatgattctacagcttcagcccgcgaaggaggctggagaacgggaggccgccgcatcgtgtatgacagctggtgtgcatgaggcccaggcatag

SEQ ID NO: 199430 - DNA, 2565 bp, Artificial Sequence
  derived and/or modified sequence
atgcctgggggcggcccccagggcgccccagctgctgctgggggcggcggcgtgagccaccgggccggcagccgggactgcctgcccccagctgcctgcttcagaagaagaaggctggcccggcggcccggctacatgaggagcagcacaggccctggcatcggcttcctgagccctgctgtgggcaccctcttccgcttccctgggggcgtgtctggagaggagagccaccacagcgagagccgggcccggcagtgtggcctggacagccggggcctgctggtgcgcagccctgtgtccaagtctgctgctgcccccaccgtgacctctgtgcggggcaccagcgcccacttcggcatccagctgcggggcggcacccggctgcctgaccggctgtcctggccctgtggccctggcagcgctggctggcagcaggagtttgctgccatggacagcagcgagaccctggatgcctcctgggaggccgcctgcagtgatggagccaggagagtgcgggccgccggcagcctgcccagcgctgagctgagcagcaacagctgcagccctggctgcggccctgaggtgccccccaccccacctggcagccacagcgccttcaccagcagcttctccttcatccggctgagcctgggcagcgctggggagcggggggaggccgagggctgcccccccagccgggaggccgagagccactgccagagcccccaggagatgggcgccaaggccgccagcctggatggcccccatgaggacccccgctgcctgagccggcccttcagcctgctggccaccagggtgtctgctgacctggcccaggccgccaggaacagcagcaggcctgagcgggacatgcacagcctgcctgacatggaccccggcagcagcagcagcctggaccccagcctggccggctgtggaggagatggcagcagcggcagcggagatgcccacagctgggacaccctgctgaggaagtgggagcctgtgctgcgggactgcctgctgaggaacagacggcagatggaggtgatcagcctgcggctgaagctgcagaagctgcaggaggatgctgtggagaatgatgattatgacaaggccgagaccctgcagcagaggctggaggacctggagcaggagaagatcagcctgcacttccagctgcccagccggcagcctgccctgagcagcttcctgggccacctggccgcccaggtgcaggccgccctgcggcggggggccacccagcaggccagcggagatgacacccacacccccctgaggatggagccccggctgctggagcccacagcccaggacagcctgcacgtgtccatcacccggcgggactggctgctgcaggagaagcagcagctgcagaaggagattgaggccctgcaggccaggatgtttgtgctggaggccaaggaccagcagctgcggcgggagattgaggagcaggagcagcagctgcagtggcagggctgtgacctgacccccctggtgggccagctgagcctgggccagctgcaggaggtgtccaaggccctgcaggacaccctggccagcgctggccagatccccttccacgccgagcccccagagaccatccgcagcctgcaggagcgcatcaagagcctgaacctgagcctgaaggagatcaccaccaaggtgtgcatgtctgagaagttctgcagcaccctgaggaagaaggtgaatgacatcgagacccagctgcctgccctgctggaggccaagatgcacgccatcagcggcaaccacttctggacagccaaggacctgacagaggagatccgcagcctgaccagcgagcgggagggcctggagggcctgctgagcaagctgctggtgctgagcagcagaaatgtgaagaagctgggctctgtgaaggaggactacaaccggctgcggcgggaggtggagcaccaggagacagcctatgagacctctgtgaaggagaacaccatgaagtacatggagaccctgaagaacaagctgtgcagctgcaagtgccccctgctgggcaaggtgtgggaggccgacctggaggcctgccgcctgctgatccagagcctgcagctgcaggaggcccggggcagcctgtctgtggaggatgagcggcagatggatgacctggagggcgccgccccacccatccccccccggctgcacagcgaggacaagaggaagacccccctgaaggtgctggaggagtggaagacccacctgatccccagcctgcactgtgccggcggggagcagaaggaggagagctacatcctgtctgctgagctgggggagaagtgtgaagatattggcaagaagctgctgtacctggaggaccagctgcacacagccatccacagccatgatgaagatctcatccacagcctgcggcgggagctgcagatggtgaaggagaccctgcaggccatgatcctgcagctgcagcctgccaaggaggccggggagcgggaggccgccgccagctgcatgacagctggggtgcatgaggcccaggcctag

SEQ ID NO: 199431 - DNA, 2565 bp, Artificial Sequence
  derived and/or modified sequence
atgcccggcggcggcccccagggcgcccccgccgccgccggcggcgggggagtgagccacagagccggctcacgggactgcttaccgccagctgcctgtttcaggagaagaagactcgctaggcgcccaggttatatgcgttcctctacagggccaggcataggcttcctgtcccccgctgtaggaaccctgttccggtttcctggaggggtttccggagaggagagtcaccattctgagagccgggcaaggcaatgcggattggacagtaggggtttgctggttaggtcccctgtctctaagtccgcagccgccccaaccgtcacgtccgttagaggtactagcgcccacttcgggattcaacttcgggggggcacccgcctgccagataggttgagttggccatgtggccctggtagcgccggatggcagcaagagtttgccgccatggactcctccgagacactggatgctagttgggaggctgcctgctcggatggggcacgccgggtgcgtgccgcgggctctctgccaagtgcggaacttagctccaactcttgcagcccggggtgtggccctgaggtgccccccactccccccggttcccactctgccttcacgagttccttttcattcattcggctttcacttgggtccgcaggcgagaggggcgaggcggaaggctgccctccgagcagggaagcagagagccactgtcagtctcctcaggaaatgggagccaaggcggctagcttggacggccctcacgaggacccccgctgtctatccaggcctttttctctgttagccactcgagtttccgctgatctcgcccaggcagctagaaattccagccgccctgagcgagatatgcactctttacccgatatggaccccgggagtagctctagcttagatccatccctcgccggttgcggtggggacggtagcagtggaagtggcgatgctcattcctgggacaccctcttgaggaaatgggaaccagtcctcagagattgtctgcttcgcaaccggcggcagatggaggtgattagcctgcgcttgaagcttcaaaaactacaggaagatgcagtggagaacgatgactacgataaagcagagacccttcagcaaagacttgaggaccttgagcaggaaaaaatatctctccattttcagctaccaagcagacagccagctctctctagcttcttaggacaccttgcagcccaggtccaggccgcacttcgcaggggcgcaacccaacaggccagtggggatgatactcacacgccattacgtatggagccgaggctcctcgaacccaccgctcaagactccttacatgtgagtatcacgaggcgggattggctgcttcaagagaaacagcagcttcaaaaagagatcgaggcccttcaggcacgaatgttcgttctggaggcaaaggaccagcagttgcggcgtgaaatcgaggaacaagagcagcagctgcagtggcaggggtgtgacttgacccctctagtcggacagctaagtctcggccagctgcaggaagtttccaaggctctgcaggacacattagcctctgcaggccagatacccttccacgccgagcccccagagactatccggtctctgcaggagagaattaagagcctgaatctgagtctcaaggagatcaccacaaaggtctgtatgtccgaaaagttctgtagcaccttaaggaagaaggtaaacgacatcgaaacacagctgccagcgctccttgaggcaaaaatgcatgccattagcggcaatcatttttggaccgcaaaggaccttaccgaggagattaggagtctcacgtccgaacgggaaggcctagaaggtctactgagcaaattgttagtgctgtccagcaggaatgtcaagaaactggggagtgtcaaagaagactacaatagactccggagggaagttgaacaccaggagactgcttacgaaacctctgttaaggagaacaccatgaagtacatggagactctcaagaataagctgtgcagctgcaaatgtcctctcctgggtaaggtctgggaggctgaccttgaggcatgtagactgttaatacaatccctgcagcttcaagaggctcgtgggtccctgtccgtggaagatgagcgacagatggacgacctcgaaggggctgccccccccattccccctcggttgcacagtgaagataagcggaagaccccactgaaggtcctggaggagtggaaaactcatctaattccttccctccattgtgccggaggtgagcagaaggaagagagctacatcttgtctgctgagctgggagaaaagtgcgaagacattggaaagaaactcctttacctagaggaccagctacacacagctatccacagccacgacgaagatctgattcattccctccggcgagaactgcagatggtgaaggagacactacaggctatgatactgcaattgcagcctgccaaggaggccggcgagagagaagccgctgcatcctgcatgactgctggagtgcacgaggctcaggcctag

SEQ ID NO: 199432 - DNA, 2565 bp, Artificial Sequence
  derived and/or modified sequence
atgcctgggggtggccctcagggagctcccgctgccgcaggcggtggcggagttagccatcgggctggttctcgggattgcctcccgccagccgcatgtttcaggagaaggcgcttagctagaaggcctggctacatgcgctcaagtactggacctggcatcgggttcctgtcccccgctgttggcacactctttagatttcccggaggcgtgtccggggaagagagccaccactccgaatcgagggcaagacaatgtggcctggattctagggggctgctcgtccgtagcccagtcagtaaaagcgccgcagcccctactgtcacctccgtaagaggcacctccgcccatttcggtatccagttgcgtggcggaacaaggttgcctgaccgcctgagttggccatgtggcccaggaagtgctggatggcagcaggaattcgcagcaatggattctagcgaaacgttggatgcttcatgggaagcagcttgctctgacggagccagaagggtaagagcagctggatccctgccctcagcggaactgagttccaactcttgcagcccagggtgcgggcctgaagttccacctacgcctccagggtcccactcagcatttactagttcattttcttttatacgactttcactgggatctgccggagagagaggcgaagcggagggatgcccccctagcagggaagccgaatcacattgccaaagcccccaggaaatgggggcaaaagccgctagtttggacggtccccatgaggatcctcgttgtctctctcggccattctctctgctggccacacgtgtatccgccgaccttgcgcaagctgctaggaattctagcagacccgagcgagacatgcacagtctacctgacatggaccccggatcttcgagctcgttagacccttccctagctgggtgcggcggagacggctcttccgggagcggtgacgcacacagttgggataccctgctcagaaagtgggagccggtcttgcgcgactgcctgctgcggaaccgccgacagatggaggtgataagtctaaggctgaaactgcagaaattacaggaggatgccgtggagaatgacgattacgacaaagctgagacactgcagcagcggctcgaggatttagaacaagagaaaatttctctgcattttcagttgccgtctcgccagcctgccctctcaagttttctaggccacctggccgctcaggtacaagccgcactgcgcagaggggctacccagcaggcttctggagacgacactcatacccccttgagaatggagcccagactgctggaaccaactgcacaggattcacttcacgtgagcatcactaggcgggattggctccttcaggagaagcagcaactgcagaaagagatcgaagcactacaggccagaatgttcgtgttagaagcaaaggatcaacaattgcggagggagattgaagagcaggagcaacaacttcagtggcaagggtgcgacttaacccccctcgtgggtcaactgtctctgggacagctgcaggaggtgtccaaggctctgcaggacacccttgcatccgccggacagatacctttccacgccgaacctcctgagacaatcagaagcttacaggagagaatcaaaagcttgaatctgtcgctgaaagaaataaccacaaaagtttgtatgtctgaaaagttctgctccaccctgcgtaagaaggttaacgatatcgagacacaactgcctgcactcctcgaagcaaagatgcatgcgatttctgggaaccacttttggactgccaaagatcttactgaggagattcggtctctgacatccgagcgtgaggggcttgaggggttgctgtcaaagcttttggtcctgtcttctagaaatgtcaaaaagctgggctctgtcaaggaggactacaatcggctccgcagggaggtggagcaccaggagactgcatatgaaaccagcgttaaagagaatacaatgaagtacatggaaactcttaaaaacaagctatgtagctgtaaatgccccctcctcggaaaagtctgggaagctgacctcgaggcctgccggctgctgatacagtctttacagctgcaagaggcgcgaggctccctatcggtggaggacgaaaggcagatggatgacttggaaggcgcagcaccaccgattcctccaaggttacatagtgaagacaagcgaaaaactccgctgaaggtcttagaggaatggaagacacatttgattccaagtctccattgtgctggcggagagcaaaaagaagaatcatacatactgagcgcagaactcggtgagaaatgtgaagatatcggcaagaaactgttgtacctagaggatcaactgcacacggccattcactcccacgacgaggatctaattcacagtctccgtagagagctacagatggtgaaggagacacttcaggccatgatccttcagctacagccagccaaggaggcaggggagcgtgaggcagccgcttcttgtatgaccgccggagtacacgaggctcaagcatag

SEQ ID NO: 199433 - DNA, 2565 bp, Artificial Sequence
  derived and/or modified sequence
atgcccggcggcggcccccagggcgcccccgccgccgccggcggcggcggcgtgagccacagagccggcagcagagactgcctgccccccgccgcctgcttcagaagaagaagactggccagaagacccggctacatgagaagcagcaccggccccggcatcggcttcctgagccccgccgtgggcaccctgttcagattccccggcggcgtgagcggcgaggagagccaccacagcgagagcagagccagacagtgcggcctggacagcagaggcctgctggtgagaagccccgtgagcaagagcgccgccgcccccaccgtgaccagcgtgagaggcaccagcgcccacttcggcatccagctgagaggcggcaccagactgcccgacagactgagctggccctgcggccccggcagcgccggctggcagcaggagttcgccgccatggacagcagcgagaccctggacgccagctgggaggccgcctgcagcgacggcgccagaagagtgagagccgccggcagcctgcccagcgccgagctgagcagcaacagctgcagccccggctgcggccccgaggtgccccccaccccccccggcagccacagcgccttcaccagcagcttcagcttcatcagactgagcctgggcagcgccggcgagagaggcgaggccgagggctgcccccccagcagagaggccgagagccactgccagagcccccaggagatgggcgccaaggccgccagcctggacggcccccacgaggaccccagatgcctgagcagacccttcagcctgctggccaccagagtgagcgccgacctggcccaggccgccagaaacagcagcagacccgagagagacatgcacagcctgcccgacatggaccccggcagcagcagcagcctggaccccagcctggccggctgcggcggcgacggcagcagcggcagcggcgacgcccacagctgggacaccctgctgagaaagtgggagcccgtgctgagagactgcctgctgagaaacagaagacagatggaggtgatcagcctgagactgaagctgcagaagctgcaggaggacgccgtggagaacgacgactacgacaaggccgagaccctgcagcagagactggaggacctggagcaggagaagatcagcctgcacttccagctgcccagcagacagcccgccctgagcagcttcctgggccacctggccgcccaggtgcaggccgccctgagaagaggcgccacccagcaggccagcggcgacgacacccacacccccctgagaatggagcccagactgctggagcccaccgcccaggacagcctgcacgtgagcatcaccagaagagactggctgctgcaggagaagcagcagctgcagaaggagatcgaggccctgcaggccagaatgttcgtgctggaggccaaggaccagcagctgagaagagagatcgaggagcaggagcagcagctgcagtggcagggctgcgacctgacccccctggtgggccagctgagcctgggccagctgcaggaggtgagcaaggccctgcaggacaccctggccagcgccggccagatccccttccacgccgagccccccgagaccatcagaagcctgcaggagagaatcaagagcctgaacctgagcctgaaggagatcaccaccaaggtgtgcatgagcgagaagttctgcagcaccctgagaaagaaggtgaacgacatcgagacccagctgcccgccctgctggaggccaagatgcacgccatcagcggcaaccacttctggaccgccaaggacctgaccgaggagatcagaagcctgaccagcgagagagagggcctggagggcctgctgagcaagctgctggtgctgagcagcagaaacgtgaagaagctgggcagcgtgaaggaggactacaacagactgagaagagaggtggagcaccaggagaccgcctacgagaccagcgtgaaggagaacaccatgaagtacatggagaccctgaagaacaagctgtgcagctgcaagtgccccctgctgggcaaggtgtgggaggccgacctggaggcctgcagactgctgatccagagcctgcagctgcaggaggccagaggcagcctgagcgtggaggacgagagacagatggacgacctggagggcgccgccccccccatcccccccagactgcacagcgaggacaagagaaagacccccctgaaggtgctggaggagtggaagacccacctgatccccagcctgcactgcgccggcggcgagcagaaggaggagagctacatcctgagcgccgagctgggcgagaagtgcgaggacatcggcaagaagctgctgtacctggaggaccagctgcacaccgccatccacagccacgacgaggacctgatccacagcctgagaagagagctgcagatggtgaaggagaccctgcaggccatgatcctgcagctgcagcccgccaaggaggccggcgagagagaggccgccgccagctgcatgaccgccggcgtgcacgaggcccaggcctag

SEQ ID NO: 199434 - DNA, 7059 bp, Artificial Sequence
  derived and/or modified sequence
ggaaggagcaggaggcagcccaggcggagcgggaggagctggcagcggggcgcatgccaggcgggggtcctcagggcgccccagccgccgccggcggcggcggcgtgagccaccgcgcaggcagccgggattgcttaccacctgcagcgtgctttcggaggcggcggctggcacggaggccgggctacatgagaagctcgacagggcctgggatcgggttcctttccccagcagtgggcacactgttccggttcccaggaggggtgtctggcgaggagtcccaccactcggagtccagggccagacagtgtggccttgactcgagaggcctcttggtccggagccctgtttccaagagtgcagcagcccctactgtgacctctgtgagaggaacctcggcgcactttgggattcagctcagaggtggcaccagattgcctgacaggcttagctggccgtgtggccctgggagtgctgggtggcagcaagagtttgcagccatggatagttctgagaccctggacgccagctgggaggcagcctgcagcgatggagcaaggcgtgtccgggcagcaggctctctgccatcagcagagttgagtagcaacagctgcagccctggctgtggccctgaggtccccccaacccctcctggctctcacagtgcctttacctcaagctttagctttattcggctctcgcttggctctgccggggaacgtggagaagcagaaggctgcccaccatccagagaggctgagtcccattgccagagcccccaggagatgggagccaaagctgccagcttggacgggcctcacgaggacccgcgatgtctctctcggcccttcagtctcttggctacacgggtctctgcagacttggcccaggccgcaaggaacagctccaggccagagcgtgacatgcattctttaccagacatggaccctggctcctccagttctctggatccctcactggctggctgtggtggtgatgggagcagcggctcaggggatgcccactcttgggacaccctgctcaggaaatgggagccagtgctgcgggactgcctgctgagaaaccggaggcagatggaggtaatatccttaagattaaaacttcagaaacttcaggaagatgcagttgagaatgatgattatgataaagctgagacgttacaacaaagattagaagacctggaacaagagaaaatcagcctgcactttcaacttccttcaaggcagccagctcttagcagtttcctgggtcacctggcagcacaagtccaggctgccttgcgccgtggggccactcagcaggccagcggagatgacacccacaccccactgagaatggagccgaggctgttggaacccactgctcaggacagcttgcacgtgtccatcacgagacgagactggcttcttcaggaaaagcagcagctacagaaagaaatcgaagctctccaagcaaggatgtttgtgctggaagccaaagatcaacagctgagaagggaaatagaggagcaagagcagcaactccagtggcagggctgcgacctgaccccactggtgggccagctgtccctgggtcagctgcaggaggtcagcaaggccttgcaggacaccctggcctcagccggtcagattcccttccatgcagagccaccggaaaccataaggagcctccaggaaagaataaaatccctcaacttgtcacttaaagaaatcactactaaggtgtgtatgagtgagaaattctgcagcaccctgaggaagaaagttaacgatattgaaacccaactaccagccttgcttgaagccaaaatgcatgccatatcaggaaaccatttctggacggctaaagacctcaccgaggagattagatcattaacatcagagagagaagggctggagggactcctcagcaagctgttggtgttgagttccaggaatgtcaaaaagctgggaagtgttaaagaagattacaacagactgagaagagaagtggagcaccaggagactgcctatgaaacaagtgtgaaggaaaatactatgaagtacatggaaacacttaagaataaactgtgcagctgcaagtgtccactgcttgggaaagtgtgggaagctgacttggaagcttgtcgattgcttatccagagcctacagctccaggaagccaggggaagcctgtctgtagaagatgagaggcagatggatgacttagagggagctgctcctcctattccccccaggctccactccgaggataaaaggaagacccctttgaaggtattggaagaatggaagactcacctcatcccctctctgcactgtgctggaggtgaacagaaagaggaatcttacatcctttctgcagaacttggagaaaagtgtgaagacataggcaagaagctattgtacttggaagatcaacttcacacagcaatccacagtcatgatgaagatctcattcattctctcaggagggagctccagatggtgaaggaaactctgcaggccatgatcctgcagctccagccagcaaaggaggcgggagaaagagaagctgcagcttcctgcatgacagctggtgtccacgaagcacaagcctgaggagtgacgggatgggggagggaggtgggccaccatgtttggacccggggggctgctcttccctcccccgccatagctaagatgcctgaatcaattacggagatacagagccttgaggtctttcagtggaaaggtggttcatgttcattctcatcagtgtgaaactgaggagtctgcaatttggaatatggagagagagactgatttgctgaatttccttctaaatgtcactcaaaaatttcttttccatgtcattcttgggaatgtcttccacaggatttgagaatagtttcatctcagcccccattagagagaagttggggtgaattctggaaaaatgtctctttttcctgtgccatttgccttctgctgcaacgaaaatatttcctgattcaagattctataaaaaggaaaccaagcataagactctgtcatcatacctgttacacgttcctacaggtgcacaatctaagagagctaattaacctcagagtctggagttaacagcttttcaccttacttctcctgtgatctaatattatcttagaaaaattaatatgcaatttccaaaagatattttggtaagacaacaacctcccagtgatatgccacctttcaattttccttttgtggcaatgattgcatctgaagaaaggatccctgagagtctctgtttcatcaggacattctgaaatttacccacagtgaggctgtggatggatcaggggacctgtataaaatgtttgagcctgttccattttcccgtggaacctgtttcactcaatgccaggcagtgcagcatttaggaaagcagtgcagtactcagtaaggcagtgcagtactcagtaacacaatacagtactcaggcagtgcagtactcagtaagacagtgcagtgctcagtaaggcagtgcaatactcagtaacagtgtagtactcagtaacagtgaagtactcagtaatacagtacagtattcagtaaggcagtgaagtactcagtaatacaatacagtactcagttaggcagtgcagtactcaggaatgcagcacagtactcaggcagtgcaatactcagtgcggtactcagtaacacagtgcagtactcagtaacagtgcagtactcagtaacagtgcagtactcagtaaggcagtgcagtactcagtaacacagtgcagtactcagtaatacagtacagtactcagtaaggcagtatggtactcagtaaagcaatgcaatgctcagtaacacagtgcagtgctcaataaggcagtgcagtgctcagtaaggcagtgaattgcttagtaacacagtgtagtgctcagtaggacagcatagtactcagtaacacagggcagctagtactcagtactataagtactgagtacttatataggcaatgtagtactcagtaaatcagtgcagtactcagtaatgcaagggcatttcaggctcctgctgggctgcttctttggcccagctgggactcctattgagacagctgcaaaacaggctgatttcaattaggcagcacttcccaaagtgcactgaggaaggtggccccaagagaagctctctaaacaaaggagtaccctctctggtcaagtacctttggtaaatacaccataccataatatctgcttggagaaccacaatgcacattagcatattagtctgagagagaacttatagtaaggaaactcacttgattttatctaacctcaaactttccaagtttaatggatcgtgaatttttttcatgtaactcctattcatatcccatagatctagtattgtacagcactgcattctctgaggaagtcccagtccaaactctgatttacatcactttagaaaccacactcacacttttgcagagtgttgagcttaataactacctgccacagattggtaaatttaatccagtggttgttctgtttgtgcttctgttctcatttatgtgtttagggatagtgaggttcctgccttcactaggatccacggatatgagaccatttttgtcatttcctgaagtcacactggcgtttccagaaggcatctggtgctttgctcagccttccatgctgtgcagcacttctgtcctcagtcaaggagatggccatgcttaagccagcaattggctggggtccaggaaacaaagcaaaagcacaatatgtgaatgtgctgattgtgttccctatggctttatctcgagcaaaatacactctacatattttaataataagtataattagcttgttcctggacttcattttcaatgatgaaccaaattcctgaattatttataattgtgtctaaagaaaattatgaactggtcacatggcacttggaatccttgagttaattccagtgaagcaaaacttgggaagagtcaggattggccacattgccaataacaaattcctacttcgacatatgtcttttcaaaaagcctcccagacacaagacatcttaaccgtcactagcccaagtgttttgtattactcagacaccatcatgaaataattctgtgaggtcatgatgtatttgaaaattctgcaagttaataactgccttgaattgtttgaacccgaaataagggttctttggtacctctagtagatagtgtgttcatttccctgctgcaaattttgaagtatttgggcaggtgagtcatgttttaaccacaagccataactcatctgttgtctttgcttggtcttagagtatcattcagaaagtccgctaagggccagcgtgcttcttctggctacacaaccttctcaggacaagcccactgtcttaagccactttgaccctgggagacacaggactgtgtatcctcaatcatactatacagcagtttttgtcaggggaacataaaaatatccaagagaggttagggcttagatttaaaagcatcaaaacaacaacaatggaaatttatgttggcgatagccaagaccacaagcaaaagcacatactggaaatgatgagttagaatctgatttgactgggatgttttatgagaatgtaagtgtgatattatactgtctgccttgctggaatgctggctttcaaatggtcacccatttttctttcactggcctgagttaggacatgctatcagtaatagtcccagttccatccaactttctgaaatttcatttttttttttgagatggagtctctctctgtcacccaagttggagtgcagtggccccgcaatctcggctcactgcaacctctacctcccaggttcaagctattctactgcctcagcctcccaagtagctggggttacaggcatttgccaccgggccctgatgatttttgtatttttagtagagacagggcttcaccatgttggctaggagggtctcaaactcctgacctcaggcgatccacccccacctcggcttcccaaagtgctgagattacaggtgtgagccaccgcacccggccaactttctgaaatttcaaaactgaattgatccttctccaaattagtatatactattggaaacttgtctttccctgcagtaaggctggtttccccaccccagaaacatgtaacggttggtaccatgctaagcccttgccatgctaagccctttacagtcatatcctataatccccatatcaaccttataaggaaggtgtttgtagatgatgcaactgagccttaagaggactaattccctttttctaaggcacagagctggtaaaatgtgaagtaatagtgaacctaacagtcagagacaggcagcatgctcttaactagtgctcttcctaaagttcctttaatgtccttttgagattttgagccatggaacttacttgttcacctggctaagaactcatggccactgtggaaatcttggttagggagtcaaagaaactgagcctggggcaaacgaggcttcccacactgccaggggagcctcactgtgaagtctaggctcagacaggcatcaacaaacctattcaccccaccatcatcctgatctaaccattccccagtcatcccaggaaaaccactcacagcctgacactgggctgactttcttgaagatcctcatccaattggtgtttttcagaagtgttccaatattatgaattctgtgttgtggagaaaagcaaccatgcatttactggtcaatgccttcttgtatatgtaattcaatacttttacttttaatatcctcaccttatctaatctttgaattttgtcatgtaatttattgcttcattaaggttactttttgttatacaaaataaaagctgatatccaaggcatggtgcatcttgatgattttttgtcctttgaagtatggatgatagaaaaatgtatcaggtttattcatctcatctttctgttacaggatgattaattgtacagttacatcacacgaaacatttataataaagtcatgctttagaa

SEQ ID NO: 199435 - protein, 195 aa, Artificial Sequence
  derived and/or modified sequence
MAPAASRLRAEAGLGALPRRALAQYLLFLRLYPVLTKAATSGILSALGNFLAQMIEKKRKKENSRSLDVGGPLRYAVYGFFFTGPLSHFFYFFMEHWIPPEVPLAGLRRLLLDRLVFAPAFLMLFFLIMNFLEGKDASAFAAKMRGGFWPALRMNWRVWTPLQFININYVPLKFRVLFANLAALFWYAYLASLGK

SEQ ID NO: 199436 - DNA, 588 bp, Artificial Sequence
  derived and/or modified sequence
atggcccccgccgccagcagactgagagccgaggccggcctgggcgccctgcccagaagagccctggcccagtacctgctgttcctgagactgtaccccgtgctgaccaaggccgccaccagcggcatcctgagcgccctgggcaacttcctggcccagatgatcgagaagaagagaaagaaggagaacagcagaagcctggacgtgggcggccccctgagatacgccgtgtacggcttcttcttcaccggccccctgagccacttcttctacttcttcatggagcactggatcccccccgaggtgcccctggccggcctgagaagactgctgctggacagactggtgttcgcccccgccttcctgatgctgttcttcctgatcatgaacttcctggagggcaaggacgccagcgccttcgccgccaagatgagaggcggcttctggcccgccctgagaatgaactggagagtgtggacccccctgcagttcatcaacatcaactacgtgcccctgaagttcagagtgctgttcgccaacctggccgccctgttctggtacgcctacctggccagcctgggcaagtag

SEQ ID NO: 199437 - DNA, 588 bp, Artificial Sequence
  derived and/or modified sequence
atggcacctgcagcctcccggctgcgggctgaggccggcctcggagccttaccccgtagagccttggcgcagtacttacttttcctccgactctacccagtcctcacgaaagcagctacctctggaatcctctccgcactggggaactttttggcccagatgattgagaaaaaaagaaagaaggagaacagcagaagccttgacgtgggggggccgctaagatacgcagtgtacggattttttttcacaggccccttgtctcacttcttctatttctttatggagcactggatccctccggaggtgcctctggcgggccttcgacggctactgttggaccgcctggtgtttgcaccggcctttctgatgctcttcttcttgataatgaacttcctggaggggaaagatgcctctgcctttgcagccaagatgaggggcggattctggcccgctttgaggatgaactggagggtgtggactcctcttcaattcattaacatcaattatgttccactcaagttccgtgtcctgttcgctaatttggccgctttgttctggtatgcgtacctggctagcctgggcaagtag

SEQ ID NO: 199438 - DNA, 504 bp, Artificial Sequence
  derived and/or modified sequence
atgccctttactggagaaagaagactttctttacggcgtcaggacgaaggcggactacttgccggagcagaggacgagctggccggtgtggacgcaactactgtccaccagcatcagctcagaccttctgaggtcccaggagcccttcgtcagcccgggagctccgttttggtatgcctgcccgggctgctgggcgaagtgacaaccgcaggacgtaccagcggcgcgctatggacgtgggtgtggggttcccatccaccgtctgaaagccgtaccaacccagtaaggatgtctctgactctgaatcaggccagaacaaccgtctctgatcagcgcgcggaggaagaaagaggcatctggggccgccgcgccggcgtgcaagcagggcctctgcagtctcaaggccatgcagcccacctgccccatcaggcctttcctgtgccacgcggttggctgcctggggagggcccccatagcgatcctgccggaagtggggccggctag

SEQ ID NO: 199439 - DNA, 588 bp, Artificial Sequence
  derived and/or modified sequence
atggccccagctgccagccggctgcgggcagaggccggcctgggcgccctgccccggcgggccctggcccagtacctgctcttcctgcggctgtaccctgtgctgaccaaggccgccaccagcggcatcctgagcgccctgggcaacttcctggcccagatgattgagaagaagaggaagaaggagaacagccgcagcctggatgtgggcggccccctgcgctatgctgtgtatggcttcttcttcaccggccccctgagccacttcttctacttcttcatggagcactggatccccccagaggtgcccctggccggcctgcggcggctgctgctggaccggctggtgtttgccccagccttcctgatgctgttcttcctgatcatgaacttcctggagggcaaggatgccagcgcctttgctgccaagatgaggggcggcttctggccagccctgaggatgaactggagggtgtggacccccctgcagttcatcaacatcaactacgtgcccctgaagttccgggtgctgtttgccaacctggccgccctcttctggtacgcctacctggccagcctgggcaagtag

SEQ ID NO: 199440 - DNA, 588 bp, Artificial Sequence
  derived and/or modified sequence
atggcccccgccgccagccggctgcgggccgaggccggcctgggcgctctccccagaagagcactcgcacaatacctcctcttcctgaggctttatccagtgctcacaaaggcagctacctcaggaatcctgtccgctctcggtaactttctcgcccagatgatcgagaagaagcgcaagaaggagaactccaggtccctggatgtcggtggccccctcagatatgccgtgtacggctttttctttactggacccctctcacacttcttttattttttcatggaacactggataccccccgaggtaccacttgcaggcttgcgccggttactcctcgacagactggtttttgctccggcctttctgatgctcttcttccttattatgaattttctggaaggtaaagacgcttctgcattcgctgcgaagatgcgtggagggttctggcctgcgttgcggatgaattggcgagtatggacgccccttcaatttatcaatatcaactacgtacctctcaagttccgagtgctgttcgccaacttggcggcactgttctggtatgcctatttggcatccctgggaaagtag

SEQ ID NO: 199441 - DNA, 957 bp, Artificial Sequence
  derived and/or modified sequence
gggctccgcgcccggccagcctgaggtggggtcggtgcccccggcggcacggcgctggggaggcgatggcgccggccgcgtccaggctgcgggccgaagccgggctcggggcgctgccgcggcgggcgctcgcccagtacctgctcttcctgcggctctacccggtgctcaccaaggcggccaccagtggcattttgtcagcacttgggaacttcctggcccagatgattgagaagaagcggaaaaaagaaaactctagaagtctggatgtcggtgggcctctgagatatgccgtttacgggttcttcttcacagggccgctgagtcacttcttctacttcttcatggaacattggatccctcctgaggtccccctggcagggctcaggaggcttctcctggaccgcctcgtctttgcaccggccttcctcatgttgttcttcctcatcatgaactttctggaggggaaagacgcctcagccttcgccgccaagatgagggggggcttctggccggcgctgaggatgaactggcgggtgtggacgccactacagttcatcaacatcaactacgtccctctgaagttccgggtgctcttcgccaacctggcagctctgttctggtatgcctacctggcctccttggggaagtgacgaccgctgggagaacatcaggtgcactgtggacgtgggtctgggggtctcacccgcccagcgagagcagaaccaatccagtcaggatgtcactgactctaaatcaggtgattcaagatgcccaaaaatgatggatagagaaacagaaatctctgaatgtcagaaccctgtcttttaaaaaggcagtcgctgccttcaggtggtgctgccccagaaacttaaaatttagtcgaggcagtttcaattgttactgtggaccgaattaggatcacaataaacgataatgcaggttcttcaatggtga

SEQ ID NO: 199442 - DNA, 588 bp, Artificial Sequence
  derived and/or modified sequence
atggcccctgcagcatcccggttgagggcggaagcgggactaggtgccctgcctaggcgagccttggcacaatatctcctgtttctgcgcttgtacccagttttgactaaggcagcaacctcaggtatattgtccgccctgggcaatttcctggcgcagatgattgagaaaaagagaaagaaggaaaattcgcgctcactcgatgttggtggaccgcttcgctacgcagtgtacggtttcttcttcactggcccattgagccacttcttctacttctttatggaacactggattccccctgaagtaccgcttgccggtctccggcgtctactgctggaccgactggtgtttgctccagccttcctcatgctatttttccttattatgaacttcctggaaggcaaggatgccagcgctttcgctgcgaagatgaggggcggattctggcccgctttgcgcatgaattggcgggtttggaccccccttcagtttatcaatattaactacgtgcccctgaagttcagggtactgtttgccaatctggcagccctgttttggtacgcttatctcgcgtctcttgggaaatag

SEQ ID NO: 199443 - protein, 648 aa, Artificial Sequence
  derived and/or modified sequence
MSHHGGAPKASTWVVASRRSSTVSRAPERRPAEELNRTGPEGYSVGRGGRWRGTSRPPEAVAAGHEELPLCFALKSHFVGAVIGRGGSKIKNIQSTTNTTIQIIQEQPESLVKIFGSKAMQTKAKAVIDNFVKKLEENYNSECGIDTAFQPSVGKDGSTDNNVVAGDRPLIDWDQIREEGLKWQKTKWADLPPIKKNFYKESTATSAMSKVEADSWRKENFNITWDDLKDGEKRPIPNPTCTFDDAFQCYPEVMENIKKAGFQKPTPIQSQAWPIVLQGIDLIGVAQTGTGKTLCYLMPGFIHLVLQPSLKGQRNRPGMLVLTPTRELALQVEGECCKYSYKGLRSVCVYGGGNRDEQIEELKKGVDIIIATPGRLNDLQMSNFVNLKNITYLVLDEADKMLDMGFEPQIMKILLDVRPDRQTVMTSATWPHSVHRLAQSYLKEPMIVYVGTLDLVAVSSVKQNIIVTTEEEKWSHMQTFLQSMSSTDKVIVFVSRKAVADHLSSDLILGNISVESLHGDREQRDREKALENFKTGKVRILIATDLASRGLDVHDVTHVYNFDFPRNIEEYVHRIGRTGRAGRTGVSITTLTRNDWRVASELINILERANQSIPEELVSMAERFKAHQQKREMERKMERPQGRPKKFH

SEQ ID NO: 199444 - protein, 195 aa, Artificial Sequence
  derived and/or modified sequence
MSHHGGAPKASTWVVASRRSSTVSRAPERRPAEELNRTGPEGYSVGRGGRWRGTSRPPEAVAAGHEELPLCFALKSHFVGAVIGRGGSKIKNIQSTTNTTIQIIQEQPESLVKIFGSKAMQTKAKAVIDNFVKKLEENYNSECGIDTAFQPSVGKDGSTDNNVVAGDRPLIDWDQIREEGLKWQKTKWAGKKILI

SEQ ID NO: 199445 - DNA, 76 bp, Artificial Sequence
  derived and/or modified sequence
aatggaatgcaatcgaatggaatggaatcgaacggaatggaataaaatggaagaaaactggcaagaaatggaatcg

SEQ ID NO: 199446 - DNA, 68 bp, Artificial Sequence
  derived and/or modified sequence
gcaatcgaatggaatggaatcgaacggaatggaataaaatggaagaaaactggcaagaaatggaatcg

SEQ ID NO: 199447 - DNA, 85 bp, Artificial Sequence
  derived and/or modified sequence
aaggattcgaatggaatgcaatcgaatggaatggaatcgaacggaatggaataaaatggaagaaaactggcaagaaatggaatcg

SEQ ID NO: 199448 - DNA, 1947 bp, Artificial Sequence
  derived and/or modified sequence
atgtcgcatcatgggggagcgcccaaggccagtacttgggtagtggccagcagacggagtagcaccgtgtctcgggcacccgagcggagaccagccgaagaactgaatcgaactggacctgagggttattccgtgggaagaggcggcaggtggagaggaacgtccaggccacctgaagctgtggctgccggacacgaagagctcccactgtgcttcgcacttaagtcccactttgtgggtgccgtcatcggaaggggcggaagtaagatcaagaacattcagagtacgacaaataccaccattcagatcattcaggaacagcctgaatctttggttaaaattttcggctctaaagcaatgcagaccaaagcgaaggcggtcatcgacaactttgtgaagaagttagaggaaaactataattccgaatgtggaattgacacagcttttcagcccagcgtcggtaaagacgggtcaaccgacaacaacgtagtggccggagaccggccactcattgactgggatcaaatccgggaggaaggcttgaaatggcagaagaccaaatgggccgatcttccacccatcaaaaagaacttttacaaagaaagcacagccacgagcgccatgtctaaggtggaggctgactcctggagaaaggaaaactttaatatcacttgggatgatctgaaggacggggagaaaagacctataccaaacccaacctgcacatttgacgatgccttccagtgctacccagaagtgatggagaacattaagaaggcaggattccagaaacctactcccatccagtcccaggcatggcctattgtgctgcagggcatcgatctgattggcgttgcccagaccgggacaggaaaaactctgtgctatctgatgcctggcttcatccacctcgttctgcagccttcgctcaagggtcagcgcaatcgacccggcatgctggttctgacgccaactagggagctggctctgcaggtggagggggagtgctgtaaatacagttacaagggcctgaggtccgtgtgtgtatatggcggcggaaatcgagacgaacagattgaagagctcaaaaagggtgttgacatcattatcgctactccgggccgcctgaacgacctgcagatgtctaacttcgtgaatcttaaaaatataacatacctagtgctggatgaggccgacaagatgctggacatgggctttgagccccaaattatgaaaattctccttgatgtgcgcccagaccgccagacagtgatgacctcggccacctggccccactctgttcatcggctggcacagtcttatctaaaggagcccatgatcgtatatgttggaaccctggacttagtggctgtcagttcagtaaagcagaatatcatagtcaccactgaagaagagaaatggtcacacatgcaaacattcctgcagagtatgtccagcacagataaggttattgttttcgtcagcagaaaggccgttgccgatcatctatcaagcgacctcatcttgggcaatatctccgtcgagagtcttcacggggaccgcgagcaaagggaccgagagaaggctctagaaaactttaagactggaaaggtgaggatcttgatcgcaactgaccttgcatcaagaggacttgatgtccacgatgtcactcacgtgtataatttcgattttccgcggaatatcgaggagtacgtgcacagaattggacggaccggtagggcagggcgaacaggagtgtctatcactacactgactagaaatgattggcgggtggcatcagagcttatcaatatccttgaaagagctaaccagtctatacccgaggaactcgtgtcaatggcggaaagattcaaggctcatcagcagaagagggaaatggagcgcaagatggaaaggccccaaggccgtcctaagaagtttcattag

SEQ ID NO: 199449 - DNA, 588 bp, Artificial Sequence
  derived and/or modified sequence
atgtcccaccacggcggggccccaaaagcgtccacgtgggtagttgcttctcggcggtcatctactgtgagccgcgctccagaaagaagacccgctgaggagctgaatagaacagggcctgagggatactcggtcggccgaggtggtcggtggagaggtacttctaggccccccgaggcagtggccgccggccatgaagaactgcctctgtgtttcgcccttaaatcacactttgtaggagccgtcattggccggggtgggtctaagatcaagaacattcagtccaccactaacacaacaatccagatcatccaggaacagcctgagagccttgtaaagatctttggcagcaaggccatgcagactaaggcaaaggcagtgatcgacaactttgttaagaaactggaagagaactataattctgagtgcggtattgacactgccttccaaccctcggtagggaaagatggctccaccgacaataatgttgtcgccggggatcgaccactgatagattgggaccagataagggaggagggactaaaatggcagaaaacaaaatgggccggaaaaaagatcctgatttag

SEQ ID NO: 199450 - DNA, 1947 bp, Artificial Sequence
  derived and/or modified sequence
atgagccaccacggcggggcccccaaggccagcacctgggtggtggccagccgccgcagcagcacagtgtcccgggcccctgagaggaggcctgctgaggagctgaacagaacaggccctgagggctacagcgtgggccggggcggccgctggaggggcaccagcaggcctcctgaggccgtggccgccggccacgaggagctgcccctgtgctttgccctgaagagccactttgtgggcgctgtgattggccggggcggcagcaagatcaagaacatccagagcaccaccaacaccaccatccagatcatccaggagcagcctgagagcctggtgaagatcttcggcagcaaggccatgcagaccaaggccaaggccgtcatcgacaactttgtgaagaagctggaggagaactacaacagtgaatgtggcatcgacacagccttccagcccagcgtgggcaaggatggcagcacagacaacaacgtggtggccggggaccggcccctgattgactgggaccagatccgggaggagggcctgaagtggcagaagaccaagtgggccgacctgccccccatcaagaagaacttctacaaggagagcacagccaccagcgccatgagcaaggtggaggccgacagctggaggaaagaaaacttcaacatcacctgggatgacctgaaggatggagagaagaggcccatccccaaccccacctgcacctttgatgatgccttccagtgctacccagaggtgatggagaacatcaagaaggccggcttccagaagcccacccccatccagagccaggcctggcccatcgtgctgcagggcatcgacctgattggagtggcccagacaggcaccgggaagaccctgtgctacctgatgcctggcttcatccacctggtgctgcagcccagcctgaagggccagaggaacagacctggcatgctggtgctgacccccacccgggagctggccctgcaggtggagggggagtgctgcaagtacagctacaagggcctgcggtctgtgtgtgtgtatggaggcggcaacagagatgagcagatcgaggagctgaagaagggcgtggacatcatcatcgccaccccaggccgcctgaatgacctgcagatgagcaactttgtgaacctgaagaacatcacctacctggtgctggatgaggccgacaagatgctggacatgggctttgagccccagatcatgaagatcctgctggatgtgcggccagaccggcagacagtgatgaccagcgccacctggccccacagcgtgcaccggctggcccagagctacctgaaggagcccatgattgtgtatgtgggcaccctggacctggtggccgtgtcctctgtgaagcagaacatcatcgtgaccacagaggaggagaagtggagccacatgcagaccttcctgcagagcatgagcagcacagacaaggtgattgtgtttgtgtccaggaaggctgtggccgaccacctgagcagtgacctgatcctgggcaacatctctgtggagagcctgcacggggaccgggagcagagggaccgggagaaggccctggagaacttcaagacaggcaaggtgcgcatcctgattgccacagacctggccagccggggcctggatgtgcatgatgtgacccacgtgtacaactttgacttccccaggaacatcgaggagtatgtgcacagaattggaagaacaggccgggccggccgcactggagtgtccatcaccaccctgaccagaaatgactggagggtggccagcgagctgatcaacatcctggagcgggccaaccagagcatccctgaggagctggtgtccatggccgagcgcttcaaggcccaccagcagaagcgggagatggagaggaagatggagcggccccagggccggcccaagaagttccactag

SEQ ID NO: 199451 - DNA, 588 bp, Artificial Sequence
  derived and/or modified sequence
atgagccaccacggcggggcccccaaggccagcacctgggtggtggccagccgccgcagcagcacagtgtcccgggcccctgagaggaggcctgctgaggagctgaacagaacaggccctgagggctacagcgtgggccggggcggccgctggaggggcaccagcaggcctcctgaggccgtggccgccggccacgaggagctgcccctgtgctttgccctgaagagccactttgtgggcgctgtgattggccggggcggcagcaagatcaagaacatccagagcaccaccaacaccaccatccagatcatccaggagcagcctgagagcctggtgaagatcttcggcagcaaggccatgcagaccaaggccaaggccgtcatcgacaactttgtgaagaagctggaggagaactacaacagtgaatgtggcatcgacacagccttccagcccagcgtgggcaaggatggcagcacagacaacaacgtggtggccggggaccggcccctgattgactgggaccagatccgggaggagggcctgaagtggcagaagaccaagtgggccggcaagaagatcctgatctag

SEQ ID NO: 199452 - DNA, 1947 bp, Artificial Sequence
  derived and/or modified sequence
atgagccaccacggcggcgcccccaaggccagcacctgggtggtggcatcccggagatcttcaacggtgagccgcgccccagaacggcggcccgcggaagagctgaaccgcactgggcccgaagggtacagcgtggggcgcggtggtagatggcgtggaacatctcggccccctgaagccgttgccgccgggcacgaggagctgcccctgtgcttcgccctcaaatcccatttcgtaggggccgtcatcgggagaggggggtcaaagattaaaaatatccagagcacgactaatacgaccatccaaattatacaagagcagcccgagagcttggtgaaaattttcggatcaaaggcgatgcagacaaaagcgaaagcggtcatagacaattttgtcaaaaaactagaggagaactacaacagcgaatgcgggatagacaccgccttccagccatctgtggggaaggacggatccacagacaacaatgttgtggccggtgaccgcccattgattgactgggatcaaataagggaagaaggccttaaatggcagaaaacaaagtgggcagacttaccgccaatcaagaagaacttctataaggaaagtactgcaacttcagctatgtccaaggttgaagccgattcctggcgtaaggagaattttaacataacctgggatgacctgaaggatggcgagaagagacccattcctaatcccacatgtaccttcgacgatgcatttcagtgctaccccgaggtaatggaaaacattaaaaaagctgggtttcagaagcccaccccaattcagtcgcaagcttggcccattgtgttgcaggggattgacctgattggggtggcccaaaccggaactgggaaaaccctatgctacctgatgccaggctttatccacctggtgcttcagcctagccttaaaggacagaggaataggccaggcatgctcgtgttaacaccgacacgcgaactggcgctgcaggtggaaggcgagtgttgcaagtactcttacaaagggctgcgctcagtctgcgtgtatggcggaggcaatagggacgaacaaatcgaggaactgaaaaagggcgtcgacataatcatagccaccccagggcgtcttaatgatctgcagatgagtaatttcgtaaacctaaagaatatcacctacttagtgcttgatgaggcggataaaatgctagacatgggtttcgaaccacagatcatgaagatccttctggacgtgaggccagaccgccagactgtgatgacaagcgccacgtggccccattccgtacaccggctggctcagagttatctgaaagagcctatgattgtatatgtggggaccctggatctggttgctgtgagcagcgtcaagcagaatataatcgtgaccactgaggaagaaaagtggtcacacatgcagaccttcctgcagagtatgagtagtaccgacaaagtgattgtcttcgtgtctcgcaaggctgtggcggatcacctgtcttccgacctcatccttgggaacatatcggtggagagccttcacggagatagagagcagagggatcgcgagaaagccctagagaatttcaagaccggcaaggttaggatattgattgccacggacctcgcgtctagagggttagacgttcatgatgttacccacgtctacaacttcgactttccacggaacattgaagaatacgtgcaccggatcggacggaccggtcgggcaggccggaccggggtatccattactactctcactagaaacgattggcgcgtggccagcgagttaatcaacatcctagaacgcgccaatcaatccatcccggaggagctcgtatctatggccgaacggttcaaagcgcaccagcagaaacgggagatggagagaaagatggagagaccacaggggagaccgaagaaattccattag

SEQ ID NO: 199453 - DNA, 588 bp, Artificial Sequence
  derived and/or modified sequence
atgagccaccacggcggcgcccccaaggccagcacctgggtggtggcttcacgaaggtccagcacagtttcgcgggctccagaaagaagacccgcagaggaactgaacaggaccggtcctgagggatactccgtggggagaggaggccgctggcgcggcacgtcaaggccaccggaggctgtagcagccggccatgaggaactccccctctgtttcgccctaaagagccatttcgtgggggctgttattggacggggaggtagcaagataaaaaatattcagagtaccaccaataccaccattcagatcatccaggaacaaccggagagtctggttaagatcttcggcagcaaagccatgcagactaaggccaaagctgtcattgacaacttcgtaaagaaactggaggaaaactataatagtgaatgcggcattgacaccgccttccagccatccgtgggaaaagatggttcaactgacaataatgtggttgccggagaccggccgctaatcgattgggaccaaattcgagaggaaggtctgaagtggcagaagacaaaatgggctggaaaaaagattctcatttag

SEQ ID NO: 199454 - DNA, 1947 bp, Artificial Sequence
  derived and/or modified sequence
atgtctcatcatgggggtgccccaaaagcatcaacatgggtcgtagcatccagaaggagttccacagtgtctcgcgcaccggaacgcagaccagccgaggagctgaaccggacgggccctgagggatactctgtcgggaggggcggacgatggcggggaaccagccgtcctccagaggctgtcgctgcgggtcacgaggagctccccctgtgtttcgctttgaagagtcactttgttggcgcagttatcggccgaggaggctcgaaaatcaagaacatccagagcactacgaatactaccatacagattatccaggagcagcccgagagcctcgtgaaaatatttgggtctaaagccatgcagaccaaggcaaaagccgtgatcgacaatttcgtgaagaagctcgaggaaaattacaattccgaatgtggcattgataccgcttttcagccttcagtcggcaaggacgggagtactgataacaatgtagttgctggtgatcggccactgatcgattgggatcagattagggaggaaggactcaaatggcagaagacgaaatgggccgatcttccacctataaaaaaaaatttctacaaggagagcacagccaccagcgccatgtcaaaggtagaggctgatagttggagaaaggaaaattttaatataacttgggatgacctgaaagatggagaaaaacgcccaattccgaaccccacctgcacgttcgatgacgcatttcagtgttacccagaggttatggaaaacattaagaaggctgggttccaaaaaccgacccctatccagtcccaggcatggcctatcgtgcttcagggcatcgacctgatcggcgtagcccaaacaggaacaggcaagacactttgttacctcatgcccggttttattcatctggttctgcagccctcgctgaaaggtcagaggaacaggcctggtatgctcgtgctgacgcctactcgcgaactagctctacaggtggaaggagaatgctgcaagtactcctacaagggacttagaagcgtttgtgtttatgggggaggtaatcgggacgaacagatcgaggaactaaaaaagggcgttgatataataatcgcaaccccaggacgtctcaatgacctgcagatgtccaactttgttaatctcaaaaatattacctatcttgtcctggatgaggctgacaaaatgctggacatggggttcgagccacagataatgaaaatcctcctggatgtccggcctgacagacaaacagttatgacctcagcgacatggcctcattctgtgcaccgtttggcacagtcttaccttaaagagccaatgattgtctatgtgggcacgcttgacctcgtggccgtgtccagcgtcaaacagaacatcatcgtgacgactgaggaagagaagtggtcacacatgcaaacctttctgcaatctatgtcaagtactgacaaggtcatcgtctttgtgtcccgcaaggcagtcgctgatcacctcagctcagatctcattctcgggaatataagtgtggagtccctacatggagaccgagagcaaagggaccgtgaaaaggcactggaaaactttaagacaggcaaggttagaattttgattgccacagatttggctagccgaggactagatgtacacgacgtgactcatgtatataattttgatttcccacgaaatattgaagaatatgtgcatagaatcggtagaactggacgggcaggccgtactggcgtgtctatcactaccttaaccaggaatgattggagggttgcgtccgaacttattaacattctggaaagagccaatcaatcgatacctgaagagttggtttcaatggcggaaagattcaaagcccaccagcagaagcgggagatggaacgcaagatggagaggccccaaggacgaccgaagaaattccattag

SEQ ID NO: 199455 - DNA, 588 bp, Artificial Sequence
  derived and/or modified sequence
atgagtcatcatgggggtgccccaaaagcctctacatgggtggtggcgtcccggagatcttcaaccgtgtctagggcaccggagcgcagacctgcggaagaactcaacaggactggccctgagggctactccgtcgggaggggaggcagatggaggggcacctcccggcctcctgaggcagtggcagcaggtcacgaggagttgccgttgtgttttgccctgaagtcccacttcgtgggggctgtgatcggtaggggtgggtcgaagataaaaaacattcaatctacaaccaatacaaccatccagattatacaggaacagcccgaaagccttgtgaaaattttcggttcaaaggctatgcaaactaaggcgaaggcagtcatagacaattttgtaaagaaactggaggagaactacaattccgagtgcgggattgacaccgcattccaaccatctgtgggtaaagacggatcaaccgacaataatgtggtggccggtgaccgccctttaattgactgggaccagatccgcgaagaaggcttgaagtggcagaagacaaaatgggcaggcaagaaaatattgatctag

SEQ ID NO: 199456 - DNA, 2513 bp, Artificial Sequence
  derived and/or modified sequence
agtgggcgggatagagagcgtgggcgggggggctagcctcgtgcgggctccttaagtagcggctgcgtggcttccctggcacgctactcttacgacgtcacggtcaggtggtgcagagctggacggcaacgacgtcggacgcgccccttcttggaacaatgtcccaccacggaggagctcccaaggcctctacgtgggtcgttgctagtcggcgaagctcgacagtgtcccgagcgccagagaggaggccggcggaggagttgaatcgaacaggtcctgagggatatagtgtcggcagaggtggtcgctggagaggcacctctaggcccccggaggccgtggccgctggtcacgaggaactgccgctgtgttttgctttgaagagccactttgttggcgcggtaatcggtcgtggtgggtcaaaaataaagaatatacaaagtacaacaaacaccacaatccaaataatacaagaacaaccagaatcattagtcaaaatttttggcagcaaggcaatgcaaacgaaagcaaaagcagtgatagacaattttgttaaaaagctagaagaaaattacaattcagaatgcggaattgatactgcattccaaccttctgttggaaaagatggaagcacagataacaatgttgttgcaggagatcggccattgatagattgggatcaaattagagaggaaggtttgaaatggcaaaaaacaaagtgggcagatttaccaccaattaagaaaaacttttataaagagtccactgccacaagtgccatgtcaaaagtagaagcagatagttggaggaaagaaaattttaatataacgtgggatgacttgaaggatggggagaaacgacctatccccaatcctacctgcacatttgatgacgcctttcaatgttatcctgaggttatggaaaacattaaaaaggcaggttttcaaaagccaacacctattcagtcacaggcatggcccattgtgttgcaaggaatagatcttataggagtagcccagactggaacaggaaagacattgtgttatttaatgcctggatttattcatctggtccttcaacccagccttaaaggtcaaaggaatagacccggcatgttagttctaactcccactcgggaattagcacttcaagtagaaggagaatgttgcaaatattcatataaagggcttcggagtgtttgtgtatatggtggtggaaatagagatgaacaaatagaagagcttaaaaaaggtgtagatatcataattgcaactcccggaagattgaatgatctgcaaatgagtaacttcgtcaatctgaagaatataacctacttggttttagatgaagcagacaagatgttggacatgggatttgaaccccagataatgaagattttgttagatgtgcgcccagataggcagacagttatgaccagtgctacatggcctcattcagttcatcgcctcgcacaatcttatttgaaagaaccaatgattgtctatgttggtacattggatctagttgctgtaagttcagtgaagcaaaatataattgtaaccaccgaggaagagaaatggagtcacatgcaaacttttctacagagtatgtcatccacagacaaagtcattgtcttcgtttctcgaaaagctgttgcggatcacttatcaagtgacctaatacttggaaatatatcagtagagtctctgcatggagatagagaacagagagatcgggagaaagcattagagaactttaaaacaggcaaagtgagaatactaattgcaactgatctagcctctagaggacttgatgtccatgacgttacacatgtctataattttgactttccacggaatattgaagaatacgtacaccgaatagggcgcacgggaagagcagggaggactggtgtttccattacaactttgactagaaatgattggagggttgcctctgaattgattaatattctggaaagagcaaatcagagtattccagaggagcttgtatcaatggctgagaggtttaaggcacatcaacagaaaagggaaatggaaagaaaaatggaaagacctcaaggaaggcccaagaagtttcattaatgtcttctgtactagtggggtagagaattcaagattttttagaaatatagtaagacggaagtattggacatgttggcagtatgaagagaccggactgatttgactgattcttaaaataatagtgtttgaaaatatagaatccagtgttttatactttctttaataaaaatagaagtatttaaacttggaagttgtttcctggatttttattaaggagtgtagcattagaatgtttttcttttaatcttttaaactgtctcctgtaattttgctgtatgtcataaggccagtctttcagaatttaatgttcagattttgtcatggcagtgaaaaagatgttttcaaacaaagaatcagcacctgaaaaaatactgttaataaatgttcgtttctgtgataaaaagacaa

SEQ ID NO: 199457 - DNA, 1057 bp, Artificial Sequence
  derived and/or modified sequence
aggtggtgcagagctggacggcaacgacgtcggacgcgccccttcttggaacaatgtcccaccacggaggagctcccaaggcctctacgtgggtcgttgctagtcggcgaagctcgacagtgtcccgagcgccagagaggaggccggcggaggagttgaatcgaacaggtcctgagggatatagtgtcggcagaggtggtcgctggagaggcacctctaggcccccggaggccgtggccgctggtcacgaggaactgccgctgtgttttgctttgaagagccactttgttggcgcggtaatcggtcgtggtgggtcaaaaataaagaatatacaaagtacaacaaacaccacaatccaaataatacaagaacaaccagaatcattagtcaaaatttttggcagcaaggcaatgcaaacgaaagcaaaagcagtgatagacaattttgttaaaaagctagaagaaaattacaattcagaatgcggaattgatactgcattccaaccttctgttggaaaagatggaagcacagataacaatgttgttgcaggagatcggccattgatagattgggatcaaattagagaggaaggtttgaaatggcaaaaaacaaagtgggcaggaaagaaaattttaatataacgtgggatgacttgaaggatggggagaaacgacctatccccaatcctacctgcacatttgatgacgcctttcaatgttatcctgaggttatggaaaacattaaaaaggcaggttttcaaaagccaacacctattcagtcacaggcatggcccattgtgttgcaaggaatagatcttataggagtagcccagactggaacaggaaagacattgtgttatttaatgcctggatttattcatctggtccttcaacccagccttaaaggtcaaaggaatagacccggcatgttagttctaactcccactcgggaattagcacttcaagtagaaggagaatgttgcaaatattcatataaagggcttcggagtgtttgtgtatatggtggtggaaatagagatgaacaaatagaagagctt

SEQ ID NO: 199458 - DNA, 1947 bp, Artificial Sequence
  derived and/or modified sequence
atgagccaccacggcggcgcccccaaggccagcacctgggtggtggccagcagaagaagcagcaccgtgagcagagcccccgagagaagacccgccgaggagctgaacagaaccggccccgagggctacagcgtgggcagaggcggcagatggagaggcaccagcagaccccccgaggccgtggccgccggccacgaggagctgcccctgtgcttcgccctgaagagccacttcgtgggcgccgtgatcggcagaggcggcagcaagatcaagaacatccagagcaccaccaacaccaccatccagatcatccaggagcagcccgagagcctggtgaagatcttcggcagcaaggccatgcagaccaaggccaaggccgtgatcgacaacttcgtgaagaagctggaggagaactacaacagcgagtgcggcatcgacaccgccttccagcccagcgtgggcaaggacggcagcaccgacaacaacgtggtggccggcgacagacccctgatcgactgggaccagatcagagaggagggcctgaagtggcagaagaccaagtgggccgacctgccccccatcaagaagaacttctacaaggagagcaccgccaccagcgccatgagcaaggtggaggccgacagctggagaaaggagaacttcaacatcacctgggacgacctgaaggacggcgagaagagacccatccccaaccccacctgcaccttcgacgacgccttccagtgctaccccgaggtgatggagaacatcaagaaggccggcttccagaagcccacccccatccagagccaggcctggcccatcgtgctgcagggcatcgacctgatcggcgtggcccagaccggcaccggcaagaccctgtgctacctgatgcccggcttcatccacctggtgctgcagcccagcctgaagggccagagaaacagacccggcatgctggtgctgacccccaccagagagctggccctgcaggtggagggcgagtgctgcaagtacagctacaagggcctgagaagcgtgtgcgtgtacggcggcggcaacagagacgagcagatcgaggagctgaagaagggcgtggacatcatcatcgccacccccggcagactgaacgacctgcagatgagcaacttcgtgaacctgaagaacatcacctacctggtgctggacgaggccgacaagatgctggacatgggcttcgagccccagatcatgaagatcctgctggacgtgagacccgacagacagaccgtgatgaccagcgccacctggccccacagcgtgcacagactggcccagagctacctgaaggagcccatgatcgtgtacgtgggcaccctggacctggtggccgtgagcagcgtgaagcagaacatcatcgtgaccaccgaggaggagaagtggagccacatgcagaccttcctgcagagcatgagcagcaccgacaaggtgatcgtgttcgtgagcagaaaggccgtggccgaccacctgagcagcgacctgatcctgggcaacatcagcgtggagagcctgcacggcgacagagagcagagagacagagagaaggccctggagaacttcaagaccggcaaggtgagaatcctgatcgccaccgacctggccagcagaggcctggacgtgcacgacgtgacccacgtgtacaacttcgacttccccagaaacatcgaggagtacgtgcacagaatcggcagaaccggcagagccggcagaaccggcgtgagcatcaccaccctgaccagaaacgactggagagtggccagcgagctgatcaacatcctggagagagccaaccagagcatccccgaggagctggtgagcatggccgagagattcaaggcccaccagcagaagagagagatggagagaaagatggagagaccccagggcagacccaagaagttccactag

SEQ ID NO: 199459 - DNA, 588 bp, Artificial Sequence
  derived and/or modified sequence
atgagccaccacggcggcgcccccaaggccagcacctgggtggtggccagcagaagaagcagcaccgtgagcagagcccccgagagaagacccgccgaggagctgaacagaaccggccccgagggctacagcgtgggcagaggcggcagatggagaggcaccagcagaccccccgaggccgtggccgccggccacgaggagctgcccctgtgcttcgccctgaagagccacttcgtgggcgccgtgatcggcagaggcggcagcaagatcaagaacatccagagcaccaccaacaccaccatccagatcatccaggagcagcccgagagcctggtgaagatcttcggcagcaaggccatgcagaccaaggccaaggccgtgatcgacaacttcgtgaagaagctggaggagaactacaacagcgagtgcggcatcgacaccgccttccagcccagcgtgggcaaggacggcagcaccgacaacaacgtggtggccggcgacagacccctgatcgactgggaccagatcagagaggagggcctgaagtggcagaagaccaagtgggccggcaagaagatcctgatctag

SEQ ID NO: 199460 - protein, 904 aa, Artificial Sequence
  derived and/or modified sequence
MQASPLQTSQPTPPEELHAAAYVFTNDGQQMRSDEVNLVATGHQSKKKHSRKSKRHSSSKRRKSMSSWLDKQEDAAVTHSICEERINNGQPVADNVLSTAPPWPDATIAHNIREERMENGQSRTDKVLSTAPPQLVHMAAAGIPSMSTRDLHSTVTHNIREERMENGQPQPDNVLSTGPTGLINMAATPIPAMSARDLYATVTHNVCEQKMENVQPAPDNVLLTLRPRRINMTDTGISPMSTRDPYATITYNVPEEKMEKGQPQPDNILSTASTGLINVAGAGTPAISTNGLYSTVPHNVCEEKMENDQPQPNNVLSTVQPVIIYLTATGIPGMNTRDQYATITHNVCEERVVNNQPLPSNALSTVLPGLAYLATADMPAMSTRDQHATIIHNLREEKKDNSQPTPDNVLSAVTPELINLAGAGIPPMSTRDQYATVNHHVHEARMENGQRKQDNVLSNVLSGLINMAGASIPAMSSRDLYATITHSVREEKMESGKPQTDKVISNDAPQLGHMAAGGIPSMSTKDLYATVTQNVHEERMENNQPQPSYDLSTVLPGLTYLTVAGIPAMSTRDQYATVTHNVHEEKIKNGQAASDNVFSTVPPAFINMAATGVSSMSTRDQYAAVTHNIREEKINNSQPAPGNILSTAPPWLRHMAAAGISSTITRDLYVTATHSVHEEKMTNGQQAPDNSLSTVPPGCINLSGAGISCRSTRDLYATVIHDIQEEEMENDQTPPDGFLSNSDSPELINMTGHCMPPNALDSFSHDFTSLSKDELLYKPDSNEFAVGTKNYSVSAGDPPVTVMSLVETVPNTPQISPAMAKKINDDIKYQLMKEVRRFGQNYERIFILLEEVQGSMKVKRQFVEFTIKEAARFKKVVLIQQLEKALKEIDSHCHLRKVKHMRKR

SEQ ID NO: 199461 - DNA, 2715 bp, Artificial Sequence
  derived and/or modified sequence
atgcaggccagccccctgcagaccagccagcccaccccccccgaggagctgcacgccgccgcctacgtgttcaccaacgacggccagcagatgagaagcgacgaggtgaacctggtggccaccggccaccagagcaagaagaagcacagcagaaagagcaagagacacagcagcagcaagagaagaaagagcatgagcagctggctggacaagcaggaggacgccgccgtgacccacagcatctgcgaggagagaatcaacaacggccagcccgtggccgacaacgtgctgagcaccgcccccccctggcccgacgccaccatcgcccacaacatcagagaggagagaatggagaacggccagagcagaaccgacaaggtgctgagcaccgcccccccccagctggtgcacatggccgccgccggcatccccagcatgagcaccagagacctgcacagcaccgtgacccacaacatcagagaggagagaatggagaacggccagccccagcccgacaacgtgctgagcaccggccccaccggcctgatcaacatggccgccacccccatccccgccatgagcgccagagacctgtacgccaccgtgacccacaacgtgtgcgagcagaagatggagaacgtgcagcccgcccccgacaacgtgctgctgaccctgagacccagaagaatcaacatgaccgacaccggcatcagccccatgagcaccagagacccctacgccaccatcacctacaacgtgcccgaggagaagatggagaagggccagccccagcccgacaacatcctgagcaccgccagcaccggcctgatcaacgtggccggcgccggcacccccgccatcagcaccaacggcctgtacagcaccgtgccccacaacgtgtgcgaggagaagatggagaacgaccagccccagcccaacaacgtgctgagcaccgtgcagcccgtgatcatctacctgaccgccaccggcatccccggcatgaacaccagagaccagtacgccaccatcacccacaacgtgtgcgaggagagagtggtgaacaaccagcccctgcccagcaacgccctgagcaccgtgctgcccggcctggcctacctggccaccgccgacatgcccgccatgagcaccagagaccagcacgccaccatcatccacaacctgagagaggagaagaaggacaacagccagcccacccccgacaacgtgctgagcgccgtgacccccgagctgatcaacctggccggcgccggcatcccccccatgagcaccagagaccagtacgccaccgtgaaccaccacgtgcacgaggccagaatggagaacggccagagaaagcaggacaacgtgctgagcaacgtgctgagcggcctgatcaacatggccggcgccagcatccccgccatgagcagcagagacctgtacgccaccatcacccacagcgtgagagaggagaagatggagagcggcaagccccagaccgacaaggtgatcagcaacgacgccccccagctgggccacatggccgccggcggcatccccagcatgagcaccaaggacctgtacgccaccgtgacccagaacgtgcacgaggagagaatggagaacaaccagccccagcccagctacgacctgagcaccgtgctgcccggcctgacctacctgaccgtggccggcatccccgccatgagcaccagagaccagtacgccaccgtgacccacaacgtgcacgaggagaagatcaagaacggccaggccgccagcgacaacgtgttcagcaccgtgccccccgccttcatcaacatggccgccaccggcgtgagcagcatgagcaccagagaccagtacgccgccgtgacccacaacatcagagaggagaagatcaacaacagccagcccgcccccggcaacatcctgagcaccgcccccccctggctgagacacatggccgccgccggcatcagcagcaccatcaccagagacctgtacgtgaccgccacccacagcgtgcacgaggagaagatgaccaacggccagcaggcccccgacaacagcctgagcaccgtgccccccggctgcatcaacctgagcggcgccggcatcagctgcagaagcaccagagacctgtacgccaccgtgatccacgacatccaggaggaggagatggagaacgaccagaccccccccgacggcttcctgagcaacagcgacagccccgagctgatcaacatgaccggccactgcatgccccccaacgccctggacagcttcagccacgacttcaccagcctgagcaaggacgagctgctgtacaagcccgacagcaacgagttcgccgtgggcaccaagaactacagcgtgagcgccggcgacccccccgtgaccgtgatgagcctggtggagaccgtgcccaacaccccccagatcagccccgccatggccaagaagatcaacgacgacatcaagtaccagctgatgaaggaggtgagaagattcggccagaactacgagagaatcttcatcctgctggaggaggtgcagggcagcatgaaggtgaagagacagttcgtggagttcaccatcaaggaggccgccagattcaagaaggtggtgctgatccagcagctggagaaggccctgaaggagatcgacagccactgccacctgagaaaggtgaagcacatgagaaagagatag

SEQ ID NO: 199462 - DNA, 1587 bp, Artificial Sequence
  derived and/or modified sequence
atgcaggccagccccctgcagaccagccagcccaccccccccgaggagctgcacgccgccgcctacgtgttcaccaacgacggccagcagatgagaagcgacgaggtgaacctggtggccaccggccaccagagcaagaagaagcacagcagaaagagcaagagacacagcagcagcaagagaagaaagagcatgagcagctggctggacaagcaggaggacgccgccgtgacccacagcatctgcgaggagagaatcaacaacggccagcccgtggccgacaacgtgctgagcaccgcccccccctggcccgacgccaccatcgcccacaacatcagagaggagagaatggagaacggccagagcagaaccgacaaggtgctgagcaccgcccccccccagctggtgcacatggccgccgccggcatccccagcatgagcaccagagacctgcacgccaccgtgacccagaacgtgcacgaggagagaatggagaacaaccagccccagcccagctacgacctgagcaccgtgctgcccggcctgacctacctgaccgtggccggcatccccgccatgagcaccagagaccagtacgccaccgtgacccacaacgtgcacgaggagaagatcaagaacggccaggccgccagcgacaacgtgttcagcaccgtgccccccgccttcatcaacatggccgccaccggcgtgagcagcatgagcaccagagaccagtacgccgccgtgacccacaacatcagagaggagaagatcaacaacagccagcccgcccccggcaacatcctgagcaccgcccccccctggctgagacacatggccgccgccggcatcagcagcaccatcaccagagacctgtacgtgaccgccacccacagcgtgcacgaggagaagatgaccaacggccagcaggcccccgacaacagcctgagcaccgtgccccccggctgcatcaacctgagcggcgccggcatcagctgcagaagcaccagagacctgtacgccaccgtgatccacgacatccaggaggaggagatggagaacgaccagaccccccccgacggcttcctgagcaacagcgacagccccgagctgatcaacatgaccggccactgcatgccccccaacgccctggacagcttcagccacgacttcaccagcctgagcaaggacgagctgctgtacaagcccgacagcaacgagttcgccgtgggcaccaagaactacagcgtgagcgccggcgacccccccgtgaccgtgatgagcctggtggagaccgtgcccaacaccccccagatcagccccgccatggccaagaagatcaacgacgacatcaagtaccagctgatgaaggaggtgagaagattcggccagaactacgagagaatcttcatcctgctggaggaggtgcagggcagcatgaaggtgaagagacagttcgtggagttcaccatcaaggaggccgccagattcaagaaggtggtgctgatccagcagctggagaaggccctgaaggagatcgacagccactgccacctgagaaaggtgaagcacatgagaaagagatag

SEQ ID NO: 199463 - DNA, 2715 bp, Artificial Sequence
  derived and/or modified sequence
atgcaggcaagcccactgcagacgtctcagcccaccccgcccgaggaactgcatgcagccgcttatgtctttactaacgacgggcaacagatgcgctctgacgaggtgaacctagtggccaccgggcatcaatccaagaaaaagcactcccgaaaatcaaagcgccatagtagttccaagaggagaaagtccatgagttcttggctggacaagcaggaggatgcagctgtgacacactcaatttgtgaagaacgcatcaataatggacagccggtggcggacaatgttctgtccaccgcacccccgtggcctgacgctactatagcacacaatattcgagaagaaagaatggaaaacggacagtctagaaccgataaggtgctgtccacggcccccccccaactcgtccatatggcggcagccggcatccccagtatgtctacaagggatctgcactcaaccgtcactcacaatatccgggaggaacgcatggaaaatggccagccacagcccgacaacgtccttagcactggtcccaccggcctgataaatatggctgctacacccatccctgcaatgtccgcccgagacctctacgctacggtgacgcacaatgtttgcgagcagaagatggaaaacgtgcagcctgctcccgacaacgtcctcctgactttgcgtccaagacggatcaacatgaccgacacaggcataagcccgatgtcaactcgggatccctacgcgaccattacctataacgtgccggaggaaaagatggagaaggggcagccccagcctgataatatcttatcgactgcatctaccgggttgataaacgtggccggcgcgggtaccccagccatctctacgaatggtctgtactctacagtgccccacaatgtctgcgaggagaaaatggaaaacgaccagccacaacccaacaatgtgctaagcacagtccagcctgtcattatttatcttacagctacgggaattcctgggatgaacactcgcgatcagtatgccaccatcactcacaatgtgtgtgaggaacgggtggttaataatcagccactgcccagtaacgcattgtccaccgtcctgccaggattagcatatttagctacggccgacatgccggccatgtccacgagggatcaacatgctacgattattcataatctgagagaggaaaagaaggataattctcagcctacacccgataatgtgctgtcagctgttacaccggagctgattaacttagccggcgctggaataccccccatgtcgactcgggaccagtacgccaccgtgaaccaccacgtgcatgaagcacgcatggagaacggccagcggaaacaggacaacgtcctctctaacgtgttgagtgggctgattaacatggccggcgccagcatcccagctatgagttcccgggacctgtatgccacgatcacgcactctgtgagggaggaaaagatggagtcgggaaagccacagacagataaggttataagcaacgatgccccccagctgggacacatggctgcaggtggtattccaagcatgagcacgaaagatctctatgctacagtgacacagaacgtgcatgaagaacggatggagaataaccaaccacaaccctcctacgatttgagcaccgtattgccaggcttaacatatctgaccgtagccgggatcccggccatgtcaaccagggaccaatacgctactgtcacacataatgtccatgaagagaaaattaaaaatggacaggctgcctcagataacgtgttttcaacagtccctcctgcctttatcaatatggccgcgaccggggtgtcaagtatgtctactcgcgatcagtacgccgccgtaactcataacatacgtgaggaaaaaatcaataactcccagccagcccctggcaatattcttagcactgcccccccctggctacggcatatggcagcagccgggatcagttccactatcactcgggacctgtatgtcacagctactcattcagtacatgaagaaaaaatgaccaacggccagcaggcacccgataattctttgagcaccgttcctcccggttgtatcaatttgtcaggcgctggaatcagttgccggagcacccgagacctctacgcaaccgttattcacgacattcaggaggaggagatggagaatgaccagactccaccagacggcttcctcagcaactccgatagtccagaactaatcaatatgaccggacactgtatgccccctaacgctctggattctttttcacacgacttcacatccctgtccaaggacgaactcttatataagcccgattcaaatgagttcgcagttgggaccaagaactactccgtgagcgccggagatcccccagtgacagtcatgtctctcgtggagacggtgcctaatacacctcagataagcccagctatggccaaaaagatcaacgacgatattaagtaccagctgatgaaggaggtccgccggttcggccagaattacgagagaatattcattctgctggaagaggtgcaggggtccatgaaagtaaagcggcagttcgtcgagtttacgatcaaggaggcagcccggttcaaaaaggttgtgctcattcagcagctcgagaaagctctgaaagagatcgactcccactgtcatctgcggaaagtcaagcacatgaggaagcggtag

SEQ ID NO: 199464 - DNA, 2715 bp, Artificial Sequence
  derived and/or modified sequence
atgcaggcctcccctcttcagaccagccaacccaccccaccggaggaactgcatgccgctgcttatgtgtttacaaatgatggtcaacagatgaggtccgacgaggtgaacctggttgcaactgggcatcagtcaaagaagaagcactctaggaaatccaagaggcatagctctagcaaacgacggaaatcaatgagtagctggttagataagcaagaggacgccgccgtgacccacagcatttgtgaggagaggataaataatggccagccagtcgccgacaacgtattgtctactgcccccccatggcctgacgccacgatcgcccacaatataagagaagaaaggatggagaatgggcagagccggaccgataaggtgcttagcactgccccaccccagttggttcacatggcagcggctggcattccttcaatgtccacacgcgatttgcacagtacagtcacccacaacatccgcgaagaaaggatggagaatggacagcctcagcccgacaatgtgctcagcacgggccctacaggtctgataaatatggcagccacaccaattcccgcaatgtccgctcgggatctgtacgcgacagtgacacacaacgtctgtgaacagaaaatggagaacgtgcagcctgcgccagataatgtcctgcttaccctccgaccacgcagaattaatatgacagatacggggatctcacccatgtccactagagacccatacgccacaatcacgtataatgttcccgaggaaaagatggagaaagggcagccccagcctgacaatatccttagtaccgcgtctaccggacttataaacgttgccggagcgggaacccccgccatctccacaaacggcctgtactccactgtgccccataatgtgtgcgaggagaagatggaaaacgaccagccacagcctaacaacgtgctgtctactgtgcagcctgtaattatctacctgacggccactggcatccccggaatgaatacccgagatcaatatgcaaccatcacccacaacgtttgcgaagaacgggtagtcaataaccagccattgccttctaatgctctgtccacagtgctgcccggactggcctacctggcaactgcagatatgcctgccatgtcaacccgcgatcagcatgccaccatcatccacaacttacgcgaagagaaaaaggacaactcacagcctacccctgataatgtactaagtgcggtgactcctgagttgatcaatctcgccggcgctggtatccctccgatgtccactagggatcagtatgcaaccgtgaatcaccatgttcacgaggcccggatggagaacgggcagagaaaacaggataatgttttatctaatgttctaagcggtcttatcaatatggctggggccagcattcctgctatgagcagccgcgacttgtacgctactatcactcacagcgtgagagaagaaaaaatggagtctggcaagccccagacggataaagtaatttcaaacgacgctcctcaactggggcacatggccgctggaggtatcccctccatgagtaccaaagacctgtatgcaacagtcacacaaaacgtgcatgaggaaagaatggaaaacaaccagccacaacccagttacgatctgagtaccgttctccctggattgacttacttaacggtggccggaattcctgctatgagcactagagaccagtacgcaactgtgacacacaatgtgcacgaagagaaaatcaagaacgggcaggctgcctcggacaacgttttcagcactgttccgccagcatttattaacatggctgccacgggagtgtcctcaatgtcgaccagagatcagtacgcggctgtaacccacaacattagagaggagaaaataaataacagtcagcctgcccccggtaatatactgtcgactgcccccccttggttaaggcacatggcagccgctggaatctcatctacaattacacgtgatctgtacgtcacggccactcacagcgtgcatgaagagaaaatgacgaatggccaacaagctcccgacaactctttgagcacagtgcccccaggctgcattaatctgagcggagcggggatcagctgccgcagcacgcgtgatctgtacgcgaccgtgatccacgatattcaggaggaagaaatggagaatgatcagaccccccccgacggctttctgtctaactcggactctcccgagctgataaacatgactggacactgtatgccccccaacgctctggattcattttcccacgacttcacttctctctctaaggacgaactgttgtataaacccgacagtaatgagtttgccgtcggcaccaagaattactcagtatcagcaggcgaccctcccgtgactgttatgagtctggtcgaaaccgtccctaacactcctcagatctcgcctgctatggctaagaaaatcaacgatgacataaagtatcagctgatgaaggaagtcagaagatttggccagaactacgagaggattttcatactcctggaggaggtccagggaagcatgaaagtgaagcggcaatttgtggaattcactatcaaagaggctgcccggtttaaaaaggtggtcttgattcaacagttggaaaaggcgctgaaggagatcgacagccattgccatctgaggaaggtcaagcacatgaggaaaagatag

SEQ ID NO: 199465 - DNA, 2715 bp, Artificial Sequence
  derived and/or modified sequence
atgcaggcctccccactccagaccagtcaacccacacctcctgaagaactgcatgctgcagcttacgtgttcactaacgacggacaacagatgagaagcgacgaagtgaacttagtggctactgggcaccagtcaaaaaaaaaacatagtcggaaaagcaagaggcacagttccagtaaacgtcggaagtctatgtcaagctggttggataaacaagaggacgccgccgtcacgcattctatatgtgaggagagaataaataacgggcagcctgtggccgacaatgttctgtcaaccgctccaccttggcctgatgccaccatagctcacaatatccgtgaggaaaggatggagaatggacaaagcagaacagataaagtgttatcaactgccccaccgcaattggtgcatatggccgccgcaggtattccgagtatgtccacccgggacttgcactctacagtgacacacaatattagagaggagagaatggagaatggccagccgcaaccagataatgtcctcagcaccggcccaacaggattgataaatatggccgcaacacctattccagccatgtctgctcgcgacctctatgctaccgtgactcataatgtgtgtgaacaaaagatggagaatgtgcaaccagcccctgacaacgttttgctcaccctcaggcctcggaggattaatatgacggacaccggcatatcgcctatgagcaccagagacccttatgctactattacctataacgtccctgaagaaaagatggagaagggacagccccaaccagacaacatcttgtcaactgcctctactggcttgattaatgttgccggggccgggacaccggcgatatccaccaacggcctgtattctacagttcctcataacgtgtgtgaagagaagatggagaatgatcagccccagcccaataatgtgctgagcacagtccaacctgtcattatttacttaaccgcaaccggtattcccgggatgaataccagggatcaatatgccaccattacacacaacgtttgcgaagagagggtggtgaacaatcagcctttacccagcaacgcactgagcacagtcttgccaggtcttgcctaccttgctactgcagatatgccggccatgtccacacgtgaccagcacgctacgatcatccacaatctccgtgaggaaaagaaggataactcgcagcccacccctgataatgtcctatccgccgtcactcctgaactgataaatctcgctggagccgggatccctccgatgtccacacgtgaccagtacgccactgtcaatcatcatgtgcacgaggcaagaatggagaacggacagcggaagcaggataatgtattaagtaatgtactgtcaggcttaattaatatggcaggagcctcaatcccagccatgtccagtcgtgatttgtacgctactatcacgcactcagtccgcgaagaaaagatggagtccggcaagccacaaacagacaaggtgatatcaaacgacgcgccccagctggggcacatggcagctggaggaatccctagcatgagtaccaaggatctgtacgctacagtgacacagaacgttcatgaggaacggatggagaataaccagccacagccctcttacgacctgtccaccgttctcccagggttgacctatttaaccgtggccggaatccctgctatgtcaaccagggatcagtatgcaacagtgactcataatgttcacgaggagaagatcaaaaacgggcaggccgctagcgacaacgttttcagcactgtccctcctgcctttatcaacatggccgctacgggagttagtagtatgtcaacccgcgaccaatatgccgccgtaacacacaacattcgggaggagaagatcaacaactcccagcccgccccaggcaacattctatccactgccccgccctggcttcggcacatggcggccgccggtatcagcagcaccattacccgcgatctgtatgtgacagcaacgcactcggtgcatgaagaaaagatgacaaacggccaacaggcgcctgataactctttgtctacggtgcctcccgggtgcatcaacctatctggagccgggatatcctgccgtagtacccgggacctctacgctaccgtgatacacgacattcaggaagaggaaatggagaacgatcagacaccgccggatgggtttctgagtaatagtgatagtccagagcttattaacatgactggccactgcatgccgcccaacgccctagacagcttcagccacgattttacaagtctgtcaaaagatgagttactctataagcccgattctaatgaatttgcggtggggacaaagaattatagcgtttccgctggcgatcctccagtaacagttatgtccttagtggaaactgtgcctaacacaccacagattagccccgctatggccaagaaaattaacgatgacataaaataccagctcatgaaggaggtgcgtcgcttcggccagaattacgaacgcatcttcatactcctggaggaggttcaggggtctatgaaggtcaaaagacagtttgttgagttcacaattaaggaagccgctcggttcaagaaggtggtcctgattcagcagctagagaaggcattgaaggaaatcgactctcactgtcatttacggaaagtgaagcatatgagaaagagatag

SEQ ID NO: 199466 - DNA, 1587 bp, Artificial Sequence
  derived and/or modified sequence
atgcaggccagccccctccaaacatcccagccaacaccccctgaggaactccacgcggctgcctacgtctttaccaacgatggccagcagatgcgcagtgacgaagtgaatctcgtggccacaggccaccagagtaagaaaaagcacagcaggaagtctaagcgccattcttcctctaagaggcgtaaaagtatgtcatcatggctcgacaagcaggaggacgcagctgtcactcatagtatctgtgaggagcggatcaacaatgggcagcccgtggccgataatgtactttctactgcccctccatggcccgacgccacgattgctcataacatccgggaagaacgcatggagaacgggcagtccagaaccgacaaagtgttgtctactgcgccacctcaactcgtgcacatggctgctgccggaatcccatccatgagcaccagagacctccacgctaccgtcacacagaatgtccacgaagaaagaatggaaaacaaccagccacagccttcttatgacctgtctaccgtgctccctgggcttacatacctcactgtggcaggtattccagctatgagtacaagggatcaatacgcaaccgttactcataacgtccacgaggaaaaaattaaaaatggacaggccgcttctgataacgtcttcagtaccgtgccacccgccttcatcaacatggccgcaacaggcgtctctagcatgagtacccgagaccaatatgctgctgtaacccacaacattcgggaggaaaagatcaacaactcccaacccgcacctggaaacatactctctaccgcccctccctggctgagacacatggcggccgccgggattagttctactatcacccgggacttgtacgtcacggcaactcacagcgttcatgaggagaagatgaccaacggtcagcaagctccggataactcgttgagtacagtgcccccaggatgcattaatctgagtggagctggtatctcttgccgctccaccagagacctgtacgccacagtgatccacgatatccaggaggaggagatggagaatgatcagactccccctgacggatttctcagcaacagtgattctcctgaactgatcaacatgaccggccactgtatgccccccaacgcacttgacagtttttctcacgacttcacatcattgtcgaaggatgagttactgtataaaccagacagcaatgagtttgctgtgggcacaaagaattactcagtctctgccggagacccccctgtgaccgttatgagtcttgtggaaaccgtgccgaacaccccacagatttctcctgcgatggcgaagaaaatcaatgacgacatcaaatatcagctcatgaaggaggtgagaagatttgggcagaactatgagcgcatcttcatcctgctggaggaagtccaagggtcaatgaaggtgaagcggcagttcgtcgagtttactattaaagaagccgccaggttcaagaaggtggtgctaattcagcagctagagaaagctttaaaagaaattgactcacattgccaccttaggaaggtgaaacacatgcgaaaacggtag

SEQ ID NO: 199467 - DNA, 2715 bp, Artificial Sequence
  derived and/or modified sequence
atgcaggcttcccctctacagacctcccagcccactcctccggaagaactgcatgcggcagcatacgtttttaccaatgacggccaacagatgcggtctgacgaggtgaacctggtcgctaccggccatcagtccaagaaaaaacactctcgcaaaagtaagcgccattcctcttctaaaaggcgtaaaagcatgtcgagctggttggataagcaagaagacgcagccgtgacgcactctatctgcgaggagcgcatcaacaatggacagccggttgccgacaacgtgctatctacagcccccccctggcccgatgcaaccatcgcccacaacattcgggaggaacgaatggagaatggacagtccagaactgacaaggtactgagcacggcccctcctcagctggtgcacatggctgccgccgggattcctagcatgtctacccgggacctacactccactgtaacacacaacattagggaggaaagaatggaaaacggacaaccccagcccgataacgtattgagcactggccccaccggcctgattaacatggcagcaacacccatacctgccatgtctgcccgcgacctatacgcgacggtgactcacaatgtatgcgagcagaagatggaaaacgtgcaacccgctccagacaatgtgcttctgaccctgagacctaggcgcatcaacatgacggatactgggatttcccccatgtctacaagggatccctatgcgactatcacgtacaacgtgcccgaggagaaaatggagaaagggcagccgcagcctgataacattctcagtacagcttctaccggcttgatcaacgttgccggcgccggtacacctgccatcagcaccaacggcctgtatagcaccgtgcctcataatgtctgtgaagaaaaaatggagaatgaccagcctcagcccaataacgtactcagcaccgtccagccagtgattatttacctgacggccacaggcatccccggcatgaacacaagggaccagtacgcgactattacccacaacgtttgcgaagaacgcgtggtgaataatcagcccttgccttctaatgcgctctccaccgtgctgcccggcctcgcctacctcgctaccgcggatatgcctgcaatgtccacacgcgatcagcatgccacaataatacacaatctgcgagaggagaaaaaggacaatagccagccaaccccggataacgtgttgagtgccgtgacacctgagcttattaatctcgccggagctggaataccccccatgagtacacgggatcagtatgctactgtgaatcaccacgtgcacgaggcccgcatggagaacggacagaggaagcaagataacgtcctttccaacgtgttaagtgggctgattaatatggccggggcaagcatacccgcaatgagctcccgcgacctctacgccactatcacccactcagttcgagaggagaaaatggaatcaggaaagccccagaccgataaggtaattagtaacgacgccccacagctgggtcacatggctgcagggggaataccatccatgtctacaaaagatctgtatgccacagttacccaaaacgtgcacgaagagcgaatggagaacaatcagccccagccctcttatgatctttccaccgttctgccgggcttgacttatttgactgtggcaggaatccccgccatgtcaaccagagaccagtatgcaaccgtgacacataatgtacacgaggaaaagattaaaaacggccaagccgctagtgacaacgtcttctcaactgtccctccggcattcattaacatggccgcaacaggagtttctagcatgtccacgcgcgaccagtatgccgcggtcacccacaatatacgggaagagaagatcaataattcccaacccgcgcccggtaatattctgagcaccgccccgccctggctccggcacatggccgccgccggaattagcagtactataacacgggacctgtacgtaaccgcaacccatagtgtgcacgaagaaaagatgaccaacgggcagcaggcgcctgataatagtctgtcaaccgtgcctcccgggtgcattaacctgagcggcgctggaatatcttgccgtagcacccgagacttatacgcaacagtgatccacgacattcaggaggaagagatggaaaatgatcagactcccccagacgggttcctctctaacagtgattctcctgagttgatcaacatgactgggcactgtatgccgcccaatgctctcgactcattttctcatgatttcacctccttgtcgaaggatgagcttctgtataagcccgattccaacgagtttgctgttggaactaagaattattctgtttccgcgggagatccacccgtgaccgtgatgtcacttgtggaaactgtccctaatactccacagatcagccccgccatggcaaagaaaatcaacgatgatatcaaataccagctgatgaaggaggtccgcagattcggtcagaactatgaaagaatattcatcttactcgaagaggtccaaggaagcatgaaggtcaagcgccagttcgtcgaatttacgattaaagaggctgcgcgcttcaagaaggtagttctcatacagcagttagagaaagcgttgaaggaaattgacagccattgtcacttgcgaaaggtgaagcatatgagaaagcggtag

SEQ ID NO: 199468 - DNA, 2715 bp, Artificial Sequence
  derived and/or modified sequence
atgcaggccagccccctgcagaccagccagcccaccccacctgaggagctgcatgctgctgcctacgtgttcaccaatgatggccagcagatgagaagtgatgaggtgaacctggtggccaccggccaccagagcaagaagaagcacagcaggaagagcaagaggcacagcagcagcaagaggaggaagtccatgagctcctggctggacaagcaggaggatgctgctgtgacccacagcatctgtgaggagcgcatcaacaacggccagcctgtggccgacaacgtgctgagcacagccccaccctggccagatgccaccatcgcccacaacatccgggaggagaggatggagaatggccagagcaggacagacaaggtgctgagcacagccccaccccagctggtgcacatggctgctgctggcatccccagcatgagcacccgggacctgcacagcacagtgacccacaacatccgggaggagaggatggagaatggccagccccagcctgacaacgtgctgagcacaggccccaccggcctcatcaacatggccgccacccccatcccagccatgtctgcccgggacctgtatgccaccgtgacccacaacgtgtgtgagcagaagatggagaatgtgcagcctgccccagacaacgtgctgctgaccctgcggccccggcgcatcaacatgacagacaccggcatcagccccatgagcacccgggacccctatgccaccatcacctacaacgtgcctgaggagaagatggagaagggccagccccagcctgacaacatcctgagcacagccagcacaggcctcatcaacgtggccggggccggcaccccagccatcagcaccaacggcctgtacagcacagtgccccacaacgtgtgtgaggagaagatggagaatgaccagccccagcccaacaacgtgctgagcacagtgcagcctgtgatcatctacctgacagccaccggcatccctggcatgaacacccgggaccagtatgccaccatcacccacaacgtgtgtgaggagcgggtggtgaacaaccagcccctgcccagcaatgccctgagcacagtgctgcccggcctggcctacctggccacagctgacatgcctgccatgagcacccgggaccagcacgccaccatcatccacaacctgcgggaggagaagaaggacaacagccagcccaccccagacaacgtgctgtctgctgtgaccccagagctgatcaacctggccggggccggcatcccccccatgagcacccgggaccagtatgccaccgtgaaccaccacgtgcatgaggccaggatggagaatggccagaggaagcaggacaacgtgctgagcaatgtgctgagcggcctcatcaacatggccggggccagcatcccagccatgagcagccgggacctgtatgccaccatcacccacagcgtgcgggaggagaagatggagagcggcaagccccagacagacaaggtgatcagcaatgatgccccccagctgggccacatggccgccggcggcatccccagcatgagcaccaaggacctgtatgccaccgtgacccagaatgtgcatgaggagaggatggagaacaaccagccccagcccagctatgacctgagcacagtgctgcccggcctgacctacctgactgtggccggcatcccagccatgagcacccgggaccagtatgccaccgtgacccacaacgtgcatgaggagaagatcaagaatggccaggccgccagtgacaacgtgttcagcacagtgcccccagccttcatcaacatggccgccactggagtgtcctccatgagcacccgggaccagtatgctgctgtgacccacaacatccgggaggagaagatcaacaacagccagcctgcccctggcaacatcctgagcacagccccaccctggctgcggcacatggctgctgctggcatcagcagcaccatcacccgggacctgtatgtgacagccacccacagcgtgcatgaggagaagatgaccaacggccagcaggccccagacaacagcctgagcacagtgcccccaggctgcatcaacctgtctggagctggcatcagctgccgcagcacccgggacctgtatgccaccgtcatccatgacatccaggaggaggagatggagaatgaccagaccccaccagatggcttcctgagcaacagcgacagccctgagctgatcaacatgacaggccactgcatgcccccaaatgccctggacagcttcagccatgacttcaccagcctgagcaaggatgagctgctgtacaagccagacagcaatgaatttgctgtgggcaccaagaactacagcgtgtctgctggggacccccctgtgacagtgatgagcctggtggagaccgtgcccaacaccccccagatcagccctgccatggccaagaagatcaatgatgacatcaagtaccagctgatgaaggaggtgcggcgcttcggccagaactatgaaagaatcttcatcctgctggaggaggtgcagggctccatgaaggtgaagaggcagtttgtggagttcaccatcaaggaggccgcccgcttcaagaaggtggtgctgatccagcagctggagaaggccctgaaggagattgacagccactgccacctgaggaaggtgaagcacatgaggaagaggtag

SEQ ID NO: 199469 - DNA, 1587 bp, Artificial Sequence
  derived and/or modified sequence
atgcaggccagccccctgcagaccagccagcccaccccacctgaggagctgcatgctgctgcctacgtgttcaccaatgatggccagcagatgagaagtgatgaggtgaacctggtggccaccggccaccagagcaagaagaagcacagcaggaagagcaagaggcacagcagcagcaagaggaggaagtccatgagctcctggctggacaagcaggaggatgctgctgtgacccacagcatctgtgaggagcgcatcaacaacggccagcctgtggccgacaacgtgctgagcacagccccaccctggccagatgccaccatcgcccacaacatccgggaggagaggatggagaatggccagagcaggacagacaaggtgctgagcacagccccaccccagctggtgcacatggctgctgctggcatccccagcatgagcacccgggacctgcacgccaccgtgacccagaatgtgcatgaggagaggatggagaacaaccagccccagcccagctatgacctgagcacagtgctgcccggcctgacctacctgactgtggccggcatcccagccatgagcacccgggaccagtatgccaccgtgacccacaacgtgcatgaggagaagatcaagaatggccaggccgccagtgacaacgtgttcagcacagtgcccccagccttcatcaacatggccgccactggagtgtcctccatgagcacccgggaccagtatgctgctgtgacccacaacatccgggaggagaagatcaacaacagccagcctgcccctggcaacatcctgagcacagccccaccctggctgcggcacatggctgctgctggcatcagcagcaccatcacccgggacctgtatgtgacagccacccacagcgtgcatgaggagaagatgaccaacggccagcaggccccagacaacagcctgagcacagtgcccccaggctgcatcaacctgtctggagctggcatcagctgccgcagcacccgggacctgtatgccaccgtcatccatgacatccaggaggaggagatggagaatgaccagaccccaccagatggcttcctgagcaacagcgacagccctgagctgatcaacatgacaggccactgcatgcccccaaatgccctggacagcttcagccatgacttcaccagcctgagcaaggatgagctgctgtacaagccagacagcaatgaatttgctgtgggcaccaagaactacagcgtgtctgctggggacccccctgtgacagtgatgagcctggtggagaccgtgcccaacaccccccagatcagccctgccatggccaagaagatcaatgatgacatcaagtaccagctgatgaaggaggtgcggcgcttcggccagaactatgaaagaatcttcatcctgctggaggaggtgcagggctccatgaaggtgaagaggcagtttgtggagttcaccatcaaggaggccgcccgcttcaagaaggtggtgctgatccagcagctggagaaggccctgaaggagattgacagccactgccacctgaggaaggtgaagcacatgaggaagaggtag

SEQ ID NO: 199470 - DNA, 2715 bp, Artificial Sequence
  derived and/or modified sequence
atgcaggccagccccctgcagaccagccagcccaccccccccgaggagcttcatgccgccgcctatgtttttactaacgacgggcagcagatgcgaagcgatgaggtcaaccttgtggctaccggccaccagtccaaaaagaagcattcccgaaaaagcaaaagacattcaagctctaagcgtagaaagagcatgagcagctggctggacaagcaagaggacgcggcggtgacccactccatttgtgaagagcgaattaacaatggacaaccagtggccgacaatgttttaagcactgcccctccgtggcctgatgcgaccatcgcccataatatccgcgaagagcggatggaaaatggtcagagcagaactgacaaggtgttaagtaccgcccccccccaactggtacatatggcagccgccgggatcccatccatgtccactcgggacctgcattctacggtcacccacaatatccgggaagagagaatggaaaacggacagccacagcctgataatgttctcagcaccggaccaacggggctcatcaatatggcagccactccaattcctgccatgtccgcacgcgatctgtatgcaacagtaacgcataacgtctgtgagcagaagatggaaaacgtgcagccagccccagacaatgtgctcctgaccctacgtccgcgtagaattaatatgacagacacaggaatcagtccaatgagcactcgggacccatacgccactatcacgtacaacgtgccagaagagaagatggagaagggtcagccgcaacctgataacattctgagcaccgcctcaacaggccttataaatgtcgctggcgcaggaacgccagctatttcaaccaatggcctttacagtactgttcctcacaacgtgtgcgaggagaaaatggaaaacgatcagccgcagcccaataatgtccttagcacagtccagccggttattatctacctgaccgccaccggcatcccaggaatgaataccagggaccagtacgccaccataacccataacgtctgcgaagagagggtggtaaacaaccagcccctgccctctaacgctttatctacagtcctgccggggttggcttacttggccaccgccgacatgcccgcgatgagtactcgcgaccagcatgccacaataattcataaccttcgggaagagaaaaaagataattcccagcctacaccggataacgttctctccgctgttacccccgaattaatcaacttagctggggcagggattccacccatgagcaccagggaccagtatgccactgttaaccaccatgtccacgaggcccggatggagaatggacaacgcaaacaggataacgtgttgagtaacgtcctgtccgggctgattaacatggctggggcctcaatcccagctatgagcagtagagatctgtatgctaccattacacatagcgtgagggaagagaagatggagtctgggaagcctcagacagacaaggtaatctcgaatgatgccccccaactcggccacatggcagccggggggatccccagtatgtcaaccaaggacctgtatgccacagtgacacagaacgtgcacgaagaacgtatggaaaacaatcagcctcaaccgtcatacgatctctcaacagtgttaccaggacttacctaccttacagtggctggaatcccggctatgagcactcgtgaccaatacgccaccgtgacccacaacgtgcatgaggagaagatcaaaaacggccaggccgccagcgataatgtgttctcaaccgtgcccccagcatttattaacatggcagctaccggcgtaagctcaatgtccacccgagatcagtacgcggcggttactcacaatattcgggaggagaaaataaataacagccagcctgctccagggaacatcctgtctaccgcaccgccatggctgcgtcacatggcagcagctggtatttcctcaaccattactcgcgatctttatgttactgccacccactccgttcacgaggagaaaatgactaacgggcagcaggctccagacaatagccttagcaccgtgcctccaggctgcataaatctgtcaggggccggaatctcttgtagatccacccgcgatctgtatgccacagtaatccacgacattcaggaggaggagatggaaaacgatcagaccccgccggacggcttcctgtccaattccgactctccagaacttatcaacatgacagggcactgcatgcctcccaacgcgctcgactcttttagccacgatttcacttcactgtctaaagacgagctactgtataagcccgactcaaacgaatttgcggtggggactaaaaattattctgtttccgctggagaccctccagtgacagtgatgtccctggtggaaacagtgccaaacacaccacagattagtccagctatggctaagaagattaacgatgatataaagtatcagttgatgaaggaggtgaggaggttcggtcagaattatgagcggatcttcatccttctcgaagaggtgcaggggagcatgaaggtgaaaaggcagtttgtggagttcacaatcaaagaagctgcaagattcaagaaagtggtgcttatacagcagttggagaaggcactgaaagagatcgactctcattgccaccttcgtaaggtcaaacacatgcgcaagagatag

SEQ ID NO: 199471 - DNA, 2715 bp, Artificial Sequence
  derived and/or modified sequence
atgcaggccagccccctgcagaccagccagcccaccccccccgaggagctgcacgccgcggcctatgtgttcaccaatgatggccaacaaatgaggtccgatgaggtgaacctggtcgcgactgggcatcaatcaaagaagaagcacagtcgtaagagtaaaagacattcctctagcaagcggcggaaatctatgtcctcatggctcgacaagcaagaagacgcggctgtgacacatagtatctgtgaggaacgcattaataatggccagccagtggcggacaatgtgttgagtactgctccaccctggcctgatgccactattgcccacaatattcgtgaggagaggatggaaaatggacagtcaaggaccgataaagtccttagcaccgccccaccacaactcgtacacatggctgccgccggaattccctctatgagtacaagggatctgcatagcactgtgacccataatatccgagaggaacggatggagaacggccagccacaacccgacaacgttctgagcacaggtcccaccgggctgatcaacatggctgccacccccattcctgcaatgagcgcgcgagatctttatgctactgtgactcacaatgtgtgcgaacagaaaatggaaaacgttcagcccgcccccgataatgttctgctgacgcttcggccaagaaggataaatatgacggacacaggaatcagccccatgtccacgcgagacccctatgctacaatcacttataatgtccctgaggaaaagatggagaaggggcagcctcagcccgacaatatcttgagtactgcctccacaggcctgattaacgttgccggggctgggactccagccataagcactaatggtctgtattccacagtaccccataacgtgtgcgaggagaaaatggagaacgaccaaccccagcccaataatgttctgtccacagtgcagcccgtgattatatatctgactgccacaggcatccccggcatgaacacacgcgaccagtacgccaccatcacacataatgtatgtgaggagcgtgtcgtcaacaaccagcctctcccgagcaatgccctgagtaccgtcctgcctggcctcgcatatctcgccacggccgacatgccggcaatgagcacccgagaccaacacgctacgatcatccacaatctgcgggaggagaagaaagacaatagccagcctactcctgacaacgtcctgtccgcagttacccccgagttaattaacctggctggggccggtatccccccgatgagcacccgcgatcagtatgccactgtcaaccaccacgtgcatgaagcccggatggaaaatggccagcgcaaacaagacaatgtcctcagcaacgttctctctggcctcataaacatggcaggagctagtattcctgccatgtcatccagggacctgtatgctactattactcattctgtaagagaggaaaagatggaaagtgggaaacctcagacagacaaggtgatatccaacgacgcccctcagctgggacacatggccgctggcggaatcccatccatgagtaccaaggatctgtacgcaacagtcacgcagaacgtgcacgaagagcgcatggagaacaatcaacctcagccaagttatgatttatccactgtgctacctgggctgacatacctgactgttgctggaatcccagccatgagcactagggaccagtatgcaaccgtgacgcacaatgtgcacgaggaaaaaattaaaaatggacaagctgcttctgataacgttttttcgacggtaccacctgctttcatcaacatggcagccaccggggtgagttctatgtccacccgtgaccagtacgccgctgtgactcacaatatacgagaggagaaaatcaacaatagccaacctgctcctggaaacatcctttctacggcccctccctggctgcgccatatggctgccgccgggatatcgtcgacaattacccgcgacctgtacgttaccgcaactcatagtgtgcacgaggagaagatgaccaatgggcagcaggcccccgacaatagtctgagcacagtgccacccggctgcattaacctgtctggagcggggatctcgtgccgcagtacccgagatctctatgcaaccgtcatacacgacatccaggaggaggagatggaaaatgaccagaccccacccgacgggttcctgtcaaattctgattccccagagcttatcaacatgaccggacattgcatgcccccaaacgccctggattccttttctcatgactttactagcttgagtaaagatgagctgctttacaagccagattccaacgagttcgccgtgggtaccaaaaattacagcgtctcagccggagatccccccgttaccgttatgagccttgtagagaccgtgccaaatactccccaaatttctccagccatggccaaaaaaatcaacgatgatataaagtaccagctgatgaaagaggtgaggagatttgggcagaactacgaacggatcttcattttgctcgaggaggtgcaaggttctatgaaagtcaaaaggcagttcgtagagttcaccattaaggaagcagccagatttaagaaggttgtgctgattcagcagttagagaaagccctcaaggaaatagactctcactgccacctccgcaaggtgaaacacatgcggaagaggtag

SEQ ID NO: 199472 - DNA, 2715 bp, Artificial Sequence
  derived and/or modified sequence
atgcaggccagccccctgcagaccagccagcccaccccccccgaggaactgcatgcagccgcgtacgtgttcacaaacgacggacagcagatgcgcagcgacgaggtcaacctggttgccaccggccaccagtctaagaagaagcacagccggaaatcaaagcggcacagttcttcaaaacgacggaaaagcatgagcagttggctggataagcaggaggacgcggccgtaactcatagtatttgcgaggagcggattaataatggccagccagtggcggacaacgtgctgagtaccgccccaccttggcctgacgctacaatagcccacaacatacgggaggaaagaatggagaacgggcaatcgcgcacggacaaagtgctctctacagctccaccgcagctggtgcatatggctgccgctgggatcccctctatgtccacgagagacctccattcaaccgtcactcacaatattagggaggaaaggatggaaaacggccagccccaacccgataacgtgctctccacgggtccaaccgggctgattaatatggctgccaccccaatcccggcaatgagtgcccgcgacctctacgctacagtgactcacaacgtctgcgaacaaaagatggagaatgtgcagcctgctccggacaacgtcctcctgaccctccgcccacggcgcatcaatatgactgataccggcatttcacctatgtctacacgcgacccgtacgcaacgatcacgtacaacgttccagaggagaaaatggaaaaggggcaaccccagccagataatattctgtctacagcgagcaccggcttaattaacgtggctggggcgggcacgcccgctatttctacaaacggcctttactccactgttccgcacaacgtgtgcgaggagaaaatggagaacgaccagcctcagccaaacaacgttctgtctacagtgcaaccagttattatctatctaacagcaacgggaattccaggtatgaatacccgagatcaatacgccaccattacccacaacgtgtgtgaggagagagtggtcaacaatcaacccctgccatccaacgctctgtctaccgtgttgccggggctggcttatctggctacagcagacatgccggccatgagtactcgcgatcaacatgctacaatcattcataatctcagggaggagaagaaggataactcccaaccaacccctgataatgttctgtcggccgtgaccccagaactgattaaccttgcgggtgccgggatacctcccatgtctacccgggaccagtatgccactgttaaccaccatgtacatgaggcgaggatggagaatggtcagagaaaacaggataatgtcttatcgaacgtgctttccgggctgattaatatggccggagcctctatccctgccatgtcatcacgagatctgtatgccaccatcacacattccgtaagggaggagaagatggagtcaggcaagccgcagacagacaaagtgatctccaacgatgccccccagctgggccatatggccgccggtggaattccatcaatgtctactaaggacttgtacgcaacagttacccagaacgtgcacgaagagagaatggaaaataatcaaccccaaccctcttacgacttatccaccgtgttgcccggcttgacatatcttaccgtagccggaattcccgcaatgtccacgagagatcaatatgcaaccgtgacacataacgtccatgaagagaaaatcaagaacgggcaggctgcgtccgataacgtgttcagcactgtgccacccgcttttatcaacatggccgccaccggcgtgtcatccatgtccacacgggaccaatacgccgctgttactcacaatatcagggaagagaaaataaataacagccagccggctcctggtaacatcctatccaccgcaccaccctggctccggcatatggccgctgccggtatcagcagcactatcacacgggacctttatgtaacggccacgcacagcgtacatgaagaaaaaatgaccaatggacagcaggccccggacaacagcctgagtactgttccacccggctgcattaatttatcaggcgcaggcatttcctgtcggtcaactcgcgatctctacgcaactgttatacacgacatccaggaggaggaaatggagaatgatcaaactccaccagacgggttccttagcaatagcgattctcctgagttgatcaacatgacaggccactgtatgcccccaaatgcactggacagcttcagccacgatttcacatccctgagcaaggatgaattgctgtataagcccgatagcaacgagttcgctgtcggaaccaagaactactccgtgtcagccggagaccctcccgtgaccgtcatgtcactggtggagacggtaccgaataccccacagatctcacctgcaatggctaaaaaaattaacgatgacatcaagtaccagctgatgaaagaagtcagaaggtttggccaaaactacgaacgtattttcatattacttgaggaagtccagggatcaatgaaagtgaagaggcagtttgtggagtttaccatcaaagaggctgctcgatttaaaaaggtggtgttgatccaacagttagaaaaagccctgaaggaaatcgatagccactgccatttacggaaagtgaaacacatgagaaagcgatag

SEQ ID NO: 199473 - DNA, 1587 bp, Artificial Sequence
  derived and/or modified sequence
atgcaggccagccccctgcagaccagccagcccaccccccccgaggagttgcacgctgcagcttacgtgtttactaacgatggccagcagatgaggtcagacgaggtgaaccttgtggccacgggtcaccagagtaaaaaaaagcattcaagaaaatccaagagacattccagttctaaaaggcgaaagtccatgtcaagctggctggacaagcaggaggatgccgccgttacccactcaatctgcgaggagcggatcaataacgggcagcccgtggcagataatgttctgagcacagcaccaccctggccagacgctacgatagcgcacaacatccgagaagagcgtatggaaaacggacagtcccggaccgacaaagtgctgtcaaccgcgcctcctcagctcgtgcacatggctgccgctggcattccgagcatgtcaacaagagatctgcacgccaccgtgacccagaacgtgcacgaagaaagaatggagaataatcagcctcagccatcctacgacctctcaacagtcctgcccggactgacgtatctaaccgtcgcaggtattccagcaatgagcacccgagaccagtatgcaaccgtgacccataacgttcacgaagaaaaaataaagaacggacaggccgctagcgacaacgtgtttagtacggtacctcccgccttcatcaacatggctgccacaggtgtgagctccatgagcacgcgcgatcagtacgcggctgtgactcacaatattagagaagaaaagatcaacaatagtcagccagccccaggcaacattctcagcacggcccctccatggctcagacatatggccgccgccggaatcagcagcaccatcactcgcgatttatacgtcactgccacccattctgtccacgaggaaaaaatgacgaacgggcagcaggcccctgataattctctgtccaccgtcccccccgggtgcatcaacttgtcaggtgccggcatttcttgtaggagcacgcgcgacctttacgccactgtgatccatgacattcaggaggaggagatggaaaatgaccagacaccccccgatggatttcttagtaacagcgactctcctgagctgattaatatgactgggcactgtatgccaccaaacgcattggatagtttcagccacgattttacatctctcagcaaagacgagctcctatataaacctgattctaacgagttcgccgtggggaccaaaaattacagcgtctctgcaggcgacccacctgttacagtcatgtccctggtggagacagtcccaaacaccccccagatctctccagccatggcaaaaaagatcaacgacgacattaaataccagctgatgaaagaggtcagacgctttggacaaaactatgagcgtatattcatcctgctggaggaggtccaaggcagcatgaaagtgaagcgacagtttgtggagttcaccataaaggaggctgcccgctttaagaaggtggtgctcattcagcagctcgaaaaggccctcaaagagatcgatagtcactgccacctgaggaaggttaagcatatgaggaagagatag

SEQ ID NO: 199474 - DNA, 2715 bp, Artificial Sequence
  derived and/or modified sequence
atgcaggccagccccctgcagaccagccagcccaccccccccgaggagctacatgccgccgcttatgtgtttacgaatgacggtcaacagatgagaagcgatgaggtgaacctcgtggccacgggacaccagtctaagaagaaacactcccgtaaaagcaagcgccatagcagttccaagcggcgcaagtctatgagtagctggctggacaagcaggaggacgctgcagttacacattctatctgtgaagagagaatcaataatggtcagcccgtggctgataatgttctctcaactgcacccccttggcccgacgcaacaatcgcacacaatatccgcgaggagcgaatggaaaacgggcagtccagaactgacaaggtcctctcgactgctccacctcagctggttcacatggccgcagctggcatcccttctatgtctacacgcgatttgcattcaaccgtgacccacaacattcgagaggaacggatggaaaacggtcagcctcagcctgataacgtgctaagcactggcccgacaggcttaattaatatggcagccacaccaattcctgctatgagcgctcgtgatctctacgcaactgtcacacataacgtctgcgaacagaagatggagaacgtgcaacctgcccccgacaatgtactgctgactctgcgcccaaggcgcattaatatgactgataccggaataagccctatgtcaaccagagatccttacgcaaccataacctacaacgtccccgaagagaagatggagaagggccaaccccagcctgacaatatactctctaccgccagtacaggacttattaacgtggctggagctgggacacctgctatttctaccaacggcctgtatagtaccgtgccgcataacgtatgtgaagaaaaaatggaaaacgaccaaccccagcccaataacgttctctctaccgtacagcccgttataatctatttaactgcgaccggaatacctggaatgaatactcgtgatcagtacgccactataacacataatgtatgcgaggaaagagttgtgaataaccagcctctgccatccaacgctctatctactgtcctgcccggcctggcttatctcgccactgcagacatgcccgcaatgagcacacgtgatcagcatgcaaccattattcacaatctgagagaggaaaagaaagataatagtcagcccacgcccgacaacgtgttatccgcagtcactccggaattgattaaccttgctggcgccggcataccaccaatgtcaaccagagaccagtatgcgaccgttaaccatcacgtgcatgaagcaaggatggagaatgggcagcgcaagcaagacaacgttttatcaaacgtgctttctggcctcatcaacatggctggcgcttctattcctgcaatgagctcccgcgatctgtacgctacaatcactcactcagtcagagaggagaagatggagtcaggcaaacctcagactgataaggtgatctcgaatgacgctccacaacttggacatatggccgcaggaggcattccgtccatgagtaccaaggacctctatgcaactgttacccagaacgtacacgaggagagaatggaaaacaatcagcctcaaccgagctacgatcttagtaccgttctgccagggctaacgtacctgacagtagccggtatcccagcgatgtcaacacgagatcaatatgctaccgtcacacacaatgtgcatgaggagaagatcaagaacggccaggcagcttccgataacgttttttcgacagtgccaccagcctttataaatatggcggccaccggggtttcttccatgtccactcgagaccagtacgcagccgtgactcataatattagagaagaaaagattaacaattcccagccagcacctggcaatattctctcaactgccccgccatggctgagacacatggccgccgctgggattagctccactataacacgagacctctacgtgaccgctactcatagcgtgcatgaggagaaaatgaccaatgggcaacaagccccagacaactctctgtccacagtcccgcccggctgtataaacctttcaggtgctggtatctcctgtagatccacacgagacctgtatgccactgtcatccatgacatccaggaggaagagatggaaaatgatcagactccaccagatggcttcctctcaaattcagacagcccagaactgatcaacatgaccggtcattgcatgccacccaacgcacttgactctttcagccatgacttcactagcctttcaaaggatgagctgctctataaacctgatagtaatgaatttgccgtcggcactaagaattactcagtcagtgcgggagaccctcccgtgaccgtaatgagcttggttgagacagtgccaaacactccccagatttcgccagccatggcaaaaaagataaatgacgacatcaaataccagcttatgaaggaggtgcgtcgcttcggccaaaattatgagaggatatttatactgctggaagaggtgcagggatcgatgaaagtgaagcgccagtttgttgaattcaccatcaaagaagctgcccgttttaagaaagtggtgctgattcagcagctggagaaagccctcaaggagatcgactctcactgccatcttcgaaaggttaagcatatgaggaagcgctag

SEQ ID NO: 199475 - DNA, 2715 bp, Artificial Sequence
  derived and/or modified sequence
atgcaggctagtcccttacagacctcacaacccacaccacctgaggagctacacgcagccgcttacgtattcacaaatgatggccagcaaatgcggtccgacgaagtgaatttggttgccacaggtcaccagtcaaagaagaagcacagccggaaatctaaaaggcattcatcctcaaagcggcgaaagtccatgtctagttggttggataagcaggaggatgccgcagtgacgcatagcatatgcgaagaaagaataaataacgggcagccagtcgccgataatgttctgtcaacagccccaccatggcctgacgctactatcgcccataacatccgggaagagcgtatggaaaatggccagtcccggactgacaaggtgctgtctaccgcccctccacaactagtccacatggccgcagccggaattccttcaatgagtactagagacctgcattcaacggtgacgcataatattcgggaagagcgcatggaaaacggtcaaccacagcccgataatgtcctgtccacaggccctacgggcctgataaatatggccgctactcctattcccgcaatgtctgccagagatctctacgccactgtaacccacaacgtatgcgagcagaagatggagaacgtgcagcctgcccctgacaacgtgctgctcacgctacgacctcggcgaattaacatgaccgacaccggtatttctccaatgtccaccagggacccttacgccacgataacttacaatgtgcctgaggagaagatggagaaaggacaaccccagccggataacatcttatctactgcttcaacagggctcatcaacgtggctggagccggaacacccgcaatctctacgaacggcttatatagtacagtgccccataacgtctgtgaggaaaagatggagaatgaccagccccagcctaataacgtgctgtccactgttcagccagtgatcatctacctgaccgccaccggtattcctggcatgaacacacgcgaccaatatgctacaattacccataacgtgtgcgaagaacgggtcgttaataaccagcccctgcccagtaacgcattatcaacagtgctcccaggcttggcctatttggcaacagccgacatgcctgccatgagtaccagagaccagcatgcgacaatcatccataatctgagagaggaaaaaaaagacaattctcaaccaaccccagacaatgtgctttccgcggtcacaccggagcttattaatttggcgggagcaggcatccctcctatgtccacgcgcgaccagtatgctacagtgaaccatcatgtgcatgaggcaagaatggaaaacgggcagaggaagcaggacaatgttctttccaacgtgttgagcgggctgattaatatggccggagccagcatcccggctatgtcctcacgtgatctgtacgcaactatcacccacagtgtccgggaagaaaagatggaaagcggtaagcctcagacagataaagtcatatctaacgacgcccctcaattgggacatatggccgctggcggaatcccctctatgtctacaaaggacctatacgcaaccgtgacgcagaacgtgcatgaagaacgcatggagaacaaccaacctcagccctcctacgatctgagcacagtcctcccaggcctgacctacctcaccgttgcagggattccagccatgtctacacgtgaccagtatgcaactgtgacccataacgtccacgaagaaaaaattaagaacgggcaggccgcaagtgataatgtgttcagcacagttcccccagcttttatcaatatggctgccaccggggtctcaagcatgtcaactcgcgaccagtatgctgctgttacacacaatatccgagaggagaagataaataatagccagcctgcccctggcaacatcctgagcaccgcaccaccctggcttcgccacatggcggctgcgggaatctcctccacgatcacccgggacttatacgtgacggctacccactctgtccatgaagagaaaatgacaaacggccaacaggccccagataattccctgagcactgtgcctcctggctgcatcaatctgtccggcgcagggattagttgccggtccacccgggatctgtacgcaaccgtaatccacgacatccaggaagaggaaatggagaacgatcaaactcctcctgacggctttctctctaactctgattcccctgagctgataaacatgaccggacactgtatgccacccaatgctctcgattccttctctcacgacttcacttcgctgtccaaggatgaacttctgtacaagccagacagtaatgagtttgcagtcggcacaaagaactacagtgtctcagctggcgatcccccagtgaccgtgatgtctctggtcgagaccgtgccaaatacaccgcaaataagccccgctatggcaaagaagatcaacgatgacatcaaatatcagttgatgaaagaggtgagaagatttggtcagaactacgagcggattttcatactgctggaggaggttcaggggtctatgaaagtcaaaagacagttcgtggaatttaccatcaaggaagctgctcgtttcaagaaagtggtccttatccagcagctcgaaaaggcactgaaagagatagactcccactgccatctccggaaagtcaagcacatgcggaagagatag

SEQ ID NO: 199476 - DNA, 2715 bp, Artificial Sequence
  derived and/or modified sequence
atgcaggcctcaccccttcagacctcacagcccacccctcctgaggaactacatgctgctgcctacgtgtttacaaatgatggacagcagatgcggtctgacgaagtgaatctggtggccactggacatcagagcaaaaagaagcacagccggaagtcaaagcgacactctagctccaagagaagaaagagtatgtcgtcttggcttgacaaacaggaggacgccgctgtcactcacagcatctgcgaagaaagaatcaataatggacagcccgttgctgacaacgtcctatctacggcgccaccttggcccgatgccaccatagcccacaacatccgagaggagagaatggagaatggccaaagcaggaccgataaagtgctcagcacagcacctcctcagctcgtgcacatggcggcagccggtattccctctatgagtactcgggacttgcactctacagtgacccacaatatacgggaagaaagaatggaaaatggccaacctcagcccgacaatgtgctgtctaccggtccaactggtctgatcaatatggccgctacccccatccccgctatgagcgccagagatctgtacgccaccgtgacgcacaatgtttgcgagcagaagatggaaaacgtgcagcctgccccagataacgttttgttaaccctgaggccccgtagaatcaacatgaccgatactggcatttcccccatgtctacccgggacccctatgccaccattacttacaacgtgccggaagaaaagatggagaaagggcagcctcagccagataatatactctccaccgctagcaccggcttaataaacgtcgcaggcgctggcaccccggcaatcagcactaatggattatacagtactgtaccacacaatgtctgtgaggagaagatggaaaatgaccagccacagccaaacaatgtcctgagcaccgtgcagcccgtgatcatctatctgaccgccaccgggatacctggaatgaatacgagagaccagtacgcgactatcactcataacgtctgcgaggagagagtggtaaataaccagcccttgccttccaacgccttgtccaccgtgctgccagggctggcctacctagcgacagctgatatgccagccatgtctacccgcgaccagcatgctactattattcacaacctgcgcgaggagaagaaagacaactcacaacctactcccgataatgtgctgagtgccgtcacacctgaactgatcaacctagccggtgcaggtattcctcccatgtcaaccagagatcagtacgcgactgtcaaccatcatgtgcacgaagctaggatggagaacggccagcggaagcaagataatgtgctatcaaatgtactatctggactgattaacatggccggtgcctctattcctgctatgagttcacgcgacctctacgcgactataactcactcggttcgcgaagagaagatggagagtggcaaacctcaaactgataaggtcatatccaatgacgcgcctcaactgggacatatggccgctggcggtatcccctccatgtccaccaaagacctttacgccaccgttacccagaatgtgcatgaggaaagaatggagaacaaccagccccagccctcatatgacttgtctaccgtcttgcctggactgacatacctgaccgttgccggaatcccagctatgagtactcgtgaccaatatgcgactgtcacccataacgtgcacgaagaaaaaatcaagaacggccaggctgcgtccgacaacgtcttctccacagtgccaccagcattcataaacatggctgcaacaggggtgagtagcatgtccacgagggatcaatacgccgcagtcacccacaatatccgggaggagaagattaataacagccaacccgcacctggaaacattctatccactgctcctccttggttgcgacatatggcagccgcagggatcagcagcactataaccagagacctgtacgtcacggcaactcacagcgtccatgaagagaagatgactaatgggcagcaggctcccgataattcactctcaaccgtgcctcccggttgcatcaacctctctggtgccggaatctcttgtcgcagtacacgggatctgtatgcaacagtaatccacgacattcaggaagaagagatggagaacgaccagactccgcctgacgggttcttgtctaattcagactctcccgagcttatcaacatgacgggacattgcatgccaccaaacgccttggatagcttctcacacgattttactagtctgagcaaggatgagctgctatataaacccgacagcaatgagtttgccgtcgggacaaaaaattatagtgtgtcagcgggagaccctcccgtaacggtcatgtccctggtcgagacagtgccaaacactccccagatcagtcccgctatggcaaagaaaatcaacgatgacattaaatatcagctgatgaaggaggtgcgcagatttggtcagaactatgaaagaattttcatactgctcgaagaagtccagggatccatgaaagtcaaacggcaatttgtggaatttactatcaaggaagccgcaaggtttaaaaaagtcgtgctcattcagcaacttgaaaaggcgctaaaggaaatcgactcccattgccatctacgcaaagtgaagcatatgaggaaaagatag

SEQ ID NO: 199477 - DNA, 2715 bp, Artificial Sequence
  derived and/or modified sequence
atgcaagctagccctttacagacaagtcagccaacaccacccgaggaactacatgcagcagcctacgtatttacgaatgacgggcagcaaatgcggtccgacgaagtgaacttagtggctacagggcaccagtctaagaagaaacacagcaggaaatccaaacgccattcttcatccaagcggagaaaatcaatgtcttcgtggctcgataagcaggaagacgcagccgttacccactccatctgcgaggagcgtatcaacaacgggcaaccagttgctgacaacgtgctcagcacagctccaccatggcctgacgcaaccatcgcccacaatatccgggaagagagaatggaaaatggccagtcccgaacggacaaagtcttaagcactgctccgccacagctggttcatatggcagcagcaggcatcccttctatgtccaccagggatctgcatagcacagtgacccacaacatacgggaagagcgaatggagaatggccaaccccagccagacaatgtcttgagcacaggcccaacagggctgatcaacatggctgccacacctatcccggcaatgtctgcccgagacctctacgccaccgtgacccataacgtctgcgaacagaagatggaaaacgtccagccggcaccggataatgttctattgactctgcgcccacgaagaattaacatgacagacaccggcatatcccccatgtcaacaagagatccgtacgccacaatcacctataacgtgcctgaagagaaaatggagaagggtcagccacagccagacaatatcttgtctaccgcgagcacagggctgatcaacgtagccggagccggaacacctgccatatcaaccaatggcctgtacagtaccgtgccccataatgtgtgcgaagaaaaaatggaaaacgatcagcctcagcctaataacgttctctccactgtacagccggttattatttatctcaccgctacggggatccccggtatgaacaccagggaccagtatgccaccatcactcataatgtatgtgaagagcgcgtggtgaacaatcaaccccttccttccaatgccctgtcgactgtcctgccaggactcgcatatctggcaacggctgatatgcctgctatgtctactcgtgatcaacacgcgacaattattcataacctacgcgaagagaagaaagataactcccaaccaacaccggacaacgtgctgtcagcggtgacaccggaacttattaatctggccggtgcgggaatcccccctatgagtacgcgtgaccagtacgccactgtcaaccaccatgtccacgaggcccgaatggaaaacggccaacgcaagcaggataatgtgctgtctaacgtgctcagcggcctaatcaacatggctggcgcatctattcctgctatgtcttcacgagatctttacgccactatcacccactccgtgcgcgaggagaagatggagagcggcaaaccccagactgataaggtgatctctaatgatgccccacagttgggccatatggcagccggtggaattccctcaatgtctaccaaggacctttatgccacggtcacccagaacgtgcacgaggaaagaatggagaacaatcagccccaaccttcttatgacctgagcactgtactgcccggtcttacatacctcactgtcgctggcattcccgctatgagcacccgtgaccagtatgccaccgtcacacacaacgtacatgaggagaaaattaaaaacggacaagcggcttccgataatgtcttttctactgtgcctcctgctttcataaacatggccgcaacaggcgtttcttcgatgtccactagggaccagtacgccgcagtgacgcataacattcgtgaagagaagattaacaactcccagcccgctcccggtaatattctgtccactgctcctccttggttgagacatatggccgcagccggaatctcaagcacaataaccagagatttgtatgttactgctacacactccgtgcacgaggagaagatgactaatggccagcaggccccagataattctctaagtacggtgccccctggctgcataaatctgagtggggcagggattagttgtcgcagtacacgggatttatacgccactgtcatacacgatattcaggaggaggaaatggagaacgatcaaacacccccagatggctttctgtcaaattccgactcgccggaattgatcaacatgactggccactgcatgcctcctaatgcactcgactcattttctcacgatttcacctctctgagtaaagatgagctgctatacaagccagactccaacgagtttgcagtcggaacaaagaactactccgtgagcgcaggggaccccccagtgaccgtgatgagcctggtcgaaactgtgccaaacactccccagatttctccagctatggccaaaaagattaacgatgacatcaagtaccagttaatgaaagaggtccggaggtttggccagaattatgaaagaatcttcatactcctggaggaagttcagggctctatgaaggtgaagcggcagtttgtggaatttacaattaaagaggcggcacgctttaaaaaggtagtgttgatccagcagctggagaaggctctcaaagaaatcgactcccactgccacctgaggaaagtaaaacacatgcgtaagcgctag

SEQ ID NO: 199478 - DNA, 1587 bp, Artificial Sequence
  derived and/or modified sequence
atgcaggcgagccctcttcagacaagccagcctaccccacccgaggaactgcatgctgctgcttatgtcttcactaacgatggacagcagatgcggtccgatgaggtcaatctggtggccaccggacaccagagtaagaagaaacactccaggaagtccaagagacattcatcaagcaaacggagaaaatcaatgagttcatggctggataagcaagaggatgccgctgtcacgcactctatttgcgaggagcgcatcaacaacggccagcccgttgctgataatgtgctctcaactgccccaccttggcccgacgctaccatcgcccacaatattcgggaggagaggatggagaacgggcagtcaaggaccgataaagtactgtcaacggcgccaccccagctcgttcacatggcggcagccggtatcccatctatgagcacccgggatcttcatgctacagtcacacagaacgtgcacgaggagagaatggagaataatcaacctcagccatcatatgatttatccactgtgctgccaggccttacttacctgacagtggccggaattccagccatgtcgactcgggaccagtacgcaacagtaacacacaatgttcacgaggagaagataaaaaatggacaggctgcctcagacaatgtattctctacagtgcctcctgcatttattaatatggcagcaactggagtgtccagtatgtccacgcgagaccaatacgccgctgtaacacataatatcagggaggagaaaatcaataacagtcagcccgctcctggcaacatcctctccaccgcacccccatggctacgccatatggccgcagctggcattagtagcacaataaccagggacctgtacgttactgctacccacagtgtccatgaagagaaaatgacaaacggacagcaggcccctgataacagcctgagcaccgtcccacctggttgtattaacttgtccggggctgggataagttgccgcagcacgcgcgatctgtacgccaccgtaattcacgacattcaggaggaagaaatggaaaatgatcaaaccccgccagacggtttcctgtccaatagtgattctccagagctgatcaacatgacaggacactgtatgccacccaacgctcttgactctttttcccacgacttcacaagtctatctaaagacgaactgttgtataagcctgactcaaatgagtttgccgtaggaactaagaactattctgtctctgcaggggatccgcctgttaccgtgatgagcctcgtggagacagttccaaacacacctcaaatatctccagcgatggccaagaagattaatgatgatataaaatatcaactcatgaaggaagtcaggcgattcggccagaattatgaacggatttttatactcttagaggaggttcagggcagcatgaaagtgaaaagacagtttgtggagttcactataaaagaagcagcccgatttaaaaaggtggtgctcatacagcagctggaaaaggcactgaaggagatcgattcacattgtcatctgcggaaagtaaaacacatgcgcaagagatag

SEQ ID NO: 199479 - DNA, 2715 bp, Artificial Sequence
  derived and/or modified sequence
atgcaggcttcacctctgcagaccagtcagcctactccacccgaggagcttcacgctgccgcttatgtcttcactaacgatgggcaacagatgcgttccgacgaagtcaatctcgtggcaactggacaccaaagcaagaaaaagcacagtagaaagagtaagcggcattcgagcagcaagcggcgaaaaagcatgtcgagctggctcgataaacaagaggacgcagccgtgacacatagcatttgtgaggaaaggattaataacggtcagccagttgccgataatgtgctcagcacggcccctccttggcccgatgccacaattgctcacaatatccgcgaggaacggatggagaacggccagtcccggaccgataaggttctgtcaacagccccaccccagttggtccatatggccgcagcaggtatcccttcaatgtcaacacgtgatttacacagcactgttacacataatattcgcgaggaacgtatggagaacggccaaccgcagcctgacaacgtccttagcacgggcccaacgggcttgattaacatggcagcaactccgatcccggctatgtctgccagggacctctacgcaacggttacccataacgtgtgcgaacagaagatggagaatgtccagcccgctcctgataacgtcctcctgacactgcggccacgccgtattaatatgacagacacgggcatatcacccatgagtacacgagatccatacgccacaattacatacaatgtccctgaggaaaaaatggagaagggccagccacagcccgataacattctgtccaccgcttcaaccggccttattaatgtggccggtgccggaacgccagcaattagtaccaatggcctttacagcaccgtcccccataatgtgtgcgaagagaagatggagaacgatcaaccacagcccaacaacgtgctctccacagtccaacctgtgattatatacttgactgcaaccggcattccaggtatgaatacccgtgaccagtatgcaaccataactcacaacgtgtgtgaagaacgagtggttaataaccagccacttccctcaaacgccctgtcaaccgtgctcccgggtctggcatacctagctactgcggacatgccagcaatgtctacaagggatcagcatgctaccatcattcacaacctccgggaagagaagaaggacaactcccaacctaccccagataacgtgctctccgcagtcactcctgagctcattaacctggctggtgctggcattccccctatgagcacccgcgatcaatacgcgaccgtgaaccaccacgttcacgaggcgaggatggaaaacggccaacgaaagcaggacaacgtcctgagtaacgtgctgtcaggacttatcaatatggcaggggctagtattcctgctatgtcctcaagggatttatacgccacaataacccacagtgtgagggaagaaaaaatggagtccggcaagcctcaaaccgataaagtgatctctaacgatgcgccacagctcggacacatggcagccggtgggataccaagtatgtccacaaaggacctgtacgccaccgtcacgcagaacgtgcacgaagaaaggatggagaacaaccaacctcaacccagctatgacctgagcaccgtattgcctggactgacatacctgactgtggccggaattcccgcaatgagtacccgagaccaatatgccaccgtcacacacaatgtccacgaggaaaagatcaagaatggacaggccgctagcgacaacgtcttttcaaccgtaccacccgcattcataaatatggccgcaactggcgtctcttccatgtccacacgcgatcagtacgccgctgtcacccataacatcagggaggagaaaattaacaattctcaaccagctcccggtaacattctaagtacagctcccccatggctgagacatatggcagctgccggtatctcttccaccatcactcgggatctgtacgttactgcgacccattctgttcatgaggagaagatgaccaatggccagcaggctcccgataactcattatccaccgtgcctccgggatgtattaacctgtcgggagcaggcatttcatgccggtccacaagagacctgtacgccacggttattcacgatatacaggaagaggagatggagaacgaccagaccccccctgatggtttcttgagcaatagtgactcgcccgaactcattaacatgaccggccactgtatgccgccaaatgctctcgactccttttcccatgatttcacctccttgtctaaggacgaacttttgtataaacccgactctaatgaattcgcagtgggcaccaaaaattactcagtctccgccggagacccaccagtgacagtaatgagtttggtggaaacagtgcccaacacccctcagatatctccagcaatggccaaaaagattaatgacgacattaagtaccagcttatgaaggaggtgaggcgattcggtcaaaactacgaaaggatattcattttgctcgaagaggtgcagggatcaatgaaggtgaagcgtcagtttgtggagttcaccattaaagaggctgcgaggtttaagaaggtggtcctcatccagcagctggaaaaggcactgaaggagatcgattctcactgccatctccgaaaggtgaagcacatgaggaaacggtag

SEQ ID NO: 199480 - DNA, 2880 bp, Artificial Sequence
  derived and/or modified sequence
cataagcagaggaatgcagaaccttctcacccagcgggatgaaatcatgcaggcttctccacttcaaacgagtcaaccaactccacctgaagaacttcatgctgctgcctatgtgtttacaaatgatgggcagcaaatgaggagtgatgaagtaaatctggttgcaacagggcatcaaagcaaaaagaaacattccagaaaatccaagagacactcttcatctaagagaaggaagagtatgtcctcgtggttagacaaacaggaagatgctgcagtcactcacagcatttgtgaagagaggataaataacggccaaccagtagctgataatgtcttgtcaactgctccaccatggcctgatgctaccatcgctcacaatatccgtgaagagaggatggaaaatggccaatctcgaactgacaaagtcttgtcaactgctccaccacagcttgttcatatggctgcagctggtattccatccatgagtaccagggatctgcattctaccgtcactcacaatatccgtgaagagagaatggaaaatggccaaccccaacctgataacgtcttgtcaactggtcccacagggcttattaatatggcagcaactcctattccagccatgagtgccagagatctctatgctacagtcactcacaatgtctgtgaacagaagatggaaaatgtccaaccagcacctgataacgtgttgttgactcttcgaccacggcgtattaatatgacagacactggtatttcacccatgagtaccagggatccatatgctaccatcacttacaatgtccctgaggagaagatggaaaagggccaaccccaacctgataacatcttgtcaactgcttcaacagggcttattaatgtggcaggagctggtactccagccatcagcaccaatggcctgtattccaccgtccctcacaatgtctgtgaagagaagatggaaaatgaccaaccgcaacctaataacgtattgtcaactgttcaaccagtgattatttatttgacagcaactggtattccgggcatgaataccagggatcagtatgctaccatcactcacaatgtctgtgaagagagagtggtaaataaccaaccactacctagtaacgccttgtcaactgttctaccagggcttgcttatttggcaacagctgatatgccagccatgagtaccagggatcagcatgctaccatcattcacaatctgcgtgaagagaagaaagataacagccaaccaacccctgataacgtcttgtcagctgttacaccagagcttattaacttggcaggagctggtattccacccatgagtaccagggatcagtatgctaccgtcaatcaccatgtccatgaagcaaggatggaaaatggccaacgaaaacaggataacgtcttgtcaaatgttctatccgggcttattaatatggcaggagctagtattccagcaatgagttccagggatctgtatgctaccattactcacagtgttcgtgaagagaagatggaaagtggcaaaccccaaactgataaggtcatatcaaatgatgcaccacagcttggtcatatggctgcaggtggtattccatccatgagtaccaaggatctgtatgctaccgtcactcaaaatgtccatgaagagaggatggaaaataaccaaccacaacctagttatgacttgtcaactgttctaccaggacttacttatttgacagtagctggtattccggccatgagtaccagggatcagtatgctaccgtcactcacaatgtccatgaagagaagattaaaaatggccaagcagcatccgataatgtcttctcgactgttccaccagcatttattaatatggcagcaactggtgtttcatccatgagtaccagggatcagtatgctgcagtcactcacaacatccgtgaagagaagataaataacagccaaccagcacctggtaacatcttgtcaactgctcctccatggcttcgtcatatggcagcagctggaatttcatccacgattaccagggatctgtatgtcaccgccactcacagtgtccatgaggagaagatgacaaatggccaacaggcacctgataactccttgtcaacggttccacctggttgtattaatctgtcaggagctggtatttcatgcagaagtaccagggatctgtatgctactgtcattcacgatatccaggaggaggagatggaaaatgatcaaacccctcctgatggcttcctgtcaaattctgattcaccagagctgataaatatgacaggacattgtatgccacccaatgcattggattctttctctcacgacttcacaagtctcagcaaagatgagctgctttacaaacctgatagtaatgaatttgcggtaggcaccaaaaactacagtgtctctgcaggtgacccaccagttacagtaatgtctttggtggaaactgtgccaaatacaccacaaatatctcctgccatggcaaagaaaattaatgatgatataaaatatcaattaatgaaagaagttcgaaggtttgggcaaaattatgaaagaattttcattttgcttgaagaggtacaaggatctatgaaagtcaagagacaatttgttgaatttaccatcaaggaagcagcaaggtttaaaaaagttgtcttaattcagcaactcgagaaggcgcttaaagaaatagattcccactgccatctcagaaaagttaagcacatgagaaaaagataattgtgttagtgcaaagaccaaggagaaacaaggacatatgctgtaggatggaacaggttattgctgaagctccctataatcctgaaatgaagagaattcccttccagaagctacgaaaa

SEQ ID NO: 199481 - DNA, 2879 bp, Artificial Sequence
  derived and/or modified sequence
atgcaggcttctccacttcaaacgagtcaaccaactccacctgaagaacttcatgctgctgcctatgtgtttacaaatgatgggcagcaaatgaggagtgatgaagtaaatctggttgcaacagggcatcaaagcaaaaagaaacattccagaaaatccaagagacactcttcatctaagagaaggaagagtatgtcctcgtggttagacaaacaggaagatgctgcagtcactcacagcatttgtgaagagaggataaataacggccaaccagtagctgataatgtcttgtcaactgctccaccatggcctgatgctaccatcgctcacaatatccgtgaagagaggatggaaaatggccaatctcgaactgacaaagtcttgtcaactgctccaccacagcttgttcatatggctgcagctggtattccatccatgagtaccagggatctgcattctaccgtcactcacaatatccgtgaagagagaatggaaaatggccaaccccaacctgataacgtcttgtcaactggtcccacagggcttattaatatggcagcaactcctattccagccatgagtgccagagatctctatgctacagtcactcacaatgtctgtgaacagaagatggaaaatgtccaaccagcacctgataacgtgttgttgactcttcgaccacggcgtattaatatgacagacactggtatttcacccatgagtaccagggatccatatgctaccatcacttacaatgtccctgaggagaagatggaaaagggccaaccccaacctgataacatcttgtcaactgcttcaacagggcttattaatgtggcaggagctggtactccagccatcagcaccaatggcctgtattccaccgtccctcacaatgtctgtgaagagaagatggaaaatgaccaaccgcaacctaataacgtattgtcaactgttcaaccagtgattatttatttgacagcaactggtattccgggcatgaataccagggatcagtatgctaccatcactcacaatgtctgtgaagagagagtggtaaataaccaaccactacctagtaacgccttgtcaactgttctaccagggcttgcttatttggcaacagctgatatgccagccatgagtaccagggatcagcatgctaccatcattcacaatctgcgtgaagagaagaaagataacagccaaccaacccctgataacgtcttgtcagctgttacaccagagcttattaacttggcaggagctggtattccacccatgagtaccagggatcagtatgctaccgtcaatcaccatgtccatgaagcaaggatggaaaatggccaacgaaaacaggataacgtcttgtcaaatgttctatccgggcttattaatatggcaggagctagtattccagcaatgagttccagggatctgtatgctaccattactcacagtgttcgtgaagagaagatggaaagtggcaaaccccaaactgataaggtcatatcaaatgatgcaccacagcttggtcatatggctgcaggtggtattccatccatgagtaccaaggatctgtatgctaccgtcactcaaaatgtccatgaagagaggatggaaaataaccaaccacaacctagttatgacttgtcaactgttctaccaggacttacttatttgacagtagctggtattccggccatgagtaccagggatcagtatgctaccgtcactcacaatgtccatgaagagaagattaaaaatggccaagcagcatccgataatgtcttctcgactgttccaccagcatttattaatatggcagcaactggtgtttcatccatgagtaccagggatcagtatgctgcagtcactcacaacatccgtgaagagaagataaataacagccaaccagcacctggtaacatcttgtcaactgctcctccatggcttcgtcatatggcagcagctggaatttcatccacgattaccagggatctgtatgtcaccgccactcacagtgtccatgaggagaagatgacaaatggccaacaggcacctgataactccttgtcaacggttccacctggttgtattaatctgtcaggagctggtatttcatgcagaagtaccagggatctgtatgctactgtcattcacgatatccaggaggaggagatggaaaatgatcaaacccctcctgatggcttcctgtcaaattctgattcaccagagctgataaatatgacaggacattgtatgccacccaatgcattggattctttctctcacgacttcacaagtctcagcaaagatgagctgctttacaaacctgatagtaatgaatttgcggtaggcaccaaaaactacagtgtctctgcaggtgacccaccagttacagtaatgtctttggtggaaactgtgccaaatacaccacaaatatctcctgccatggcaaagaaaattaatgatgatataaaatatcaattaatgaaagaagttcgaaggtttgggcaaaattatgaaagaattttcattttgcttgaagaggtacaaggatctatgaaagtcaagagacaatttgttgaatttaccatcaaggaagcagcaaggtttaaaaaagttgtcttaattcagcaactcgagaaggcgcttaaagaaatagattcccactgccatctcagaaaagttaagcacatgagaaaaagataattgtgttagtgcaaagaccaaggagaaacaaggacatatgctgtaggatggaacaggttattgctgaagctccctataatcctgaaatgaagagaattcccttccagaagctacgaaaaagggagctgtttaaatttaataaatctctgttagtaaaagctgca

SEQ ID NO: 199482 - DNA, 3045 bp, Artificial Sequence
  derived and/or modified sequence
caggaccgctggcgccagcgggagaaccaggaagcgcagctctccccttagctgactctggtgctctctacaggtggccttcactatcaactgcacagcgggcagaggcagaggaacacagaaccttctcacacagcgggataaaagggtgaatttggagctgacagatgcaggcttctccacttcaaacgagtcaaccaactccacctgaagaacttcatgctgctgcctatgtgtttacaaatgatgggcagcaaatgaggagtgatgaagtaaatctggttgcaacagggcatcaaagcaaaaagaaacattccagaaaatccaagagacactcttcatctaagagaaggaagagtatgtcctcgtggttagacaaacaggaagatgctgcagtcactcacagcatttgtgaagagaggataaataacggccaaccagtagctgataatgtcttgtcaactgctccaccatggcctgatgctaccatcgctcacaatatccgtgaagagaggatggaaaatggccaatctcgaactgacaaagtcttgtcaactgctccaccacagcttgttcatatggctgcagctggtattccatccatgagtaccagggatctgcattctaccgtcactcacaatatccgtgaagagagaatggaaaatggccaaccccaacctgataacgtcttgtcaactggtcccacagggcttattaatatggcagcaactcctattccagccatgagtgccagagatctctatgctacagtcactcacaatgtctgtgaacagaagatggaaaatgtccaaccagcacctgataacgtgttgttgactcttcgaccacggcgtattaatatgacagacactggtatttcacccatgagtaccagggatccatatgctaccatcacttacaatgtccctgaggagaagatggaaaagggccaaccccaacctgataacatcttgtcaactgcttcaacagggcttattaatgtggcaggagctggtactccagccatcagcaccaatggcctgtattccaccgtccctcacaatgtctgtgaagagaagatggaaaatgaccaaccgcaacctaataacgtattgtcaactgttcaaccagtgattatttatttgacagcaactggtattccgggcatgaataccagggatcagtatgctaccatcactcacaatgtctgtgaagagagagtggtaaataaccaaccactacctagtaacgccttgtcaactgttctaccagggcttgcttatttggcaacagctgatatgccagccatgagtaccagggatcagcatgctaccatcattcacaatctgcgtgaagagaagaaagataacagccaaccaacccctgataacgtcttgtcagctgttacaccagagcttattaacttggcaggagctggtattccacccatgagtaccagggatcagtatgctaccgtcaatcaccatgtccatgaagcaaggatggaaaatggccaacgaaaacaggataacgtcttgtcaaatgttctatccgggcttattaatatggcaggagctagtattccagcaatgagttccagggatctgtatgctaccattactcacagtgttcgtgaagagaagatggaaagtggcaaaccccaaactgataaggtcatatcaaatgatgcaccacagcttggtcatatggctgcaggtggtattccatccatgagtaccaaggatctgtatgctaccgtcactcaaaatgtccatgaagagaggatggaaaataaccaaccacaacctagttatgacttgtcaactgttctaccaggacttacttatttgacagtagctggtattccggccatgagtaccagggatcagtatgctaccgtcactcacaatgtccatgaagagaagattaaaaatggccaagcagcatccgataatgtcttctcgactgttccaccagcatttattaatatggcagcaactggtgtttcatccatgagtaccagggatcagtatgctgcagtcactcacaacatccgtgaagagaagataaataacagccaaccagcacctggtaacatcttgtcaactgctcctccatggcttcgtcatatggcagcagctggaatttcatccacgattaccagggatctgtatgtcaccgccactcacagtgtccatgaggagaagatgacaaatggccaacaggcacctgataactccttgtcaacggttccacctggttgtattaatctgtcaggagctggtatttcatgcagaagtaccagggatctgtatgctactgtcattcacgatatccaggaggaggagatggaaaatgatcaaacccctcctgatggcttcctgtcaaattctgattcaccagagctgataaatatgacaggacattgtatgccacccaatgcattggattctttctctcacgacttcacaagtctcagcaaagatgagctgctttacaaacctgatagtaatgaatttgcggtaggcaccaaaaactacagtgtctctgcaggtgacccaccagttacagtaatgtctttggtggaaactgtgccaaatacaccacaaatatctcctgccatggcaaagaaaattaatgatgatataaaatatcaattaatgaaagaagttcgaaggtttgggcaaaattatgaaagaattttcattttgcttgaagaggtacaaggatctatgaaagtcaagagacaatttgttgaatttaccatcaaggaagcagcaaggtttaaaaaagttgtcttaattcagcaactcgagaaggcgcttaaagaaatagattcccactgccatctcagaaaagttaagcacatgagaaaaagataattgtgttagtgcaaagaccaaggagaaacaaggacatatgctgtaggatggaacaggttattgctgaagctccctataatcctgaaatgaagagaattcccttccagaagctacgaaaaagggagctgtttaaatttaataaatctctgttagtaaaagctgc

SEQ ID NO: 199483 - DNA, 1754 bp, Artificial Sequence
  derived and/or modified sequence
ggcagaggcagaggaacacagaaccttctcacacagcgggataaaaggatgcaggcttctccacttcaaacgagtcaaccaactccacctgaagaacttcatgctgctgcctatgtgtttacaaatgatgggcagcaaatgaggagtgatgaagtaaatctggttgcaacagggcatcaaagcaaaaagaaacattccagaaaatccaagagacactcttcatctaagagaaggaagagtatgtcctcgtggttagacaaacaggaagatgctgcagtcactcacagcatttgtgaagagaggataaataacggccaaccagtagctgataatgtcttgtcaactgctccaccatggcctgatgctaccatcgctcacaatatccgtgaagagaggatggaaaatggccaatctcgaactgacaaagtcttgtcaactgctccaccacagcttgttcatatggctgcagctggtattccatccatgagtaccagggatctgcatgctaccgtcactcaaaatgtccatgaagagaggatggaaaataaccaaccacaacctagttatgacttgtcaactgttctaccaggacttacttatttgacagtagctggtattccggccatgagtaccagggatcagtatgctaccgtcactcacaatgtccatgaagagaagattaaaaatggccaagcagcatccgataatgtcttctcgactgttccaccagcatttattaatatggcagcaactggtgtttcatccatgagtaccagggatcagtatgctgcagtcactcacaacatccgtgaagagaagataaataacagccaaccagcacctggtaacatcttgtcaactgctcctccatggcttcgtcatatggcagcagctggaatttcatccacgattaccagggatctgtatgtcaccgccactcacagtgtccatgaggagaagatgacaaatggccaacaggcacctgataactccttgtcaacggttccacctggttgtattaatctgtcaggagctggtatttcatgcagaagtaccagggatctgtatgctactgtcattcacgatatccaggaggaggagatggaaaatgatcaaacccctcctgatggcttcctgtcaaattctgattcaccagagctgataaatatgacaggacattgtatgccacccaatgcattggattctttctctcacgacttcacaagtctcagcaaagatgagctgctttacaaacctgatagtaatgaatttgcggtaggcaccaaaaactacagtgtctctgcaggtgacccaccagttacagtaatgtctttggtggaaactgtgccaaatacaccacaaatatctcctgccatggcaaagaaaattaatgatgatataaaatatcaattaatgaaagaagttcgaaggtttgggcaaaattatgaaagaattttcattttgcttgaagaggtacaaggatctatgaaagtcaagagacaatttgttgaatttaccatcaaggaagcagcaaggtttaaaaaagttgtcttaattcagcaactcgagaaggcgcttaaagaaatagattcccactgccatctcagaaaagttaagcacatgagaaaaagataattgtgttagtgcaaagaccaaggagaaacaaggacatatgctgtaggatggaacaggttattgctgaagctccctataatcctgaaatgaagagaattcccttccagaagctacgaaaa

SEQ ID NO: 199484 - protein, 655 aa, Artificial Sequence
  derived and/or modified sequence
MVLYTTPFPNSCLSALHCVSWALIFPCYWLVDRLAASFIPTTYEKRQRADDPCCLQLLCTALFTPIYLALLVASLPFAFLGFLFWSPLQSARRPYIYSRLEDKGLAGGAALLSEWKGTGPGKSFCFATANVCLLPDSLARVNNLFNTQARAKEIGQRIRNGAARPQIKIYIDSPTNTSISAASFSSLVSPQGGDGVARAVPGSIKRTASVEYKGDGGRHPGDEAANGPASGDPVDSSSPEDACIVRIGGEEGGRPPEADDPVPGGQARNGAGGGPRGQTPNHNQQDGDSGSLGSPSASRESLVKGRAGPDTSASGEPGANSKLLYKASVVKKAAARRRRHPDEAFDHEVSAFFPANLDFLCLQEVFDKRAATKLKEQLHGYFEYILYDVGVYGCQGCCSFKCLNSGLLFASRYPIMDVAYHCYPNKCNDDALASKGALFLKVQVGSTPQDQRIVGYIACTHLHAPQEDSAIRCGQLDLLQDWLADFRKSTSSSSAANPEELVAFDVVCGDFNFDNCSSDDKLEQQHSLFTHYRDPCRLGPGEEKPWAIGTLLDTNGLYDEDVCTPDNLQKVLESEEGRREYLAFPTSKSSGQKGRKELLKGNGRRIDYMLHAEEGLCPDWKAEVEEFSFITQLSGLTDHLPVAMRLMVSSGEEEA

SEQ ID NO: 199485 - DNA, 5451 bp, Artificial Sequence
  derived and/or modified sequence
ggtctctgggggatgtggtcttgaaggagagacccaggaacctgcgggcggggccggagggagaggggaggacgcccccaatgggcagactcctgggcggggtccgggtcaccattggctccggcggcgcgagggaggcggggtcagaggaatgaagcgcggagctgttcgccgctccaggtgctgagtctgagggaggctccggacccgagagccgcgagagccgccgccgctgcggccgccgccagatctgcggccgggagcccgggctgtgaggagccgggaggagcggggtgcgctgccgggcgctgaccgccctcccgcccgccgtcagaggtctgcggtgacagctcttcttcagagagaaggacaacaaggtcccagtggcccctcctcagggtctgcagtaggcctccgcatggcccaccgaggtgaaccatgaccggctggccaacattcgccattgaccagccggagttgcatctcgccaggaggtgacccctcctccagctgcccccaactcgcccaccctcgcccaggaaagtgcccgcagctgccacggacaccatgtagtagggccggctgcggcgcccagtgagctgcgatggttttgtacacgaccccctttcctaacagctgtctgtccgccctgcactgtgtgtcctgggcccttatctttccatgctactggctggtggaccggctcgctgcctccttcatacccaccacctacgagaagcgccagcgggcagacgacccgtgctgcctgcagctgctctgcactgccctcttcacgcccatctacctggccctcctggtggcctcgctgccctttgcgtttctcggctttctcttctggtccccactgcagtcggcccgccggccctacatctattcacggctggaagacaagggcctggccggtggggcagccctgctcagtgaatggaagggcacggggcctggcaaaagcttctgctttgccactgccaacgtctgcctcctgcccgactcactcgccagggtcaacaacctttttaacacccaagcgcgggccaaggagatcgggcagagaatccgcaatggggccgcccggccccagatcaaaatttacatcgactcccccaccaatacctccatcagcgccgctagcttcagcagcctggtgtcaccacagggcggcgatggggtggcccgggccgtccccgggagcattaagaggacagcctctgtggagtacaagggtgacggtgggcggcaccccggtgacgaggctgccaacggcccagcctctggggaccctgtcgacagcagcagcccggaggatgcctgcatcgtgcgcatcggtggcgaggagggcggccggccacctgaagctgacgaccctgtgcctgggggccaggccaggaacggagctggcgggggcccaaggggccagacgcccaaccataatcagcaggacggggattcagggagcctgggcagcccctcggcctcccgggagtccctggtgaaggggcgagctgggccagacaccagtgccagcggggagccaggtgccaacagcaagctcctgtacaaggcctcggtggtgaagaaggcggctgcacgcaggaggcggcaccccgacgaggccttcgaccatgaggtctccgccttcttccccgccaacctggacttcctgtgcctgcaggaggtgtttgacaagcgagcagccaccaaattgaaagagcagctgcacggctacttcgagtacatcctgtacgacgtcggggtctacggctgccagggctgctgcagcttcaagtgtctcaacagcggcctcctctttgccagccgctaccccatcatggacgtggcctatcactgttaccccaacaagtgtaacgacgatgccctggcctctaagggagctctgtttctcaaggtgcaggtgggaagcacacctcaggaccaaagaatcgtcgggtacatcgcctgcacacacctgcatgccccgcaagaggacagcgccatccggtgtgggcagctggacctgcttcaggactggctggctgatttccgaaaatctacctcctcgtccagcgcagccaaccccgaggagctggtggcatttgacgtcgtctgtggagatttcaactttgataactgctcctctgacgacaagctggagcagcaacactccctgttcacccactacagggacccctgccgcctggggcctggtgaggagaagccgtgggccatcggtactctgctggacacgaacggcctgtacgatgaggatgtgtgcacccccgacaacctgcagaaggtcctggagagtgaggagggccgcagggagtacctggcgtttcccaccagcaagagctcgggccagaaggggcggaaggagctgctgaagggcaacggccggcgcatcgactacatgctgcatgcagaggaggggctgtgcccagactggaaggccgaggtggaagaattcagttttatcacccagctgtccggcctgacggaccacctgccagtagccatgcgactgatggtgtcttcgggggaggaggaggcatagaccgtccggagcagcggggcctctgccagcccttgcagctgcagcccatccctgggccatgtcccctccatcgagtgcccggtgcttgggggaggagggcagggacagggagggagccacagtcagtgcccgggaacctggaagctgcgctgctctgcgcctctgggcctcactgtggacagaggagtcaggcccgccccaggagcctccagctgcctaaccagtgccattctttcacaacacgattttctacaaatctacagcacaaccgagtttgtaacccgtgggttagtatgaggaccgggttcgtgtactctctgtatctcctcttaagcttcgtccagggttctttatttttgtctgctgccaatgtcgtctcgcatgcctgcaccctcgcatgcacgctgcccgcatgccacgtgccacgctgtagccacagaccccttgctcgggcctcacccaaggccaaactccaaacacaatcagaaccagccaaagaagcacttcctgggcacggccaccagctctcccgcctccagtgtgggccggctcctgcagggtccgagggctgcatctctaccagccagcccagggctcttcccagggtctcgcattcaagggcaattacattttaaaaagaaaaacagaaaaaggttaatcacaaaaccaaccctcacttcacagggtctgtaagtcactcatagaactttgctcttcccgagacagggtcccttccccagctcaggcacaacagagtctggcaggctctggcaccctgggcctcctccgggagcctcccatctgggcagtggagccataaacggggatccgagaagagagtatccacttttttttttacaggaagaagggactcacagcataaacgggggtgggggggatcctgattttgaaaataatctatttgtagcttctcttctatcaaaaccaacacatcctcttctttctgccaatcctctcccccacgggacacctctctggttcgggaccaatccctccctggggacgtgccccacctgcgtgccggctgagctcaggaacccctgcctgccccccgggtggggctgcggctctggcctcccaggcccatcctcaacagctaccccagccaacaccaaggccacaaggggaccccggcctaggaggcaggaagccaaggtgcagagagcagcctggccctcaccagtgcgcaagctggggcagcaaggctgacagttgctgcatgcccagggcagggtgtggtactggcacccaagttcagcatggcagagctggccaacagcttgtggtccccgatctgcctccagccccaagatgcctacagcccccaggccccttcggcagcactgcctctgcccacctgcctttaagagactccagggctgctcctgtcatgcagcgaaggttttgtctgtttcaaagttcgagactcaacttgagggactgtttttgacaatccccgctgacctccgctcctcgtggcgccctggccctacacccagcctggcccagggccggctttgcctggtgaggctggagggagcaccaggacctgctgtctgctgtcagcccctcctggtgctggtgccctgatgctgtgccttgtcacccattgagctgcaagagggaccaagagggggccacgcagccagccagatgcctggccctgtgctggggcagacaacgctgcagagcccagggagcctggcgctaggacgtgcgtccttgtgacactggcctgtctgaactcacctggcctgggaagcaccgtctgcccgggcccaagccctgcccctccagagtccagagccaggaaggggctgctgagggcgagcatcctgctgggctctctgcccggcccacccctccaaggggctggcctgtgagccttgactgggattcatgatgtggaggcccccaacttccagaagcagctggtactctgctcacacaagcgactgggccggccggccctggacccctagaccccgagccgcctgccgactgcctgcacagggagagcagttgaggcccgggcagggcccccacaccagaccccaacatagcttccccacccaggcaccccctcccggggcagcaggcgtgggagtcagggctgcatgctcctcccctcccacctcacaggcggccttaggcaagtcattttctgtcatcacaaggtcgcctctgcctagtcaggtcctggggtccagagtaaggatgtgcggcccccaggcccccgcacacctccctcagcaccaagaccgggacccccccacccacgtgtctcattgtggctgcctatggactcccgggccttgtgtgcaggccaggcccttccactgattttttaaagtgaaccattgctggatctcagattctgtggcatctaaggcctagcaggggtgggcacacgggtcacccgaggcccataccaagactctgttcctgccctaggcccagtctcaaaggaagccacaaggcgcgggggccactgaggaaggaaatgttcattttcatttgtccaaaaccaccttaagttttaagtatattaatcttgatgctttttaactattgctttttaacttgctgagatttagaaatactgttataaaaacttttttaatttctgtatttttttctgtattgtatcttcatgggacattaggggttttctatggtaagcacacctatggttttggtaaaaacattatcaaatatatatccagacggttcttccctagaagaaaaacaagtctttacacctgataaaatattttgcgaagagaggtgttctttttccttactggtgctgaaaggaaggatggataacgaggagaaaataaaactgtgaggctcaa

SEQ ID NO: 199486 - DNA, 1968 bp, Artificial Sequence
  derived and/or modified sequence
atggtgctgtacaccacccccttccccaacagctgcctgagcgccctgcactgcgtgagctgggccctgatcttcccctgctactggctggtggacagactggccgccagcttcatccccaccacctacgagaagagacagagagccgacgacccctgctgcctgcagctgctgtgcaccgccctgttcacccccatctacctggccctgctggtggccagcctgcccttcgccttcctgggcttcctgttctggagccccctgcagagcgccagaagaccctacatctacagcagactggaggacaagggcctggccggcggcgccgccctgctgagcgagtggaagggcaccggccccggcaagagcttctgcttcgccaccgccaacgtgtgcctgctgcccgacagcctggccagagtgaacaacctgttcaacacccaggccagagccaaggagatcggccagagaatcagaaacggcgccgccagaccccagatcaagatctacatcgacagccccaccaacaccagcatcagcgccgccagcttcagcagcctggtgagcccccagggcggcgacggcgtggccagagccgtgcccggcagcatcaagagaaccgccagcgtggagtacaagggcgacggcggcagacaccccggcgacgaggccgccaacggccccgccagcggcgaccccgtggacagcagcagccccgaggacgcctgcatcgtgagaatcggcggcgaggagggcggcagaccccccgaggccgacgaccccgtgcccggcggccaggccagaaacggcgccggcggcggccccagaggccagacccccaaccacaaccagcaggacggcgacagcggcagcctgggcagccccagcgccagcagagagagcctggtgaagggcagagccggccccgacaccagcgccagcggcgagcccggcgccaacagcaagctgctgtacaaggccagcgtggtgaagaaggccgccgccagaagaagaagacaccccgacgaggccttcgaccacgaggtgagcgccttcttccccgccaacctggacttcctgtgcctgcaggaggtgttcgacaagagagccgccaccaagctgaaggagcagctgcacggctacttcgagtacatcctgtacgacgtgggcgtgtacggctgccagggctgctgcagcttcaagtgcctgaacagcggcctgctgttcgccagcagataccccatcatggacgtggcctaccactgctaccccaacaagtgcaacgacgacgccctggccagcaagggcgccctgttcctgaaggtgcaggtgggcagcaccccccaggaccagagaatcgtgggctacatcgcctgcacccacctgcacgccccccaggaggacagcgccatcagatgcggccagctggacctgctgcaggactggctggccgacttcagaaagagcaccagcagcagcagcgccgccaaccccgaggagctggtggccttcgacgtggtgtgcggcgacttcaacttcgacaactgcagcagcgacgacaagctggagcagcagcacagcctgttcacccactacagagacccctgcagactgggccccggcgaggagaagccctgggccatcggcaccctgctggacaccaacggcctgtacgacgaggacgtgtgcacccccgacaacctgcagaaggtgctggagagcgaggagggcagaagagagtacctggccttccccaccagcaagagcagcggccagaagggcagaaaggagctgctgaagggcaacggcagaagaatcgactacatgctgcacgccgaggagggcctgtgccccgactggaaggccgaggtggaggagttcagcttcatcacccagctgagcggcctgaccgaccacctgcccgtggccatgagactgatggtgagcagcggcgaggaggaggcctag

SEQ ID NO: 199487 - DNA, 1968 bp, Artificial Sequence
  derived and/or modified sequence
atggtgctgtacactacccctttccctaatagctgcctgtctgcactgcactgtgtatcatgggccctgatcttcccgtgctattggttggttgataggctggcagcgtcctttattcccactacctacgaaaagcgacagcgggccgacgacccctgctgtttgcaattgctctgtactgccctgttcaccccaatctacctggccctgctagtcgcttcactgcctttcgccttcctcgggtttttgttttggagcccgctgcagtccgctaggcgcccatacatctatagtaggctcgaagataaaggcctggctgggggagctgctttattaagcgagtggaagggtacggggcctggcaagagtttttgcttcgcgacggcaaatgtgtgtctgcttccggactccctcgcccgggttaacaacctctttaatactcaggctagggccaaggaaattggccagcgcatccgtaacggtgccgctcgccctcaaataaagatctatatcgattctccaacaaatacgtccatcagcgctgcctcctttagctcattagtgtctccacaggggggcgatggtgtcgcacgcgccgtgcctggctctatcaaacggactgccagtgtagagtacaagggagatggaggacgacaccctggtgatgaggctgctaatggacccgcgtcaggagatcctgtagactccagctcccccgaggatgcctgtatcgttaggatcggaggcgaggagggcggcagaccacctgaggcagacgacccagtccccggcgggcaggcacgcaatggagctggtggtgggccccgcgggcaaacacccaaccataatcagcaggacggcgacagtggaagtcttggatcaccctcggcttctagggaaagcctagtcaaggggcgggcagggccggacacatcagcaagcggcgaacctggagctaacagtaaactcctgtataaagcaagcgtcgtaaagaaggcagcggcacggcggaggcgccaccccgacgaggcattcgaccatgaggtgtccgcatttttcccagcaaacctggactttctgtgtttgcaagaggtgttcgacaagagggccgccacaaagctgaaggaacagctgcacggctattttgagtatatcctctatgatgttggagtatacggctgtcagggatgttgttcctttaaatgtcttaattccggcctcttatttgcctcaagatatccgatcatggatgtcgcataccattgctatccgaataagtgcaacgatgacgcattggcctctaagggcgctctgttcctcaaagtccaggtgggatcaacccctcaggatcagcgcatcgtagggtacatcgcgtgcacacatctccacgctcctcaggaggactctgcaattcgatgtggacagctcgatttgttgcaggattggctggccgacttcaggaaaagcacttcgtcttcaagtgctgccaatcctgaggagctggtagcatttgacgtggtgtgcggcgactttaactttgataactgtagtagcgatgacaaattggagcaacagcacagcctgttcactcactacagagatccctgccgattgggtccaggagaagaaaaaccctgggctatcggcaccctcttagatactaatggtctgtacgacgaggatgtctgcacccccgataacctgcagaaggtgctagagtcagaggaaggcaggagggaatacctcgcattccccacctccaaatcatctggccaaaaaggtaggaaagagcttctcaagggaaacggcagacggatcgattatatgcttcatgccgaagaaggactctgcccggattggaaggccgaggtggaagagttctctttcatcacacagttgtccggcctcaccgatcacttacctgttgcaatgcgcctcatggtctcttccggagaagaggaggcctag

SEQ ID NO: 199488 - DNA, 1968 bp, Artificial Sequence
  derived and/or modified sequence
atggtgctgtacaccacccccttccccaacagctgcctgagcgccctgcactgtgtgtcctgggccctgatcttcccctgctactggctggtggaccggctggccgccagcttcatccccaccacctatgagaagaggcagagagcagatgacccctgctgcctgcagctgctgtgcacagccctcttcacccccatctacctggccctgctggtggccagcctgccctttgccttcctgggcttcctgttctggagccccctgcagagcgcccggcggccctacatctacagccggctggaggacaagggcctggccggcggggccgccctgctgtctgagtggaagggcaccggccctgggaagagcttctgctttgccacagccaacgtgtgcctgctgcctgacagcctggcccgggtgaacaacctcttcaacacccaggcccgggccaaggagatcggccagaggatcagaaatggagctgcccggccccagatcaagatctacatcgacagccccaccaacaccagcatctctgctgccagcttcagcagcctggtgagcccccagggcggagatggagtggcccgggctgtgcccggcagcatcaagaggacagcctctgtggagtacaagggagatggcggccgccaccctggagatgaggccgccaacggccctgccagcggggaccctgtggacagcagcagcccagaagatgcctgcatcgtgagaattggaggagaggagggcggccggcccccagaggctgatgatcctgtgcctgggggccaggccagaaatggagctgggggcggcccccggggccagacccccaaccacaaccagcaggatggagacagcggcagcctgggcagccccagcgccagccgggagagcctggtgaagggccgggccggccctgacaccagcgccagcggggagcccggggccaacagcaagctgctgtacaaggcctctgtggtgaagaaggccgccgccaggagaagaagacacccagatgaggcctttgaccacgaggtgtctgccttcttccctgccaacctggacttcctgtgcctgcaggaggtgtttgacaagagagctgccaccaagctgaaggagcagctgcacggctactttgagtacatcctgtatgatgtgggcgtgtatggctgccagggctgctgcagcttcaagtgcctgaacagcggcctgctgtttgccagccgctaccccatcatggatgtggcctaccactgctaccccaacaagtgcaatgatgatgccctggccagcaaaggagccctcttcctgaaggtgcaggtgggcagcaccccccaggaccagagaattgtgggctacatcgcctgcacccacctgcacgccccccaggaggacagcgccatccgctgtggccagctggacctgctgcaggactggctggccgacttcaggaagagcaccagcagcagcagcgctgccaaccctgaggagctggtggcctttgatgtggtgtgtggggacttcaactttgacaactgcagcagtgatgacaagctggagcagcagcacagcctcttcacccactacagagacccctgccgcctgggccctggagaggagaagccctgggccatcggcaccctgctggacaccaacggcctgtatgatgaagatgtgtgcaccccagacaacctgcagaaggtgctggagagcgaggagggccggcgggagtacctggccttccccaccagcaagagcagcggccagaagggcaggaaggagctgctgaagggaaatggaagaagaattgactacatgctgcacgccgaggagggcctgtgcccagactggaaggccgaggtggaggagttctccttcatcacccagctgagcggcctgacagaccacctgcctgtggccatgaggctgatggtgagcagcggggaggaggaggcctag

SEQ ID NO: 199489 - DNA, 1968 bp, Artificial Sequence
  derived and/or modified sequence
atggtgctgtacaccacccccttccccaacagctgcctgagcgccttgcactgcgtgagttgggctcttatcttcccctgctactggctcgtggacaggctggccgcttccttcatccctaccacttatgagaagaggcagagggccgacgacccctgttgcctgcagttgttgtgtactgcgttgtttacgcccatctatttggctctgctggtggctagcctgccctttgcttttctgggctttcttttctggagtccactgcagtctgcaaggcgtccctacatctactcgcgccttgaggacaaaggacttgcaggaggggctgctctcctgagcgaatggaagggcactgggcccgggaaaagcttttgctttgctacagccaacgtttgtctgttacctgatagcttggcacgtgtgaacaacctgtttaacacgcaggctcgagctaaggagattgggcagagaattaggaatggagctgctagaccccagataaagatctacatcgactcacccaccaacacctccatatccgccgctagctttagtagcctggtgagccctcagggcggtgatggggtggcacgggccgtccccggatcaatcaagcgaactgcctccgtcgagtacaagggcgacgggggccgccacccgggagatgaggccgcaaacggaccagcaagtggtgatccagtggatagctcctccccagaggatgcttgtatcgtccggatcgggggggaggaaggggggaggcctcctgaggctgatgatcctgtacccggtggccaggcaaggaatggcgctggcggagggccccgaggccaaaccccaaatcataaccagcaggatggcgatagtggcagcctgggaagcccctcagcatcacgcgagagcctggtgaagggtagagcggggcccgatacctcggctagcggagaaccaggagcaaactcaaaactattgtacaaagctagtgtcgtgaaaaaagccgcagcgagacggagacgccaccccgatgaagcctttgaccatgaggttagcgccttcttccctgcaaacctggacttcttatgcttacaggaggtttttgataaaagagccgctaccaaactcaaggagcaactgcacgggtattttgaatacatactatatgacgtcggggtgtacggatgtcaagggtgttgcagcttcaagtgtctgaactccggcctgttatttgccagccggtatcctattatggacgtggcataccattgctatcctaataagtgtaacgatgatgcactagctagtaagggcgccttatttttgaaggtgcaggttggctcaacaccccaggatcagcgcattgtggggtatatcgcctgtactcacctgcacgccccgcaggaagattccgctataagatgtggacagctggacctgctgcaggactggctggccgattttcggaagtccactagcagctccagtgccgctaaccctgaagaactagtggccttcgatgttgtttgcggagattttaactttgacaactgttctagcgacgataaattggagcaacagcactccctgttcacccactaccgggatccctgtcggctcggtcctggagaggaaaagccctgggctattggtactctgttggacacaaatggcctgtacgacgaggatgtgtgcacaccagacaacctgcagaaggtgttagaatccgaggagggacgaagggagtatctggctttcccaacctcaaaaagtagtgggcagaaaggcagaaaggagttgctgaaaggcaatggccgccggattgattacatgttgcacgctgaagagggattatgtcctgactggaaagccgaagtcgaagaattctccttcatcacccaattaagtgggctcacagaccacctccccgtggccatgaggttaatggtaagcagtggtgaggaagaagcctag

SEQ ID NO: 199490 - DNA, 1968 bp, Artificial Sequence
  derived and/or modified sequence
atggtgctgtacacaacaccctttcctaatagttgcctcagtgctcttcattgtgtgtcctgggcgctcatctttccttgctattggctggtggacagactggcagcatcttttattcctactacctacgagaaacggcaacgcgcagacgacccttgctgcctgcagctcctgtgcacggcgctgtttacgcccatttatctggccctcctcgtggcaagcctgccatttgccttcctcgggtttctcttctggtctcctttgcaatctgccagacggccatacatctattcgcggctcgaggacaagggcctggcaggcggtgcagcactgctgtccgagtggaaaggtacgggcccaggaaagtctttctgctttgcaaccgccaacgtgtgcttgctcccagattctcttgccagggtaaataatcttttcaatacgcaggccagggccaaagaaatcggacaacgcattagaaacggagccgctaggcctcagattaagatatatattgattcacccactaataccagcattagtgccgcatcttttagcagtctggtctctcctcagggtggcgatggcgtagcgagggccgtccctggaagcataaaaagaacggctagcgtggagtataagggagacgggggacggcatcccggtgatgaggctgctaacggccctgcctctggcgacccagttgactccagcagcccagaggacgcttgtatcgtgaggatcggcggtgaggaaggcggtcggcctcctgaagctgacgatccagtgcctggcggacaggcgaggaacggggctggaggtggcccacggggacagactcccaaccacaatcagcaggacggagattcgggtagcctgggctctccaagtgctagtagagaatcattggtgaaaggtcgggctggtccagatactagcgcctctggcgaacccggtgctaatagcaaactcctctacaaagcatccgtggtaaaaaaggcagcagctagacgcaggaggcaccccgatgaagcatttgaccacgaggtgtctgccttcttcccagcaaacctggacttcctttgtttacaagaggtctttgacaagagagcagcaaccaaactcaaggagcagttgcacggctacttcgaatatatcctctatgacgtgggcgtatacggatgtcagggctgttgtagttttaagtgcctgaattctggcctacttttcgcttcaagataccctattatggatgtggcctatcactgctatccaaataaatgcaatgacgatgccctggcaagtaaaggcgctttgttcctcaaagtgcaggtgggtagcaccccccaggatcagaggatcgtgggttacatagcctgcacgcatttacacgcaccccaagaagattccgccatccgctgcgggcagcttgatctacttcaggattggctggccgactttagaaagtccactagttcatcatccgccgcaaacccagaggagttggtcgcctttgatgtcgtgtgtggtgatttcaatttcgataactgttcgtcggacgataaattggaacagcagcactctctttttacgcactatcgtgacccgtgtaggttgggcccaggggaggaaaagccttgggcaattggtactctgctcgacaccaatgggctctacgacgaagacgtgtgtactcctgataatctgcagaaagtgctcgaatccgaagaaggacgacgggaatatctggcgttcccaacttccaagtcctcaggacagaagggacgcaaagaactgctgaaaggtaacgggagacgtattgactacatgctacatgccgaagagggtctctgtccggactggaaggccgaagtggaagagttcagtttcataacccagttgagcggactgaccgaccacttgcccgtagccatgaggctgatggtgtcaagcggagaggaggaggcttag

SEQ ID NO: 199491 - protein, 617 aa, Artificial Sequence
  derived and/or modified sequence
MAFPHRPDAPELPDFSMLKRLARDQLIYLLEQLPGKKDLFIEADLMSPLDRIANVSILKQHEVDKLYKVENKPALSSNEQLCFLVRPRIKNMRYIASLVNADKLAGRTRKYKVIFSPQKFYACEMVLEEEGIYGDVSCDEWAFSLLPLDVDLLSMELPEFFRDYFLEGDQRWINTVAQALHLLSTLYGPFPNCYGIGRCAKMAYELWRNLEEEEDGETKGRRPEIGHIFLLDRDVDFVTALCSQVVYEGLVDDTFRIKCGSVDFGPEVTSSDKSLKVLLNAEDKVFNEIRNEHFSNVFGFLSQKARNLQAQYDRRRGMDIKQMKNFVSQELKGLKQEHRLLSLHIGACESIMKKKTKQDFQELIKTEHALLEGFNIRESTSYIEEHIDRQVSPIESLRLMCLLSITENGLIPKDYRSLKTQYLQSYGPEHLLTFSNLRRAGLLTEQAPGDTLTAVESKVSKLVTDKAAGKITDAFSSLAKRSNFRAISKKLNLIPRVDGEYDLKVPRDMAYVFGGAYVPLSCRIIEQVLERRSWQGLDEVVRLLNCSDFAFTDMTKEDKASSESLRLILVVFLGGCTFSEISALRFLGREKGYRFIFLTTAVTNSARLMEAMSEVKA

SEQ ID NO: 199492 - protein, 572 aa, Artificial Sequence [sequence omitted]

SEQ ID NO: 199493 - DNA, 1854 bp, Artificial Sequence
  derived and/or modified sequence
atggccttcccccacagacccgacgcccccgagctgcccgacttcagcatgctgaagagactggccagagaccagctgatctacctgctggagcagctgcccggcaagaaggacctgttcatcgaggccgacctgatgagccccctggacagaatcgccaacgtgagcatcctgaagcagcacgaggtggacaagctgtacaaggtggagaacaagcccgccctgagcagcaacgagcagctgtgcttcctggtgagacccagaatcaagaacatgagatacatcgccagcctggtgaacgccgacaagctggccggcagaaccagaaagtacaaggtgatcttcagcccccagaagttctacgcctgcgagatggtgctggaggaggagggcatctacggcgacgtgagctgcgacgagtgggccttcagcctgctgcccctggacgtggacctgctgagcatggagctgcccgagttcttcagagactacttcctggagggcgaccagagatggatcaacaccgtggcccaggccctgcacctgctgagcaccctgtacggccccttccccaactgctacggcatcggcagatgcgccaagatggcctacgagctgtggagaaacctggaggaggaggaggacggcgagaccaagggcagaagacccgagatcggccacatcttcctgctggacagagacgtggacttcgtgaccgccctgtgcagccaggtggtgtacgagggcctggtggacgacaccttcagaatcaagtgcggcagcgtggacttcggccccgaggtgaccagcagcgacaagagcctgaaggtgctgctgaacgccgaggacaaggtgttcaacgagatcagaaacgagcacttcagcaacgtgttcggcttcctgagccagaaggccagaaacctgcaggcccagtacgacagaagaagaggcatggacatcaagcagatgaagaacttcgtgagccaggagctgaagggcctgaagcaggagcacagactgctgagcctgcacatcggcgcctgcgagagcatcatgaagaagaagaccaagcaggacttccaggagctgatcaagaccgagcacgccctgctggagggcttcaacatcagagagagcaccagctacatcgaggagcacatcgacagacaggtgagccccatcgagagcctgagactgatgtgcctgctgagcatcaccgagaacggcctgatccccaaggactacagaagcctgaagacccagtacctgcagagctacggccccgagcacctgctgaccttcagcaacctgagaagagccggcctgctgaccgagcaggcccccggcgacaccctgaccgccgtggagagcaaggtgagcaagctggtgaccgacaaggccgccggcaagatcaccgacgccttcagcagcctggccaagagaagcaacttcagagccatcagcaagaagctgaacctgatccccagagtggacggcgagtacgacctgaaggtgcccagagacatggcctacgtgttcggcggcgcctacgtgcccctgagctgcagaatcatcgagcaggtgctggagagaagaagctggcagggcctggacgaggtggtgagactgctgaactgcagcgacttcgccttcaccgacatgaccaaggaggacaaggccagcagcgagagcctgagactgatcctggtggtgttcctgggcggctgcaccttcagcgagatcagcgccctgagattcctgggcagagagaagggctacagattcatcttcctgaccaccgccgtgaccaacagcgccagactgatggaggccatgagcgaggtgaaggcctag

SEQ ID NO: 199494 - DNA, 1719 bp, Artificial Sequence
  derived and/or modified sequence
atgagccccctggacagaatcgccaacgtgagcatcctgaagcagcacgaggtggacaagctgtacaaggtggagaacaagcccgccctgagcagcaacgagcagctgtgcttcctggtgagacccagaatcaagaacatgagatacatcgccagcctggtgaacgccgacaagctggccggcagaaccagaaagtacaaggtgatcttcagcccccagaagttctacgcctgcgagatggtgctggaggaggagggcatctacggcgacgtgagctgcgacgagtgggccttcagcctgctgcccctggacgtggacctgctgagcatggagctgcccgagttcttcagagactacttcctggagggcgaccagagatggatcaacaccgtggcccaggccctgcacctgctgagcaccctgtacggccccttccccaactgctacggcatcggcagatgcgccaagatggcctacgagctgtggagaaacctggaggaggaggaggacggcgagaccaagggcagaagacccgagatcggccacatcttcctgctggacagagacgtggacttcgtgaccgccctgtgcagccaggtggtgtacgagggcctggtggacgacaccttcagaatcaagtgcggcagcgtggacttcggccccgaggtgaccagcagcgacaagagcctgaaggtgctgctgaacgccgaggacaaggtgttcaacgagatcagaaacgagcacttcagcaacgtgttcggcttcctgagccagaaggccagaaacctgcaggcccagtacgacagaagaagaggcatggacatcaagcagatgaagaacttcgtgagccaggagctgaagggcctgaagcaggagcacagactgctgagcctgcacatcggcgcctgcgagagcatcatgaagaagaagaccaagcaggacttccaggagctgatcaagaccgagcacgccctgctggagggcttcaacatcagagagagcaccagctacatcgaggagcacatcgacagacaggtgagccccatcgagagcctgagactgatgtgcctgctgagcatcaccgagaacggcctgatccccaaggactacagaagcctgaagacccagtacctgcagagctacggccccgagcacctgctgaccttcagcaacctgagaagagccggcctgctgaccgagcaggcccccggcgacaccctgaccgccgtggagagcaaggtgagcaagctggtgaccgacaaggccgccggcaagatcaccgacgccttcagcagcctggccaagagaagcaacttcagagccatcagcaagaagctgaacctgatccccagagtggacggcgagtacgacctgaaggtgcccagagacatggcctacgtgttcggcggcgcctacgtgcccctgagctgcagaatcatcgagcaggtgctggagagaagaagctggcagggcctggacgaggtggtgagactgctgaactgcagcgacttcgccttcaccgacatgaccaaggaggacaaggccagcagcgagagcctgagactgatcctggtggtgttcctgggcggctgcaccttcagcgagatcagcgccctgagattcctgggcagagagaagggctacagattcatcttcctgaccaccgccgtgaccaacagcgccagactgatggaggccatgagcgaggtgaaggcctag

SEQ ID NO: 199495 - DNA, 1854 bp, Artificial Sequence
  derived and/or modified sequence
atggcattcccccatcgacccgacgccccggaactccccgatttctcaatgctgaaaaggctcgccagagaccaactgatctacctgctggagcagctcccaggcaagaaagacttgttcattgaggctgatctgatgagccctctggatcggatagctaatgtgtctattctgaagcagcacgaagtcgacaaactctataaggtcgagaacaaacctgccctgtcatctaacgagcagctgtgttttctcgtgagaccccgaatcaagaatatgcgttacattgctagcctcgtcaatgccgataaacttgccggaaggacaagaaaatataaggtcatcttttcgcctcagaaattctacgcgtgcgagatggtcctcgaggaggagggcatctacggtgacgtgtcctgcgacgagtgggcgttctcactgcttccactcgatgtcgacctgctgtcaatggagctcccagaattttttcgggactactttttggaaggtgatcagaggtggataaatacggtcgcccaagccctgcacttattgtctacactttacggccctttcccaaactgttatggaattggccggtgtgccaaaatggcctacgaactatggcgcaacctggaggaagaagaggacggggaaaccaaagggcgccgccccgaaatcggccatatattcctgttagaccgcgacgtcgatttcgttacagctctgtgctcccaagtggtatatgaaggcctggtggatgacacttttcgcataaagtgcggatcggtggacttcggcccagaggtcacctcttctgataaatctttgaaggtcttgcttaacgcggaagataaggtctttaacgagatccgcaacgagcattttagtaatgtgtttggttttttatcacagaaggcgaggaacctccaagcgcagtatgacaggagaagggggatggacatcaagcagatgaagaatttcgtctcacaggaattaaaggggttgaagcaggaacatagattgctctccctgcacatcggcgcctgcgagagcattatgaagaaaaagacgaaacaggacttccaggaactgatcaagacagagcacgccctgctcgaggggtttaacatcagggagagcactagttatattgaagagcatatcgatcgacaggtatctccgatcgaatctttgcggctcatgtgtctgctgagcatcactgagaacgggctcatcccaaaggactaccggtcacttaaaacacagtacctgcagtcctacggcccggaacacctgctcactttcagtaatctgagacgggcgggcctccttaccgagcaggcgcccggcgatactttgactgccgttgagtcgaaggtgtccaagctggtcaccgacaaagcagccggtaagatcactgacgccttcagctcccttgccaaaaggtccaacttcagggccattagtaagaagctgaatctgattcctagggtggatggtgaatacgatctgaaggtccctagagatatggcatacgtgttcggcggggcctacgtgccgttgtcatgcagaattattgagcaggtccttgagcgacggtcttggcagggcctcgatgaggttgtccgcctgttgaactgctccgacttcgcctttactgacatgaccaaggaggacaaggccagttcagaatctttgcgactcattctggtcgtgttcctgggcgggtgtacattctctgagatctctgccttacgattccttggcagggagaagggatatcgcttcatttttttgaccactgcggtcaccaattctgctcggctgatggaggccatgagcgaggtaaaggcctag

SEQ ID NO: 199496 - DNA, 1719 bp, Artificial Sequence
  derived and/or modified sequence
atgtcacccctggaccgtatcgccaacgtgagtattttaaagcagcacgaggtggacaagctttataaggtcgagaacaaacctgcgctgtcctccaatgagcagctctgcttcctggtaaggcctcggatcaagaacatgcggtacatcgccagcctagtaaacgctgacaaactcgccgggagaacccgtaagtataaagtcatcttctccccacaaaaattttacgcttgtgaaatggtacttgaagaagaagggatttacggagatgtgtcttgcgacgaatgggcgttctcgctgctccctttggatgtggacctcttgagcatggaattgccagagtttttcagggactattttttggaaggcgatcagagatggatcaataccgtagctcaggccctgcatttactcagtacactgtacggaccttttcctaattgctacggcatcgggaggtgtgctaagatggcctacgagctctggaggaacctggaggaagaggaggacggagagacaaaaggccggagaccagaaattggccacattttcctcctcgaccgtgacgtggatttcgtcacagccctgtgtagccaggttgtgtatgagggactcgttgatgacacattcagaattaagtgcggttccgtggacttcggaccggaggtgacatcttctgataaatctctgaaagtcctcttaaacgccgaggataaagtctttaatgagatacgaaacgagcatttcagtaatgtgttcggctttctgtcccagaaggccagaaacctgcaggcccaatatgatagacggagggggatggatattaagcaaatgaagaattttgtctcccaagaattaaaagggctgaaacaggaacatagacttctatccttgcacataggggcgtgcgaatcaatcatgaagaagaaaacaaagcaggactttcaggaattgattaagaccgagcatgcactgctcgaagggtttaatatcagggagagcaccagctacattgaagagcacatcgatcggcaggtgtcccctattgaatccctacgattaatgtgcctactatcaattacggaaaatggcctcatccctaaagactatagatcgctgaaaacccagtatctacagagctacggtcctgagcaccttctcaccttcagcaatctgcgacgcgcagggctgttgactgaacaagcacccggcgacacattaaccgccgttgaaagtaaagtttcaaaattggtgacggacaaggcagccggaaaaatcacagatgcttttagctccctggctaagagaagcaattttcgcgcaatctcaaagaagctgaacctgattccccgagtagacggtgagtatgatcttaaagttccgcgggatatggcatacgtcttcggcggtgcgtacgtgcccctatcttgtcggatcatagagcaggtgctggaaaggagaagctggcaagggctggacgaggttgtccgcttattgaactgtagtgacttcgcattcacagatatgacaaaggaggacaaggccagctcagaatctctccgattaatcctggtggtctttctgggcgggtgcactttcagcgaaatatcagccctgcggtttctcggacgcgaaaaggggtaccggttcatcttcctcaccacggcagttacaaattcagctaggttaatggaagccatgagcgaggtgaaagcgtag

SEQ ID NO: 199497 - DNA, 1854 bp, Artificial Sequence
  derived and/or modified sequence
atggccttcccccacaggccagatgcccctgagctgcctgacttctccatgctgaagaggctggcccgggaccagctgatctacctgctggagcagctgcccgggaagaaggacctcttcattgaagctgacctgatgagccccctggaccgcatcgccaacgtgtccatcctgaagcagcacgaggtggacaagctgtacaaggtggagaacaagccagccctgagcagcaatgagcagctgtgcttcctggtgcggccccgcatcaagaacatgagatacatcgccagcctggtgaatgctgacaagctggccggccgcaccaggaagtacaaggtgatcttcagcccccagaagttctacgcctgtgagatggtgctggaggaggagggcatctatggagatgtgtcctgtgatgagtgggccttcagcctgctgcccctggatgtggacctgctgtccatggagctgcctgagttcttccgggactacttcctggagggggaccagcgctggatcaacacagtggcccaggccctgcacctgctgagcaccctgtatggccccttccccaactgctacggcatcggccgctgtgccaagatggcctatgagctgtggaggaacctggaggaggaggaggatggagagaccaagggcagaagacctgagatcggccacatcttcctgctggacagagatgtggactttgtgacagccctgtgcagccaggtggtgtatgagggcctggtggatgacaccttccgcatcaagtgtggctctgtggactttggacctgaggtgaccagcagtgacaagagcctgaaggtgctgctgaatgctgaggacaaggtgttcaatgagatcagaaatgagcacttcagcaatgtgtttggcttcctgagccagaaggccaggaacctgcaggcccagtatgacagaagaagaggcatggacatcaagcagatgaagaactttgtgtcccaggagctgaagggcctgaagcaggagcaccggctgctgagcctgcacatcggggcctgtgagagcatcatgaagaagaagaccaagcaggacttccaggagctgatcaagacagagcacgccctgctggagggcttcaacatccgggagagcaccagctacatcgaggagcacatcgaccggcaggtgagccccatcgagagcctgcggctgatgtgcctgctgagcatcacagaaaatggcctcatccccaaggactaccgcagcctgaagacccagtacctgcagagctatggccctgagcacctgctgaccttcagcaacctgcggcgggccggcctgctgacagagcaggcccctggggacaccctgacagctgtggagagcaaggtgtccaagctggtgacagacaaggccgccggcaagatcacagatgccttcagcagcctggccaagaggagcaacttccgggccatcagcaagaagctgaacctgatcccccgggtggatggagaatatgacctgaaggtgccccgggacatggcctacgtgtttggaggagcctacgtgcccctgagctgccgcatcatcgagcaggtgctggagaggaggtcctggcagggcctggatgaggtggtgcggctgctgaactgcagcgactttgccttcacagacatgaccaaggaggacaaggccagcagcgagagcctgcggctcatcctggtggtgttcctgggcggctgcaccttcagcgagatcagcgccctgcgcttcctgggccgggagaagggctaccgcttcatcttcctgaccacagctgtgaccaacagcgcccggctgatggaggccatgtctgaggtgaaggcctag

SEQ ID NO: 199498 - DNA, 1719 bp, Artificial Sequence
  derived and/or modified sequence
atgagccccctggacagaattgccaacgtgtccatcctgaagcagcacgaggtggacaagctgtacaaggtggagaacaagccagccctgagcagcaatgagcagctgtgcttcctggtgcggccccgcatcaagaacatgagatacatcgccagcctggtgaatgctgacaagctggccggccgcaccaggaagtacaaggtgatcttcagcccccagaagttctacgcctgtgagatggtgctggaggaggagggcatctatggagatgtgtcctgtgatgagtgggccttcagcctgctgcccctggatgtggacctgctgtccatggagctgcctgagttcttccgggactacttcctggagggggaccagcgctggatcaacacagtggcccaggccctgcacctgctgagcaccctgtatggccccttccccaactgctatggaattggccgctgtgccaagatggcctatgagctgtggaggaacctggaggaggaggaggatggagagaccaagggccggcggcctgagatcggccacatcttcctgctggacagagatgtggactttgtgacagccctgtgcagccaggtggtgtatgagggcctggtggatgacaccttccgcatcaagtgtggctctgtggactttggacctgaggtgaccagcagtgacaagagcctgaaggtgctgctgaatgctgaggacaaggtgttcaatgagatcagaaatgagcacttcagcaatgtgtttggcttcctgagccagaaggccaggaacctgcaggcccagtatgacagaagaagaggcatggacatcaagcagatgaagaactttgtgtcccaggagctgaagggcctgaagcaggagcaccggctgctgagcctgcacatcggggcctgtgagagcatcatgaagaagaagaccaagcaggacttccaggagctgatcaagacagaacatgccctgctggagggcttcaacatccgggagagcaccagctacatcgaggagcacatcgaccggcaggtgagccccatcgagagcctgcggctgatgtgcctgctgagcatcacagaaaatggcctcatccccaaggactaccgcagcctgaagacccagtacctgcagagctatggccctgagcacctgctgaccttcagcaacctgcggcgggccggcctgctgacagagcaggcccctggggacaccctgacagctgtggagagcaaggtgtccaagctggtgacagacaaggctgctgggaagatcacagatgccttcagcagcctggccaagaggagcaacttccgggccatcagcaagaagctgaacctgatcccccgggtggatggagaatatgacctgaaggtgccccgggacatggcctacgtgtttggaggagcctacgtgcccctgagctgccgcatcatcgagcaggtgctggagcggcgctcctggcagggcctggatgaggtggtgcggctgctgaactgcagcgactttgccttcacagacatgaccaaggaggacaaggccagcagcgagagcctgcggctcatcctggtggtgttcctgggcggctgcaccttcagcgagatcagcgccctgcgcttcctgggccgggagaagggctaccgcttcatcttcctgaccacagctgtgaccaacagcgcccggctgatggaggccatgtctgaggtgaaggcctag

SEQ ID NO: 199499 - DNA, 1854 bp, Artificial Sequence
  derived and/or modified sequence
atggccttcccccaccggcccgacgcccccgagctgcccgacttcagtatgttgaagaggctagcgcgagaccagctgatctacctactggaacaacttcctggaaagaaggacttgttcattgaggccgacttgatgagcccgctggaccgaattgccaacgtcagcattctgaaacagcatgaagtagataagctgtataaagtcgagaacaagcctgcgttatctagcaacgaacagctctgctttctcgtacgacctagaattaagaacatgaggtatattgcttccctcgtgaacgcagataagctcgcaggccgtaccagaaagtacaaggttatcttctcccctcagaaattctatgcatgtgagatggtgctggaagaagaaggcatctacggcgacgtctcatgtgatgagtgggctttctcgctactcccactggatgtcgacttgctcagcatggaacttcccgagttttttagggactattttttggaaggcgatcagcgctggattaacacagtcgctcaggcattacacctgctcagcaccctatacgggcccttcccaaattgctacggcatcggcagatgcgcaaagatggcttacgagctgtggagaaacctggaggaggaggaagatggtgaaactaaaggccgacggcccgagattgggcacatatttcttctcgatagagacgtggattttgtcaccgcactttgctcccaagttgtgtatgaaggattggtggacgataccttcagaataaagtgcggctcagtcgacttcggacctgaagtcactagcagtgacaagtcgctcaaggtgctcttgaatgcagaggacaaagtctttaacgaaatccgcaacgagcatttttccaacgtctttggctttctgtcccaaaaggcgcgtaaccttcaggctcagtatgacaggagacgtggaatggatattaagcagatgaagaatttcgtgtcacaggaactgaaaggtttgaagcaggaacatcggctgttgagtctgcatattggagcttgtgaatccatcatgaagaagaagacgaaacaagactttcaggaactgatcaagacagagcatgccctgctggagggcttcaatatcagggagtctacgtcttatattgaagagcacattgatcggcaagtctcccccattgaatctctgaggctgatgtgcctgttatctattaccgagaacggcctgatccctaaagattaccgatcccttaagacacagtatctacagtcctacgggccagagcatctgctgacattttccaacttgagacgagcagggcttctcacggagcaggctccaggcgatactctaacggcggttgagtccaaagtcagcaaattagtcactgataaggccgctggtaagatcaccgacgcattctcatcactcgcgaagaggagtaatttccgagcaattagcaaaaaactgaacctcatacctagggtggacggagaatacgatctgaaggtcccacgggatatggcctacgtctttggaggagcctacgttcccctgagttgccggatcatcgaacaggtgctcgagcggcgatcttggcagggactggacgaagtcgtgcgcttgttaaattgcagtgacttcgcttttacagacatgacgaaggaggacaaagctagttcagagtcgctcaggctgatcctggtggtattcttgggcggttgcaccttctccgagatctcagctctccgattcctgggcagagaaaaaggctacagatttattttcttgacaactgctgttacaaactctgccaggttaatggaagctatgagcgaagtgaaggcctag

SEQ ID NO: 199500 - DNA, 1719 bp, Artificial Sequence
  derived and/or modified sequence
atgagccccctggaccggatcgccaacgtgagcatcctgaagcagcacgaggttgataaactgtacaaagtggaaaacaagcccgcattgagcagcaacgaacaattgtgcttccttgttagaccgcgcataaagaacatgcggtatatcgcctccctcgtcaacgccgataaattggctggtcgcacaagaaagtacaaggtgatctttagcccccagaagttctacgcctgtgagatggtgttggaagaagaaggcatctatggggacgtatcctgcgatgaatgggcgtttagcttgctgcccctggatgtggacctgctgtccatggagttaccggagttttttagggattacttcttggagggagatcaaagatggatcaacacggtcgcccaagccttgcatctgctgagcacgctgtacggtccgtttcccaattgctacggcatagggagatgtgctaaaatggcttatgagttgtggcggaacctggaggaagaggaggacggagaaaccaagggcagacggccggagatagggcatatctttctcctggatagagacgttgattttgttactgcactctgtagtcaggttgtgtacgaaggcctcgtggatgataccttccgcatcaagtgcggaagcgtcgacttcgggccagaagtcacctccagtgataagtctctgaaggttcttctgaatgccgaggataaggtctttaacgagatcagaaacgaacacttttcaaatgtgtttggctttctctctcaaaaagcacgaaacctgcaggcccagtacgacaggagaagggggatggatatcaagcagatgaaaaactttgtcagccaggagttgaagggcctgaagcaggaacaccgcttgttgtctctgcacatcggcgcctgtgagtctattatgaagaaaaagaccaagcaagattttcaagagctgatcaagacagaacatgccttgttggagggctttaacattagagagtccacctcatacatcgaagaacatattgatcgtcaggtgagtcccattgaatcactgaggctgatgtgcctgctcagtatcactgagaacggattgattcccaaggactatagatcccttaaaacacagtaccttcagtcatacgggccagaacatctcttgacattctcgaacctgagaagagccgggctgctcactgagcaagcgccgggagataccctgaccgctgtggagagcaaggtttctaaactcgtgaccgataaggcggctggaaagattacagatgcgtttagtagtctggccaagaggtctaacttccgcgctatttcaaagaagctgaatttaatccctcgcgtggacggggagtacgatcttaaggtacctagggacatggcttacgttttcggtggggcctacgtacctttgtcctgccgaatcatagaacaggtgctggaaagaaggtcctggcagggtctggacgaagtggtcaggctccttaactgcagtgactttgcgttcacagatatgaccaaagaggacaaggcgtcaagtgagtctttacgattaatccttgtagttttcctgggtgggtgcaccttcagtgagatctctgcattgcgcttcctaggacgcgagaagggataccgatttatctttctgacgaccgccgttactaactcagcccgccttatggaggctatgtccgaagtaaaggcatag

SEQ ID NO: 199501 - DNA, 1854 bp, Artificial Sequence
  derived and/or modified sequence
atggcttttccgcatcggcctgacgctcccgaattgcctgatttcagtatgcttaaacgtctggctcgtgaccagctcatctatctactggagcagctgcccggaaagaaggacctgttcatcgaagctgacctaatgagccccttagaccgaattgcaaacgtgagtatactgaaacagcacgaggtagacaagctatacaaagttgaaaataaaccagcactttcaagcaacgagcagctgtgcttcctggtccggccacgcattaagaatatgagatacatcgccagcctcgtgaacgccgacaagctggccggaagaactagaaaatacaaggtcatttttagtccccagaagttttatgcatgcgagatggtgctggaggaagagggcatttatggggatgtgtcttgcgacgaatgggcgtttagtctgttaccattggatgtggatttgcttagcatggaactgcctgagttcttcagggattactttctggagggagaccaacgatggatcaataccgtcgcccaggcccttcacttgctaagtaccctgtacggacctttcccaaattgctacggcattgggaggtgcgctaaaatggcttacgaactgtggcggaatcttgaggaggaggaggatggagagaccaagggcaggaggccagagatcggacacatctttctgctcgacagggacgtcgatttcgtgacagccctgtgtagccaggtggtttatgaggggctggtggatgatactttcaggataaagtgtggttctgtagattttggtcctgaggtgaccagctccgacaaatctcttaaggtcctgctcaacgctgaggacaaagtttttaatgagatcaggaatgaacattttagtaacgtttttgggttcctttcccagaaggcccgtaatctgcaagcacagtatgataggcgtcggggaatggacatcaaacagatgaaaaatttcgtgtcacaggagctgaagggtctgaagcaggagcaccgtctgctgagcttgcacataggggcttgtgagtccattatgaaaaagaagaccaagcaagactttcaagagctgatcaaaaccgagcacgcattactggaaggcttcaacatcagggagtccacgagctatatcgaggagcatatcgacaggcaggttagtcctattgaatctctgagattgatgtgcctcttatcgatcaccgagaacggcctaataccaaaagactatcggagcctgaagacgcagtacctgcagagctacggtcccgagcaccttttgacattttctaacttacggcgtgctggcctactaaccgagcaagccccaggcgacaccttgacggcagttgaaagcaaggtcagcaaactggtaacagacaaagcagcgggaaagatcacagacgcattctcgagtttggcaaagcgcagtaacttcagagctataagtaaaaaacttaatctcatacccagggttgatggcgagtacgatctcaaggtgcctcgagacatggcttatgtgttcggaggggcatacgtccccctcagctgccggatcatcgagcaggttctggaacgcagaagctggcaaggcctggacgaggtggtacgccttctgaactgcagtgactttgctttcacagatatgactaaggaagacaaggcaagttccgagtccctacgcctcattcttgtggtgttcctcggtggatgtaccttcagcgagatcagcgcgttaaggtttcttggtcgcgaaaagggctataggttcatttttttgaccaccgccgtgacgaatagcgccaggctgatggaagctatgtccgaggtcaaggcctag

SEQ ID NO: 199502 - DNA, 1719 bp, Artificial Sequence
  derived and/or modified sequence
atgagccccctcgacagaatcgccaacgtgtctatactcaagcaacacgaagtggacaagctgtacaaagtggagaacaaacccgctttgtcatctaacgaacagctgtgcttcctcgtacgtccacgtatcaagaacatgcgctacatcgcctcccttgtaaatgcagataagctcgcaggacgcacaaggaaatacaaggtgatcttttctccacagaaattctacgcctgcgaaatggtcttggaggaggaaggcatatatggcgatgtttcatgcgatgaatgggccttcagtctgctgccactcgacgtagacttgttatccatggaactaccagagttttttcgcgattacttcctggagggagaccagcgctggattaataccgttgctcaggctttgcacctgctgtcaaccctgtatggtcctttccctaactgttatggtatcggtcgctgcgcgaaaatggcatatgaactctggagaaacctcgaggaggaagaggatggggaaaccaaaggccgaaggcctgagattgggcacattttcctgttagatagagacgtggatttcgtcaccgccctgtgctcacaggtcgtttatgaggggctggtggacgacacgttcagaataaaatgcggatcagtggacttcggcccagaagtaacaagttccgataagagcttgaaagtcctcctcaacgctgaggacaaggtgtttaacgagattaggaatgaacatttctccaatgtgtttggcttcctctcccagaaagcacgaaacctgcaagcccagtatgaccgcagaaggggcatggacataaaacagatgaagaacttcgtttctcaggagttgaaaggcctgaagcaggaacacaggctcctcagtctccacattggtgcctgcgagtcaattatgaaaaaaaagacaaaacaagacttccaggagctgataaagacagaacacgccttattagaagggttcaacattcgtgagtctacaagttatatcgaggaacacatcgaccgtcaggtgagtcctattgagtcactacgcctcatgtgtttgcttagcattaccgaaaatggtcttataccgaaagactatagatctctgaaaacacagtatctgcagtcatatggaccagagcatctgctgactttcagcaacttgcggagagctgggcttctcaccgagcaggccccaggcgataccctaacagccgtcgaatctaaggtgagcaagctcgtgacagataaggctgcagggaagatcactgacgccttctcatctctggctaaaagatctaacttccgagctatctccaagaagctcaacctgatccctagagtagacggcgagtatgatctgaaggtccctagggacatggcctacgtattcggcggtgcatatgtgccacttagctgcagaattatcgagcaagtgctggaacgcagatcttggcaggggctggatgaagtggttagactgctgaactgttctgactttgctttcacggacatgactaaagaagacaaggcaagtagtgaatcactgagacttatattagtcgtcttcctgggcggatgcaccttctcagaaattagcgccctccgcttcttaggtcgagagaagggctatcgatttatatttcttacaaccgcagtgaccaacagcgcacgtttgatggaggccatgtcagaagtcaaagcctag

SEQ ID NO: 199503 - DNA, 2767 bp, Artificial Sequence
  derived and/or modified sequence
gagatctaggaagtcgcttctttttctggtagaaggcggggttctcctcgtacgctgcggagtctctgcggggtgtagaccggaatcctgctgacgggcagagtggatcagggagggagggtcgagacacggtggctgcaggtctgagacaaggctgctccgaggtagtagctctcttgcctggaggtggccattcattcctggagtgctgctgaggagcgagggcccatctggggtctctggaagtcggtgcccaggcctgaaggatagccccccttgcgcttccctgggctgcggccggccttctcagaacgaagggcgtccttccaccccgcggcgcaggtgaccgctgccatggcttttccccatcggccggacgcccctgagctgcctgacttctccatgctgaagaggctggctcgagaccagctcatctatctgctggagcagcttcctggaaaaaaggatttattcattgaggcagatctcatgagccctttggatcgaattgccaatgtctccatcctgaagcaacacgaagtagacaagctatacaaggtggagaacaagccagccctcagctccaatgaacaattgtgcttcttggtcagaccccgcatcaagaatatgcgatacattgccagtcttgtcaatgctgacaaattggctggccgaactcgcaaatacaaagtgatcttcagccctcaaaagttctatgcgtgtgagatggtgcttgaggaagagggaatctatggagatgtgagctgtgatgaatgggccttctctttgctgcctcttgatgtggatctgctgagcatggaactaccagaatttttcagggattactttctggaaggagatcagcgttggatcaacactgtagctcaggccttacaccttctcagcactctctatggaccctttccaaactgctatggaattggcaggtgcgccaagatggcatatgaattgtggaggaacctggaggaggaggaggatggcgaaaccaagggccgaaggccagagattggacatatctttctcttggacagagatgtggactttgtgacagcactttgctcccaagtggtttatgagggcctagtagatgacaccttccgcatcaagtgtgggagtgtcgactttggcccagaagtcacatcctctgacaagagcctgaaggtgctactcaatgccgaggacaaggtgtttaatgagattcggaacgagcacttctccaatgtctttggcttcttgagccagaaggcccggaacttgcaggcccagtatgatcgccggagaggcatggacattaagcagatgaagaatttcgtgtcccaggagctcaagggcctgaaacaggagcaccgcctgctgagtctccatattggggcctgtgaatccatcatgaagaagaaaaccaagcaggatttccaggagctaatcaagactgagcatgcactgctagaggggttcaacatccgggagagcaccagctacattgaggaacacatagaccggcaggtgtcgcctatagaaagcctgcgcctcatgtgccttttgtccatcactgagaatggtttgatccccaaggattaccgatctctgaaaacacagtatctgcagagctatggccctgagcacctgctaaccttctccaatctgcgaagagctgggctcctaacggagcaggcccccggggacaccctcacagccgtggagagtaaagtgagcaagctggtgaccgacaaggctgcaggaaagattactgatgccttcagttctctggccaagaggagcaattttcgtgccatcagcaaaaagctgaatttgatcccacgtgtggacggcgagtatgatctgaaagtgccccgagacatggcttacgtcttcggtggtgcttatgtgcccctgagctgccgaatcattgagcaggtgctagagcggcgaagctggcagggccttgatgaggtggtacggctgctcaactgcagtgactttgcattcacagatatgactaaggaagacaaggcttccagtgagtccctgcgcctcatcttggtggtgttcttgggtggttgtacattctctgagatctcagccctccggttcctgggcagagagaaaggctacaggttcattttcctgacgacagcagtcacaaacagcgctcgccttatggaggccatgagtgaggtgaaagcctgatgtttttcccggccagtgttgacatcttccctgaacacattcctcagtgagatgcaggcatctggcacccagctgctataaccaagtgtccaccaactacctgctaagagccgggagcatggaacgtgttgggatttagagaacattatctgagaaaagagttcacttcctgctcccaggatatttctcttttctgtttatgaagtacaacccatgctgctaagatgcgagcaggaagaggcatcctttgctaaatcctgtttgaatgtcattgtaaataaagcctctgctctcagatgtaatacgttggtcgttctggacacgcacttccatctttattagtgaaagcccattggagcttgctacaggggcttcctgtgcttcttggcctggactttgtagtggctccaggcctggtctggttcttccctgtaaaaatcactctaccactctgtacctgagtttcctctaccataaaatgagggagatggctgaggtgaccagcaagcacgtttccagttctaaaatgttgtgattcattacatttttgagaaaatga

SEQ ID NO: 199504 - DNA, 1916 bp, Artificial Sequence
  derived and/or modified sequence
ggtagaaggcggggttctcctcgtacgctgcggagtctctgcggggtgtagaccggaatcctgctgacgggcagagtggatcagggaggctggctcgagaccagctcatctatctgctggagcagcttcctggaaaaaaggatttattcattgaggcagatctcatgagccctttggatcgaattgccaatgtctccatcctgaagcaacacgaagtagacaagctatacaaggtggagaacaagccagccctcagctccaatgaacaattgtgcttcttggtcagaccccgcatcaagaatatgcgatacattgccagtcttgtcaatgctgacaaattggctggccgaactcgcaaatacaaagtgatcttcagccctcaaaagttctatgcgtgtgagatggtgcttgaggaagagggaatctatggagatgtgagctgtgatgaatgggccttctctttgctgcctcttgatgtggatctgctgagcatggaactaccagaatttttcagggattactttctggaaggagatcagcgttggatcaacactgtagctcaggccttacaccttctcagcactctctatggaccctttccaaactgctatggaattggcaggtgcgccaagatggcatatgaattgtggaggaacctggaggaggaggaggatggcgaaaccaagggccgaaggccagagattggacatatctttctcttggacagagatgtggactttgtgacagcactttgctcccaagtggtttatgagggcctagtagatgacaccttccgcatcaagtgtgggagtgtcgactttggcccagaagtcacatcctctgacaagagcctgaaggtgctactcaatgccgaggacaaggtgtttaatgagattcggaacgagcacttctccaatgtctttggcttcttgagccagaaggcccggaacttgcaggcccagtatgatcgccggagaggcatggacattaagcagatgaagaatttcgtgtcccaggagctcaagggcctgaaacaggagcaccgcctgctgagtctccatattggggcctgtgaatccatcatgaagaagaaaaccaagcaggatttccaggagctaatcaagactgagcatgcactgctagaggggttcaacatccgggagagcaccagctacattgaggaacacatagaccggcaggtgtcgcctatagaaagcctgcgcctcatgtgccttttgtccatcactgagaatggtttgatccccaaggattaccgatctctgaaaacacagtatctgcagagctatggccctgagcacctgctaaccttctccaatctgcgaagagctgggctcctaacggagcaggcccccggggacaccctcacagccgtggagagtaaagtgagcaagctggtgaccgacaaggctgcaggaaagattactgatgccttcagttctctggccaagaggagcaattttcgtgccatcagcaaaaagctgaatttgatcccacgtgtggacggcgagtatgatctgaaagtgccccgagacatggcttacgtcttcggtggtgcttatgtgcccctgagctgccgaatcattgagcaggtgctagagcggcgaagctggcagggccttgatgaggtggtacggctgctcaactgcagtgactttgcattcacagatatgactaaggaagacaaggcttccagtgagtccctgcgcctcatcttggtggtgttcttgggtggttgtacattctctgagatctcagccctccggttcctgggcagagagaaaggctacaggttcattttcctgacgacagcagtcacaaacagcgctcgccttatggaggccatgagtgaggtgaaagcctgatgtttttcccggccagtgttgacatcttccctg

SEQ ID NO: 199505 - protein, 944 aa, Artificial Sequence
  derived and/or modified sequence
MTVSGPGTPEPRPATPGASSVEQLRKEGNELFKCGDYGGALAAYTQALGLDATPQDQAVLHRNRAACHLKLEDYDKAETEASKAIEKDGGDVKALYRRSQALEKLGRLDQAVLDLQRCVSLEPKNKVFQEALRNIGGQIQEKVRYMSSTDAKVEQMFQILLDPEEKGTEKKQKASQNLVVLAREDAGAEKIFRSNGVQLLQRLLDMGETDLMLAALRTLVGICSEHQSRTVATLSILGTRRVVSILGVESQAVSLAACHLLQVMFDALKEGVKKGFRGKEGAIIVDPARELKVLISNLLDLLTEVGVSGQGRDNALTLLIKAVPRKSLKDPNNSLTLWVIDQGLKKILEVGGSLQDPPGELAVTANSRMSASILLSKLFDDLKCDAERENFHRLCENYIKSWFEGQGLAGKLRAIQTVSCLLQGPCDAGNRALELSGVMESVIALCASEQEEEQLVAVEALIHAAGKAKRASFITANGVSLLKDLYKCSEKDSIRIRALVGLCKLGSAGGTDFSMKQFAEGSTLKLAKQCRKWLCNDQIDAGTRRWAVEGLAYLTFDADVKEEFVEDAAALKALFQLSRLEERSVLFAVASALVNCTNSYDYEEPDPKMVELAKYAKQHVPEQHPKDKPSFVRARVKKLLAAGVVSAMVCMVKTESPVLTSSCRELLSRVFLALVEEVEDRGTVVAQGGGRALIPLALEGTDVGQTKAAQALAKLTITSNPEMTFPGERIYEVVRPLVSLLHLNCSGLQNFEALMALTNLAGISERLRQKILKEKAVPMIEGYMFEEHEMIRRAATECMCNLAMSKEVQDLFEAQGNDRLKLLVLYSGEDDELLQRAAAGGLAMLTSMRPTLCSRIPQVTTHWLEILQALLLSSNQELQHRGAVVVLNMVEASREIASTLMESEMMEILSVLAKGDHSPVTRAAAACLDKAVEYGLIQPNQDGE

SEQ ID NO: 199506 - DNA, 2835 bp, Artificial Sequence
  derived and/or modified sequence
atgaccgtgagcggccccggcacccccgagcccagacccgccacccccggcgccagcagcgtggagcagctgagaaaggagggcaacgagctgttcaagtgcggcgactacggcggcgccctggccgcctacacccaggccctgggcctggacgccaccccccaggaccaggccgtgctgcacagaaacagagccgcctgccacctgaagctggaggactacgacaaggccgagaccgaggccagcaaggccatcgagaaggacggcggcgacgtgaaggccctgtacagaagaagccaggccctggagaagctgggcagactggaccaggccgtgctggacctgcagagatgcgtgagcctggagcccaagaacaaggtgttccaggaggccctgagaaacatcggcggccagatccaggagaaggtgagatacatgagcagcaccgacgccaaggtggagcagatgttccagatcctgctggaccccgaggagaagggcaccgagaagaagcagaaggccagccagaacctggtggtgctggccagagaggacgccggcgccgagaagatcttcagaagcaacggcgtgcagctgctgcagagactgctggacatgggcgagaccgacctgatgctggccgccctgagaaccctggtgggcatctgcagcgagcaccagagcagaaccgtggccaccctgagcatcctgggcaccagaagagtggtgagcatcctgggcgtggagagccaggccgtgagcctggccgcctgccacctgctgcaggtgatgttcgacgccctgaaggagggcgtgaagaagggcttcagaggcaaggagggcgccatcatcgtggaccccgccagagagctgaaggtgctgatcagcaacctgctggacctgctgaccgaggtgggcgtgagcggccagggcagagacaacgccctgaccctgctgatcaaggccgtgcccagaaagagcctgaaggaccccaacaacagcctgaccctgtgggtgatcgaccagggcctgaagaagatcctggaggtgggcggcagcctgcaggacccccccggcgagctggccgtgaccgccaacagcagaatgagcgccagcatcctgctgagcaagctgttcgacgacctgaagtgcgacgccgagagagagaacttccacagactgtgcgagaactacatcaagagctggttcgagggccagggcctggccggcaagctgagagccatccagaccgtgagctgcctgctgcagggcccctgcgacgccggcaacagagccctggagctgagcggcgtgatggagagcgtgatcgccctgtgcgccagcgagcaggaggaggagcagctggtggccgtggaggccctgatccacgccgccggcaaggccaagagagccagcttcatcaccgccaacggcgtgagcctgctgaaggacctgtacaagtgcagcgagaaggacagcatcagaatcagagccctggtgggcctgtgcaagctgggcagcgccggcggcaccgacttcagcatgaagcagttcgccgagggcagcaccctgaagctggccaagcagtgcagaaagtggctgtgcaacgaccagatcgacgccggcaccagaagatgggccgtggagggcctggcctacctgaccttcgacgccgacgtgaaggaggagttcgtggaggacgccgccgccctgaaggccctgttccagctgagcagactggaggagagaagcgtgctgttcgccgtggccagcgccctggtgaactgcaccaacagctacgactacgaggagcccgaccccaagatggtggagctggccaagtacgccaagcagcacgtgcccgagcagcaccccaaggacaagcccagcttcgtgagagccagagtgaagaagctgctggccgccggcgtggtgagcgccatggtgtgcatggtgaagaccgagagccccgtgctgaccagcagctgcagagagctgctgagcagagtgttcctggccctggtggaggaggtggaggacagaggcaccgtggtggcccagggcggcggcagagccctgatccccctggccctggagggcaccgacgtgggccagaccaaggccgcccaggccctggccaagctgaccatcaccagcaaccccgagatgaccttccccggcgagagaatctacgaggtggtgagacccctggtgagcctgctgcacctgaactgcagcggcctgcagaacttcgaggccctgatggccctgaccaacctggccggcatcagcgagagactgagacagaagatcctgaaggagaaggccgtgcccatgatcgagggctacatgttcgaggagcacgagatgatcagaagagccgccaccgagtgcatgtgcaacctggccatgagcaaggaggtgcaggacctgttcgaggcccagggcaacgacagactgaagctgctggtgctgtacagcggcgaggacgacgagctgctgcagagagccgccgccggcggcctggccatgctgaccagcatgagacccaccctgtgcagcagaatcccccaggtgaccacccactggctggagatcctgcaggccctgctgctgagcagcaaccaggagctgcagcacagaggcgccgtggtggtgctgaacatggtggaggccagcagagagatcgccagcaccctgatggagagcgagatgatggagatcctgagcgtgctggccaagggcgaccacagccccgtgaccagagccgccgccgcctgcctggacaaggccgtggagtacggcctgatccagcccaaccaggacggcgagtag

SEQ ID NO: 199507 - DNA, 2835 bp, Artificial Sequence
  derived and/or modified sequence
atgacggtctccgggcctggtacgcccgagcccaggccagccacccccggggcctcaagcgtcgagcagctacgtaaagagggaaacgaactgtttaaatgcggcgactatgggggtgcgctggcagcatacactcaggccctgggtttggacgccacaccacaagaccaagccgtgctgcaccgtaaccgggctgcctgtcatttgaagctggaggactatgacaaggcagagacagaggccagcaaagccattgagaaggatgggggagacgtgaaagccctctataggcgctctcaagccctggagaagctggggcgcctggatcaggctgtgctcgacctgcagaggtgcgtttctttggaacctaaaaacaaggtattccaggaagccctgagaaatatcggcgggcagatccaggagaaggtacggtacatgagctccaccgatgcgaaggtcgaacagatgtttcagattctgcttgaccctgaggagaaggggaccgaaaagaaacagaaggccagtcagaacctggtagtgttggcacgggaagatgccggggccgagaaaatcttcagatctaacggggttcaactcctccagaggttgcttgacatgggagagacagatctgatgctcgcagccctgcggactctggtggggatttgtagcgagcatcagtcgaggactgtggcgacactctctatcctgggaacccgacgggtcgtgtctatcctgggcgtggaatctcaggcagtttccctggccgcttgccacctgttgcaggtgatgttcgatgccctgaaggagggcgtaaagaaaggttttcgcggcaaggagggtgctatcattgtggatcctgctagggagctgaaggtcttaatctctaatctcctggacctcctgactgaggtcggggtctccgggcagggccgcgataacgctctgacactactcatcaaagccgtccccagaaagtctctgaaagatccgaataactctctcacactgtgggtcatcgatcagggtctcaagaagatactggaggtgggcggctctttgcaagatcccccaggtgagctagctgttaccgccaattctcggatgagcgcctcaatccttctcagtaagctgtttgatgatctaaagtgcgacgccgagcgcgagaatttccatcgcttgtgtgagaattatatcaagtcttggtttgaaggtcaaggcctggcaggtaagttacgcgcaatccagacagtgtcctgtctcctgcagggcccatgcgacgccggtaaccgagctctggagctgtctggcgttatggaaagtgtcatcgctctgtgcgcgagcgagcaggaagaggaacagttagttgccgttgaagcacttatacatgcagcagggaaggcgaaacgtgcttcatttatcactgcaaacggcgtctccctgctcaaggacctctacaagtgtagcgaaaaggattctatcaggattcgagccttggtcggactgtgcaaattgggctcagccgggggcactgacttcagtatgaaacagttcgcagaagggtcaaccctaaagctcgcaaaacagtgcaggaaatggctttgcaacgaccagatcgacgcaggcacccggagatgggccgtggaggggctggcttatctgacctttgacgcagatgtaaaggaagagtttgtggaggatgccgccgcccttaaggctctctttcagctctcgcgtcttgaagaacggtcagtgcttttcgccgttgcctctgccttggtgaactgtacaaattcttacgactacgaggaaccagatcctaagatggtagaattggccaagtatgcaaaacaacacgtcccagaacaacatcccaaggacaagccttcctttgtccgcgcacgcgtcaaaaagctgttggccgccggtgttgtatcagccatggtgtgcatggttaagactgaaagtcctgtgctaacatccagctgtcgagaactgctaagccgcgtattcttagcactggtcgaagaagtcgaagatcgggggaccgtggtagcgcagggcggaggacgagccttgattccccttgctcttgagggtacagacgtgggccaaacgaaggcagctcaagccctcgccaagctgacaattacatctaacccagaaatgacattccccggagagagaatctatgaggtggtgaggccacttgtgtcactgctccacctgaattgtagtggcctgcagaatttcgaggccctgatggcactgaccaatcttgccggaattagcgagcgcctgagacagaagattttgaaggaaaaggctgtccccatgatcgaaggatatatgttcgaggagcacgagatgattcgccgtgcagcaaccgagtgcatgtgcaacctcgcaatgagtaaggaggttcaggatctgtttgaagcgcaaggcaatgaccggctcaaattgttagtgctctactccggggaagatgacgaactcctgcaacgggctgccgctggaggcttggccatgctcacttccatgaggcctaccctatgcagtcgaataccacaggtcactactcactggttggagattttgcaggcactgctgctgtctagcaatcaggaactgcagcatagaggagccgtcgtggttctgaacatggttgaggcctctcgggaaatcgccagcacactcatggagagcgaaatgatggagatcctgagtgtgttggccaagggggatcacagccctgtaacaagagccgctgccgcttgtttggataaagcagttgagtatggcctcatacaacccaaccaggacggtgaatag

SEQ ID NO: 199508 - DNA, 2835 bp, Artificial Sequence
  derived and/or modified sequence
atgacagtgtctggccctggcaccccagagcccaggcctgccacccctggggccagctctgtggagcagctgaggaaggagggcaatgaactcttcaagtgtggggactatggaggagccctggccgcctacacccaggccctgggcctggatgccaccccccaggaccaggccgtgctgcacaggaacagagctgcctgccacctgaagctggaggactatgacaaggccgagacagaggccagcaaggccatcgagaaggatggaggagatgtgaaggccctgtacagaagaagccaggccctggagaagctgggccgcctggaccaggccgtgctggacctgcagagatgtgtgtccctggagcccaagaacaaggtgttccaggaggccctgagaaatattggaggccagatccaggagaaggtgcgctacatgagcagcacagatgccaaggtggagcagatgttccagatcctgctggaccctgaggagaagggcacagagaagaagcagaaggccagccagaacctggtggtgctggcccgggaggatgctggagctgagaagatcttccgcagcaatggagtgcagctgctgcagaggctgctggacatgggagaaacagacctgatgctggccgccctgcggaccctggtgggcatctgcagcgagcaccagagcaggacagtggccaccctgagcatcctgggcacccggcgggtggtgtccatcctgggcgtggagagccaggccgtgtccctggccgcctgccacctgctgcaggtgatgtttgatgccctgaaggagggcgtgaagaagggcttccggggcaaggagggcgccatcatcgtggaccctgcccgggagctgaaggtgctgatcagcaacctgctggacctgctgacagaggtgggcgtgtctggccagggccgggacaatgccctgaccctgctgatcaaggctgtgcccaggaagagcctgaaggaccccaacaacagcctgaccctgtgggtgattgaccagggcctgaagaagatcctggaggtgggcggcagcctgcaggaccccccaggagagctggccgtgacagccaacagcaggatgtctgccagcatcctgctgagcaagctgtttgatgacctgaagtgtgatgctgagcgggagaacttccaccggctgtgtgagaactacatcaagtcctggtttgagggccagggcctggccggcaagctgcgggccatccagacagtgtcctgcctgctgcagggcccctgtgatgctggcaacagagccctggagctgagcggcgtgatggagagcgtgattgccctgtgtgccagcgagcaggaggaggagcagctggtggccgtggaggccctgattcatgctgctgggaaggccaagagggccagcttcatcacagccaatggagtgtccctgctgaaggacctgtacaagtgcagcgagaaggacagcatccgcatccgggccctggtgggcctgtgcaagctgggcagcgctgggggcacagacttctccatgaagcagtttgctgagggcagcaccctgaagctggccaagcagtgcaggaagtggctgtgcaatgaccagattgatgctggcacccggcgctgggccgtggagggcctggcctacctgacctttgatgctgatgtgaaggaggagtttgtggaggatgctgctgccctgaaggccctcttccagctgagccggctggaggagaggtctgtgctgtttgctgtggccagcgccctggtgaactgcaccaacagctatgactatgaggagccagaccccaagatggtggagctggccaagtatgccaagcagcacgtgcctgagcagcaccccaaggacaagcccagctttgtgcgggcccgggtgaagaagctgctggccgccggcgtggtgtctgccatggtgtgcatggtgaagacagagagccctgtgctgaccagcagctgccgggagctgctgagcagggtcttcctggccctggtggaggaggtggaggaccggggcaccgtggtggcccagggcggcggccgggccctgatccccctggccctggagggcacagatgtgggccagaccaaggccgcccaggccctggccaagctgaccatcaccagcaaccctgagatgaccttccctggagagcgcatctatgaggtggtgcggcccctggtgtccctgctgcacctgaactgcagcggcctgcagaactttgaggccctgatggccctgaccaacctggccggcatcagcgagcggctgcggcagaagatcctgaaggagaaggctgtgcccatgattgagggctacatgtttgaggagcacgagatgatccggcgggccgccacagagtgcatgtgcaacctggccatgagcaaggaggtgcaggacctgtttgaggcccagggcaatgaccggctgaagctgctggtgctgtacagcggagaagatgatgagctgctgcagagagctgctgctgggggcctggccatgctgacctccatgaggcccaccctgtgcagccgcatcccccaggtgaccacccactggctggagatcctgcaggccctgctgctgagcagcaaccaggagctgcagcacagaggagctgtggtggtgctgaacatggtggaggccagccgggagatcgccagcaccctgatggagagcgagatgatggagatcctgtctgtgctggccaagggggaccacagccctgtgaccagggctgctgctgcctgcctggacaaggctgtggagtatggcctcatccagcccaaccaggatggagagtag

SEQ ID NO: 199509 - DNA, 2835 bp, Artificial Sequence
  derived and/or modified sequence
atgaccgtgagcggccccggcacccccgagccccggcccgccacccctggggcatccagcgttgagcagcttcgcaaggagggcaacgagttgttcaaatgcggcgattatggcggcgcactggcggcctatactcaagccctggggctggatgccactccacaagatcaggccgtcctacatagaaatcgcgctgcatgccacctgaaactggaggattacgacaaagctgagactgaggctagcaaagctatagagaaggatggcggggacgtgaaagctctgtaccggcgctcccaagctttagagaagctcggcaggctggatcaagccgttctagacctccagcgttgcgtctctcttgagcccaagaataaggtgttccaggaagctttacggaacataggcggccaaattcaggagaaggttcggtatatgtccagtacagatgctaaggtggagcagatgtttcaaattctgctggatcccgaagagaagggcacagagaaaaagcagaaagcatcccagaacctagtggtgctggcccgggaagacgccggcgctgagaagatctttcgaagcaacggtgtgcaactcttacagcgccttctggacatgggcgaaactgatctgatgctggctgccctccgcacgctggtgggcatatgcagtgagcatcagtcccgcacagttgccaccctgtcgattcttggaacgcgcagagtggtttccatattgggggtcgagtcccaggctgtctcacttgcagcatgtcatctcctccaggttatgtttgacgccttgaaagaaggagtcaaaaagggatttagaggcaaggagggcgcaataatcgtggatcctgctcgagagcttaaggtgctcatatctaatctgttggatcttctgaccgaggtgggagttagtgggcaaggtcgggacaacgcgttaacattactgatcaaggccgtgcctcggaagtccctcaaagatcctaataacagcctcaccctgtgggtgatcgatcagggacttaagaagatcctcgaggttggaggatccctacaggatccccccggcgagctggcggtgaccgcaaattctaggatgtccgctagcatccttctttcaaaactttttgatgacttgaaatgcgatgcggaacgggaaaatttccatcggctgtgcgaaaactacattaagagttggttcgagggccaagggcttgcaggaaaactccgcgcaatccagacagtttcctgcctgttacagggcccttgcgacgctggaaaccgcgcactggaactctccggtgttatggagagcgtgatagcattgtgcgcctctgaacaggaggaagaacagctcgtggctgttgaggctctgattcacgcagccggtaaggccaaacgggcctctttcattactgcaaatggagtgagtctgctgaaagacttgtataagtgctccgagaaggactctatcaggattcgcgctctcgtgggcttatgcaagctaggaagcgccgggggcactgacttttccatgaaacagttcgcggagggctccacactcaaacttgctaaacagtgcagaaaatggctttgtaacgaccaaatcgacgcggggactagacggtgggctgtcgagggcctagcgtacctgacgtttgatgcggacgttaaggaagaatttgttgaggatgccgccgctcttaaagctctgtttcagctctcaagactggaggagaggtcagtgctctttgccgtcgccagtgccctggtcaactgcactaacagttacgactatgaagagccagatcctaaaatggtcgaactggccaagtacgccaaacaacacgtgcctgagcaacaccccaaagataagccctcattcgtccgtgcccgggttaagaaacttctggcagccggtgtagtctcggctatggtgtgcatggtaaagacagagtcgcccgtgctgacttcttcatgtcgggagctcctttcaagggtattcctggcactggttgaggaagtagaggatcgtggaaccgtggtcgcacaaggggggggacgggccctgataccactggcacttgaaggtaccgatgtgggccaaaccaaggctgcacaggcgctcgccaagttgacaatcaccagcaaccctgaaatgacgtttcccggagagaggatttacgaggtggtgcggccccttgtgagccttctccatctgaattgttctgggctgcaaaatttcgaggctctcatggctctgaccaacctggcaggaattagtgagcgtctacggcaaaagatactgaaggagaaagcagtcccaatgatcgagggttacatgtttgaagaacatgagatgattcgacgcgccgctacggagtgcatgtgcaacctggccatgtctaaggaagtccaagacctattcgaggcccagggcaatgacaggcttaagttattagttttatactctggtgaagacgatgagctgctgcagcgggccgcagccggaggcctggcaatgctgacaagtatgcggccaacattgtgcagcaggatcccccaggtaacgacgcactggctcgaaattcttcaggccctgcttctgagctcaaaccaggagctgcagcacagaggtgccgtggtggttcttaatatggttgaggcatctagagaaatagcgtcgaccctgatggaaagtgagatgatggaaatcctgagtgtgctcgccaaaggggatcactctcctgtgacccgggctgcggccgcctgtctggacaaagccgtggaatatggccttattcagccaaaccaagatggtgaatag

SEQ ID NO: 199510 - DNA, 2835 bp, Artificial Sequence
  derived and/or modified sequence
atgacagtcagcgggcctggaaccccagaaccgcgacccgctacacctggagcgagctcagtcgaacagctgagaaaggagggtaacgaactcttcaagtgcggagactatggcggagccctagcagcatatacccaagcactgggcctggatgccaccccccaagatcaggctgtgcttcaccgtaatcgtgcagcttgtcatctgaagctggaggattacgacaaggccgagacagaagcttcaaaggccatcgagaaggacggaggtgatgtgaaagccctgtaccggaggtctcaggccctcgagaagttgggcaggctggatcaagcggtattagacctgcagcggtgcgtgtcactggagccaaagaacaaagtgttccaagaagctctgcggaatattggcggacagatccaggagaaggtgaggtacatgtcctccacagatgccaaggtggagcaaatgttccagatcttactggatccagaagaaaaaggcactgagaagaagcagaaagcatcacagaacctcgtggtgcttgcacgcgaggatgccggagcagagaaaatctttcgctctaatggagtgcagttattgcagcggttgctggacatgggggaaactgatctgatgctggccgcactgagaaccctggtcggtatatgttctgagcatcagagccgcacggtggctacactgtctattctggggacaaggcgggtggtaagcatactcggggtggagtcccaggctgtcagcctggccgcttgccatctgctgcaagtgatgttcgacgccctgaaagagggtgtgaaaaagggtttcagaggcaaggagggcgctattattgtggaccctgcacgggaattgaaagtgctgatttccaatctcctcgatttgctcaccgaagtgggagtctccggtcagggacgggataatgctctcacactcttgattaaagccgtgcccaggaagtccctgaaggacccgaacaattctctaacgctgtgggttatcgaccaggggctcaaaaagattctcgaggttggagggagccttcaagatcccccaggcgagttggcggtgactgctaactcccgcatgtccgccagcatcttgctctcaaaattattcgacgacctgaagtgcgacgctgaacgggagaacttccacaggctatgtgagaattacattaaatcgtggtttgaagggcagggactggccggaaaattgagagctattcagactgtgtcctgtcttctccagggaccctgtgatgccggaaacagggccctggaactctctggagttatggagagtgtgatcgctctgtgcgctagcgaacaagaagaagagcaactcgtcgcagtagaggctttgatccatgcggcaggaaaggctaagcgagccagcttcattaccgcaaacggagttagcttactaaaggacctgtacaagtgtagcgagaaagattctattcgcattagagctctggtcgggctgtgtaagctgggatccgccggaggtaccgatttttcaatgaagcaattcgctgagggttcgaccctgaaattagccaagcaatgcagaaagtggctgtgtaacgatcaaatcgacgccggaacacgaaggtgggccgtggagggtcttgcttatctaacgtttgacgccgatgtgaaggaggaattcgtagaagacgccgcagcgctgaaagctctattccagctttcacgactggaggagagatccgtgctgttcgccgtggcctctgctcttgtgaattgtaccaacagctacgattacgaggagcccgaccccaagatggtggagctggcgaagtacgccaaacagcacgtgcctgaacagcatccaaaagataagccaagttttgtccgagcaagggttaagaagctgctcgcggcaggagtcgtttctgccatggtgtgtatggtgaagacagagagccctgtgctgacatccagttgtagggagctactaagcagagtgttccttgccctcgtggaagaagtggaagatcgcggaacagtggtggcccagggtggcggtcgagctttaattcctctggccctggagggcacagacgtgggccagaccaaagccgcacaggcgcttgccaagctgacgattacttctaaccctgaaatgactttccccggagagcgaatttatgaggttgttcgtcccttagtctccctactgcatctgaactgctccgggctccagaattttgaggccctaatggcactgacaaacctcgcaggtatatccgagagattgcgtcagaaaatcctaaaagaaaaagccgtgccaatgattgagggctacatgttcgaggaacatgaaatgattagacgggctgctacggagtgcatgtgtaacttggcaatgtctaaagaggttcaagatctgttcgaggcccaggggaacgaccgccttaagcttctggtgctttattccggagaggacgatgagttgctccagagagctgcagctgggggtctggccatgttgacaagcatgcgacccacactctgtagcaggattccacaggtcacgactcactggctcgaaatactgcaggcactattgctcagtagcaatcaggagctgcagcaccgcggagctgtggtagttcttaatatggtagaggcttctcgcgaaatcgccagcactttaatggagtcagagatgatggaaattctgagtgtactggcgaaaggtgaccactcccctgtcacccgtgccgcagctgcttgcttggacaaggccgttgaatacggtctcatccagcctaaccaagacggcgagtag

SEQ ID NO: 199511 - DNA, 3252 bp, Artificial Sequence
  derived and/or modified sequence
agagactgcgcctgcgcgggcacgagacaacctctccgcgatgactgtgagtggtccagggacccccgagccccggccggccacccccggggccagctcagtggagcagctgcggaaggagggcaatgagctgttcaaatgtggagactacgggggcgccctggcggcctacactcaggccctgggtctggacgcgacgccccaggaccaggccgttctgcaccggaaccgggccgcctgccacctcaagctggaagattacgacaaagcagaaacagaggcatccaaagccattgaaaaggatggtggggatgtcaaagcactctaccggcggagccaagccctagagaagctgggccgcctggaccaggctgtccttgacctgcagagatgtgtgagcttggagcccaagaacaaagttttccaggaggccttgcggaacatcgggggccagattcaggagaaggtgcgatacatgtcctcgacggatgccaaagtggaacagatgtttcagatactgttggacccagaagagaagggcactgagaaaaagcaaaaggcttctcagaacctggtggtgctggccagggaggatgctggagcggagaagatcttccggagtaatggggttcagctcttgcaacgtttactggacatgggagagactgacctcatgctggcggctctgcgtacgctggttggcatttgctctgagcatcagtcacggacagtggcaaccctgagcatactgggaactcggcgagtagtctccatcctgggcgtggaaagccaggctgtgtccctggctgcctgccacctgctgcaggttatgtttgatgccctcaaggaaggtgtcaaaaaaggcttccgaggcaaagaaggtgccatcattgtggatcctgcccgggagctgaaggtcctcatcagtaacctcttagatctgctgacagaggtgggggtctctggccaaggccgagacaatgccctgaccctcctgattaaagcggtgccccggaagtctctcaaggaccccaacaacagcctcaccctctgggtcatcgaccaaggtctgaaaaagattttggaagtggggggctctctacaggaccctcctggggagctcgcagtgaccgcaaacagccgcatgagcgcctctattctcctcagcaagctctttgatgacctcaagtgtgatgcggagagggagaatttccacagactttgtgaaaactacatcaagagctggtttgagggccaagggctggccgggaagctacgggccatccagacggtgtcctgcctcctgcagggcccatgtgacgctggcaaccgggccttggagctgagcggtgtcatggagagtgtgattgctctgtgtgcctctgagcaggaggaggagcagctggtggccgtggaggctctgatccatgcagccggcaaggctaagcgggcctcattcatcactgccaatggtgtctcgctgctgaaggacctatataagtgcagcgagaaggacagcatccgcatccgggcgctagtgggactctgtaagctcggttcggctggagggactgacttcagcatgaagcagtttgctgaaggctccactctcaaactggctaagcagtgtcgaaagtggctgtgcaatgaccagatcgacgcaggcactcggcgctgggcagtggagggcctggcttacctgacctttgatgccgacgtgaaggaagagtttgtggaggatgcggctgctctgaaagctctgttccagctcagcaggttggaggagaggtcagtgctctttgcggtggcctcagcgctggtgaactgcaccaacagctatgactacgaggagcccgaccccaagatggtggagctggccaagtatgccaagcagcatgtgcccgagcagcaccccaaggacaagccaagcttcgtgcgggctcgggtgaagaagctgctggcagcgggtgtggtgtcggccatggtgtgcatggtgaagacggagagccctgtgctgaccagttcctgcagagagctgctctccagggtcttcttggctttagtggaagaggtagaggaccgaggcactgtggttgcccagggaggcggcagggcgctgatcccgctggccctggaaggcacggacgtggggcagacaaaggcagcccaggcccttgccaagctcaccatcacctccaacccggagatgaccttccctggcgagcggatctatgaggtggtccggcccctcgtctccctgttgcacctcaactgctcaggcctgcagaacttcgaggcgctcatggccctaacaaacctggctgggatcagcgagaggctccggcagaagatcctgaaggagaaggctgtgcccatgatagaaggctacatgtttgaggagcatgagatgatccgccgggcagccacggagtgcatgtgtaacttggccatgagcaaggaggtgcaggacctcttcgaagcccagggcaatgaccgactgaagctgctggtgctgtacagtggagaggatgatgagctgctacagcgggcagctgccgggggcttggccatgcttacctccatgcggcccacgctctgcagccgcattccccaagtgaccacacactggctggagatcctgcaggccctgcttctgagctccaaccaggagctgcagcaccggggtgctgtggtggtgctgaacatggtggaggcctcgagggagattgccagcaccctgatggagagtgagatgatggagatcttgtcagtgctagctaagggtgaccacagccctgtcacaagggctgctgcagcctgcctggacaaagcagtggaatatgggcttatccaacccaaccaagatggagagtgagggggttgtccctgggcccaaggctcatgcacacgctacctattgtggcacggagagtaaggacggaagcagctttggctggtggtggctggcatgcccaatactcttgcccatcctcgcttgctgccctaggatgtcctctgttctgagtcagcggccacgttcagtcacacagccctgcttggccagcactgcctgcagcctcactcagaggggccctttttctgtactactgtagtcagctgggaatggggaaggtgcatcccaacacagcctgtggatcctggggcatctggaagggcgcacacatcagcagcctcaccagctgtgagcctgctatcaggcctgcccctccaataaaagtgtgtagaactcca

SEQ ID NO: 199512 - protein, 852 aa, Artificial Sequence
  derived and/or modified sequence
MKPMLKDFSNLLLVVLCDYVLGEAEYLLLREPGHVALSNDTVYVDFQYFDGANGTLRNVSVLLLEANTNQTVTTKYLLTNQSQGTLKFECFYFKEAGDYWFTMTPEATDNSTPFPWWEKSAFLKVEWPVFHVDLNRSAKAAEGTFQVGLFTSQPLCPFPVDKPNIVVDVIFTNSLPEARRNSRQPLEIRTSKRTELAQGQWVEFGCAPLGPEAYVTVVLKLLGRDSVITSTGPIDLAQKFGYKLVMVPELTCESGVEVTVLPPPCTFVQGVVTVFKEAPRYPGKRTIHLAENSLPLGERRTIFNCTLFDMGKNKYCFDFGISSRSHFSAKEECMLIQRNTETWGLWQPWSQCSATCGDGVRERRRVCLTSFPSSPVCPGMSLEASLCSLEECAAFQPSSPSPLQPQGPVKSNNIVTVTGISLCLFIIIATVLITLWRRFGRPAKCSTPARHNSIHSPSFRKNSDEENICELSEQRGSFSDGGDGPTGSPGDTGIPLTYRRSGPVPPEDDASGSESFQSNAQKIIPPLFSYRLAQQQLKEMKKKGLTETTKVYHVSQSPLTDTAIDAAPSAPLDLESPEEAAANKFRIKSPFPEQPAVSAGERPPSRLDLNVTQASCAISPSQTLIRKSQARHVGSRGGPSERSHARNAHFRRTASFHEARQARPFRERSMSTLTPRQAPAYSSRTRTCEQAEDRFRPQSRGAHLFPEKLEHFQEASGTRGPLNPLPKSYTLGQPLRKPDLGDHQAGLVAGIERTEPHRARRGPSPSHKSVSRKQSSPISPKDNYQRVSSLSPSQCRKDKCQSFPTHPEFAFYDNTSFGLTEAEQRMLDLPGYFGSNEEDETTSTLSVEKLVI

SEQ ID NO: 199513 - protein, 428 aa, Artificial Sequence
  derived and/or modified sequence
MKPMLKDFSNLLLVVLCDYVLGEAEYLLLREPGHVALSNDTVYVDFQYFDGANGTLRNVSVLLLEANTNQTVTTKYLLTNQSQGTLKFECFYFKEAGDYWFTMTPEATDNSTPFPWWEKSAFLKVEWPVFHVDLNRSAKAAEGTFQVGLFTSQPLCPFPVDKPNIVVDVIFTNSLPEARRNSRQPLEIRTSKRTELAQGQWVEFGCAPLGPEAYVTVVLKLLGRDSVITSTGPIDLAQKFGYKLVMVPELTCESGVEVTVLPPPCTFVQGVVTVFKEAPRYPGKRTIHLAENSLPLGERRTIFNCTLFDMGKNKYCFDFGISSRSHFSAKEECMLIQRNTETWGLWQPWSQCSATCGDGVRERRRVCLTSFPSSPVCPGMSLEASLCSLEECAGRFRSCCPGWSAMVRSRLTNSASRVQAILLPQPLA

SEQ ID NO: 199514 - protein, 473 aa, Artificial Sequence
  derived and/or modified sequence
MSLEASLCSLEECAAFQPSSPSPLQPQGPVKSNNIVTVTGISLCLFIIIATVLITLWRRFGRPAKCSTPARHNSIHSPSFRKNSDEENICELSEQRGSFSDGGDGPTGSPGDTGIPLTYRRSGPVPPEDDASGSESFQSNAQKIIPPLFSYRLAQQQLKEMKKKGLTETTKVYHVSQSPLTDTAIDAAPSAPLDLESPEEAAANKFRIKSPFPEQPAVSAGERPPSRLDLNVTQASCAISPSQTLIRKSQARHVGSRGGPSERSHARNAHFRRTASFHEARQARPFRERSMSTLTPRQAPAYSSRTRTCEQAEDRFRPQSRGAHLFPEKLEHFQEASGTRGPLNPLPKSYTLGQPLRKPDLGDHQAGLVAGIERTEPHRARRGPSPSHKSVSRKQSSPISPKDNYQRVSSLSPSQCRKDKCQSFPTHPEFAFYDNTSFGLTEAEQRMLDLPGYFGSNEEDETTSTLSVEKLVI

SEQ ID NO: 199515 - DNA, 1422 bp, Artificial Sequence
  derived and/or modified sequence
atgagcctggaggccagcctgtgcagcctggaggagtgcgccgcctttcagccttcttccccatcgccactgcaaccacaaggtcccgttaagtctaacaatatagtcacagtgacagggatatctctctgtctgttcattattatcgcaaccgttctcatcactctgtggaggcggttcggtcggccagcaaaatgtagtacaccagcgcgccataactctattcactctccctcatttagaaagaactcagacgaagaaaacatctgcgaattgtccgaacaaaggggctcctttagtgacggaggggatggacccactggtagccccggggataccggtattcccctgacatacaggcgatctggacctgtgcctcccgaagatgatgctagcggttcagagtctttccagagtaatgcacaaaaaatcatccccccattgtttagttatagactggctcagcaacaactcaaggagatgaagaagaagggcctcactgagactacgaaagtttaccacgtgtctcagtctccactgaccgatacagcaattgatgccgcacccagcgcaccactggacctcgaatccccagaggaagcggctgccaataagtttcgcattaaaagcccctttcctgaacagcctgctgtttcggccggggaacgtccaccatccagattggacttgaacgtcactcaggccagctgtgcgatctcaccatcacaaaccctcattcggaagtctcaggcgaggcatgtcggctctagagggggtccatctgaaagaagccacgctcggaatgcacatttcaggaggactgcttcattccatgaagccagacaagcacgccccttcagggagcggtctatgtccactctgaccccgcggcaagctcccgcctatagctcccgtacaagaacctgtgaacaggcagaagatcgcttcagaccccaaagtcgtggtgcccatttatttcctgagaagttggaacattttcaggaagcaagcggtaccagaggcccattaaaccctcttccaaaatcgtataccttgggtcagcccttgcgcaagcctgacctgggtgaccatcaagccggcctcgtggcggggattgagagaaccgaacctcatagggctcgtcgcggaccaagtccttcacacaaaagcgtgtctagaaagcaaagttcgccaatctccccaaaagataattatcagcgcgtaagctccctctctccctcgcaatgtcgcaaggacaagtgtcaaagctttcccactcatccagagttcgccttttacgataacaccagtttcggcctaactgaggccgaacaacgcatgctggatttaccaggctatttcggctccaacgaagaggacgaaaccacttctacactgtctgttgaaaagctcgtgatttag

SEQ ID NO: 199516 - DNA, 2559 bp, Artificial Sequence
  derived and/or modified sequence
atgaagcccatgttgaaggatttctcaaatctgctgctggtggtgctatgcgactacgtcttgggcgaggccgagtacttgcttcttagggaacccggtcatgtcgcccttagtaatgacacagtttatgtggatttccagtacttcgatggagcgaatggaacgttgagaaacgtctctgtcctactgcttgaagctaataccaatcaaacagtgacgacaaagtacttgcttactaaccagtcacagggcacactcaagttcgagtgcttctacttcaaggaggcaggcgattactggtttacgatgacaccagaagcgactgataattctacaccgttcccttggtgggaaaagtcagcctttttaaaggttgaatggcccgtcttccacgtcgacctgaatagaagcgctaaagcagctgaaggtaccttccaagtgggactgttcactagccaacctctgtgcccattcccggtggacaaaccaaacattgtggtggatgtgatctttaccaactcattaccagaagccagacgaaacagtaggcagccactggagatacgtacctctaaaaggaccgagcttgcacaaggacagtgggtagaattcgggtgtgccccactcgggcctgaagcgtatgtgacagtggtcttgaaattactggggagggatagtgtcattacctccacaggacctattgacttggcccagaagtttggttacaaattggtgatggtgcccgaactgacctgcgagtctggagtagaggtgacagtgttaccacctccgtgcactttcgtgcaaggggtcgtgaccgtgttcaaggaggccccacgctacccaggaaagcgcacaattcatctggctgaaaattctctccccctgggggaacgcagaacgatttttaactgcacactatttgacatgggcaaaaacaaatactgctttgacttcggcattagtagccggtctcatttcagtgcgaaggaggaatgtatgttgatccaacgcaacacagaaacttggggtctctggcagccttggtctcaatgcagtgctacttgtggggatggcgtgcgcgagagaaggcgagtgtgcttaaccagctttccctcttcacccgtctgcccaggcatgtccctggaagcatccctttgcagtctcgaggagtgcgccgctttccagccatcatccccgtccccactgcagccgcaggggccagtgaaaagcaacaacatcgtgacagttactggaatcagcctgtgtctgtttataatcattgccacggttttaattacattgtggcggcgtttcggtcggccagcaaaatgtagtacccccgcaaggcataactcgatccacagtccgtcattccggaaaaatagtgacgaggagaacatttgtgaactgtctgagcaacggggaagtttctcggatggtggcgacgggcctactggcagccccggagacaccggcatacccctcacttacaggcgaagcggaccagtgccacccgaggatgacgctagcggttctgagtccttccaatcgaatgcccagaaaatcatccctcccctttttagttacaggctagcccagcagcagctgaaagagatgaagaagaagggcctcacagagaccactaaggtttaccacgttagccagagcccactgaccgatacagcaattgacgcagctcccagcgcccctctcgacctcgaaagccctgaggaggcggctgccaataagtttcggataaagtcaccctttccagagcagcctgcggtgagtgccggtgaaagacccccttcgcggcttgacttaaatgtgactcaggcatcatgcgcgatctcccccagccaaacgttaattaggaagagtcaagcccgacatgtcgggtcccgcggagggccttccgaacgctcccacgctaggaatgctcacttcaggcgaactgcttctttccatgaagccaggcaggctcgccctttccgcgagagatccatgtccactctgactcctcggcaggcacctgcatattcttcaaggactcggacctgtgagcaggccgaggatcgctttagaccccaatcccgaggtgcccatttgtttcccgagaagctcgagcatttccaggaagcatcaggaacacgcggaccactgaaccccctgccaaagtcttacacactggggcagccactcaggaagccggatctgggggaccaccaagccggtttggtggccggaatcgagcggactgagccacacagggcgcgtcgtggcccttctccctcccacaaatctgtaagcagaaagcagtccagcccaatttcaccaaaggataattaccaaagagtgtcctccctttccccttcccaatgtagaaaagacaagtgccagtcatttcccacccatcccgagttcgcattttatgataatacaagttttggcttaaccgaggccgagcaacggatgctagacttgcccggttatttcgggtccaacgaggaggacgaaacgacctctaccctgtctgtagagaagttggtcatttag

SEQ ID NO: 199517 - DNA, 1287 bp, Artificial Sequence
  derived and/or modified sequence
atgaagcctatgctgaaagacttttccaatcttctgctcgtcgtgctttgcgactatgtcctcggggaggccgaatacctgttgcttcgtgaacctggccacgtggcactcagcaatgacactgtgtatgtggactttcagtacttcgatggtgctaatgggaccttacgaaatgtgagtgtgctcttgcttgaggcgaatacgaaccagacagtcacaacaaagtacctcctgaccaatcaatcacagggaaccctcaaattcgagtgtttctactttaaagaggctggagactactggtttaccatgaccccggaggcgaccgataattcaacaccgtttccatggtgggagaagtccgccttccttaaggtagagtggcctgtcttccacgtcgatctcaaccggagtgctaaagctgctgagggaactttccaggtaggcctgtttaccagtcagcctttatgtcccttccccgtcgataagccaaatatcgtggtggacgtgatcttcaccaatagcctgcccgaggccagaagaaatagcagacaacctctcgaaattagaacctcgaagcgcaccgagctcgcccaaggccagtgggtcgagttcgggtgtgcaccattgggccctgaggcttatgtaactgttgtgctgaaactcctgggaagggatagcgtaatcaccagtactgggcctatcgacctggcacagaaatttggatataagctcgtgatggtgcctgaactcacgtgtgagtctggagttgaagtgacagtgcttcccccaccatgtacgtttgtgcaaggtgtggtcaccgtcttcaaggaagcccctaggtacccgggaaaacgaactatccacctcgcagaaaattcacttccactgggggagagacggaccattttcaattgcacgctcttcgacatgggaaagaataagtactgcttcgactttggtatcagttcaaggtctcacttcagcgccaaggaagagtgtatgctgattcagcgaaacacagagacatggggcctgtggcagccgtggtctcagtgtagtgccacttgtggtgatggggtcagagaacgtagacgtgtatgcctgacttcttttccctcgtctcccgtatgtcctggcatgagcctcgaagcttcactttgttcactggaagagtgcgcaggacgcttccgatcgtgttgcccaggctggagtgcaatggtaagaagccgcctgacaaattcagcaagtagggttcaggccattttactgcctcaacccctggcttag

SEQ ID NO: 199518 - DNA, 1422 bp, Artificial Sequence
  derived and/or modified sequence
atgagcctggaggcctctttatgctcgttagaagaatgcgcagcattccagcctagctctccttcacccctccagccacagggcccagtaaagtccaataatatcgtcactgtaacaggcattagcctctgcctttttattataatcgcgactgtgctgatcacactgtggcgcaggttcggccgtcctgcaaaatgttccacaccggcacgacataattctatccacagcccaagcttccggaagaactcagacgaggagaacatttgtgagctaagcgaacagagaggatctttttcagacggaggggacggcccaacaggaagtcctggagacactggcatccctctgacatatcggaggagcgggccagttccacctgaggacgatgcctcgggaagtgagtcattccagtcaaacgcccagaaaatcattcccccacttttttcctatcgtctggcgcagcaacagttgaaggagatgaagaagaagggcctgaccgaaacgaccaaggtataccacgtgtcacaatcgccactgacagatacagcaattgatgctgccccttccgccccactggacctagagtccccagaagaggccgcagcaaataagttcagaataaaatcccccttccctgaacagcccgctgtatctgccggagagagaccaccctccagactcgatctgaatgtgacccaggccagttgtgctatatcaccatcccagactttaattcgaaaaagtcaggctaggcacgttggttcaaggggtggacctagtgagaggagtcatgccaggaacgcacacttcaggcgcactgcctcattccacgaagctcgacaggcccgaccctttagagagaggagtatgtcgactttaactcccaggcaggcgccagcttacagctctcgtactcgcacatgtgaacaagccgaggatcgatttagacctcaatctcgcggagctcatctcttccccgaaaaattggaacatttccaggaggcctccggaaccagaggccctctcaaccctctgcccaagtcctatactctcggccaaccactccgtaagcccgacctcggcgatcaccaggctgggcttgtagccggaatcgagcgcacagaacctcaccgggcaaggcggggtccgtctccaagccacaaatctgtaagtagaaagcaatcctcccctatcagccccaaagacaactatcagcgggtttcaagtctgagtcctagccagtgcagaaaagataagtgccagtcgtttccgacacatccagaattcgctttttacgataacacgagcttcgggctgaccgaagcagagcagcggatgcttgaccttccgggttacttcggctctaacgaagaggacgagacgacctctacgttgagcgtggaaaagttagtaatctag

SEQ ID NO: 199519 - DNA, 2559 bp, Artificial Sequence
  derived and/or modified sequence
atgaagcctatgttgaaggattttagtaacctgttgctcgtggtgctgtgcgattacgtgttgggagaggcggaatatctcctgctgcgcgagccaggtcacgtcgctctcagtaatgatactgtgtatgtagactttcagtactttgatggcgcaaatggaacgctcagaaatgtcagcgtcctgctccttgaagccaacactaatcagaccgttacaactaaatacctgctcaccaatcagtcccagggaaccctcaaattcgagtgcttttattttaaggaggccggagactactggttcaccatgactcctgaggctactgataactccacaccttttccatggtgggagaagtctgcattcctgaaggttgaatggccggttttccatgtggatctcaataggagcgctaaggctgccgaaggtacattccaagtcggattattcactagtcaacccctatgccccttccctgtagacaagcccaacattgtagtagatgtgattttcactaattctctccctgaggcacgcagaaattcacgtcagcctttagagatccgaacatctaagcgcacagagcttgcgcagggccagtgggtcgagttcggatgtgctcctctgggccccgaagcctacgtgacagttgttttgaagctccttggcagagacagcgtgatcaccagtacaggaccgatcgacttggctcagaagttcggatataagttggtgatggtgccagagctcacatgcgaaagcggggttgaggtgactgttttacccccaccttgcacgttcgttcaaggcgtcgtgactgtttttaaggaggcaccaagatacccagggaagagaactatccacctggccgagaactccctgcctctcggtgagcggcgcacaatttttaattgcacgttgttcgacatggggaaaaacaaatactgttttgactttggcattagctcaaggagccacttttccgcgaaggaggaatgtatgttaattcagaggaacaccgagacttggggcctgtggcagccttggagtcagtgcagcgccacctgcggcgacggagtaagagagcggagaagggtgtgtctgacctcctttccgagctctcccgtctgtcccggcatgtccttggaggctagcctttgcagcctggaagaatgcgccgcattccaaccctcgagcccatcccccctccaacctcagggcccagtcaagtccaataatattgtaactgttacaggaattagtctttgcctgtttatcatcatagccaccgtactcattacactgtggcgcaggtttggacgccccgcgaagtgcagtacccccgcacgacacaacagcatccactccccatctttcaggaagaatagtgacgaggagaatatatgcgagctctccgaacagagagggagcttttcagatggcggcgatggtcctaccggatctcccggggacaccggcatcccgctcacctataggagaagcggtcctgttccacccgaagatgacgcatctggttccgaatcttttcagtcaaatgcccagaagatcatcccaccactgttctcctacagactggcccagcagcagttgaaagagatgaagaagaaaggtctaactgagacgaccaaggtttatcacgtatcccagtcgcctttaacagataccgccattgacgcagctcctagcgccccactcgacctggagtcacccgaggaagctgcagccaataagtttagaataaaatccccctttcccgagcagcccgctgtctctgccggtgaaagacccccgtctagacttgatttgaatgtgacacaggcctcctgtgcgataagccccagccagaccctgatccgcaaatctcaggctcgtcacgtgggctcccgagggggccccagtgaacgctcacatgccaggaacgcacattttcgacgaacagcctccttccatgaggctagacaggcaaggccatttagggagaggtcaatgtccacactgaccccacgccaggcacccgcctatagcagcagaactagaacttgtgagcaggccgaggatagattcagaccccagtctaggggcgcccacctttttcccgagaagcttgagcatttccaagaggccagtggcacacgtggtcctctcaatcctctgcctaagtcatacactctcggccagccactgcgaaaaccagacctcggggaccaccaggctggccttgtcgccggaattgaaaggaccgagccccatcgggcccgcagaggtccttctccgagccataagagcgtatccagaaagcagtcgtcaccaatttcccccaaagacaactatcaacgcgtgtcctccctttccccatcccagtgccgcaaggacaagtgccagtcttttccaacacaccctgagttcgcgttttacgataatacgtcttttgggttaactgaggcagaacagcgcatgctcgatctacctggttacttcgggtccaacgaagaggacgagaccacttctactctaagtgttgagaagctcgttatctag

SEQ ID NO: 199520 - DNA, 1287 bp, Artificial Sequence
  derived and/or modified sequence
atgaagccgatgctcaaggatttctccaacctcctgctggtagtcttgtgcgattacgtcctgggagaagcggaatatttattgttgagagaaccaggacatgtcgcactctcgaatgatacagtctatgtagattttcaatactttgatggcgctaatggcacactgagaaatgtctccgtgttacttttggaggctaatacaaaccaaactgtgaccacaaaatatctgctgacgaaccaatctcagggcactctgaaattcgaatgtttttacttcaaggaagccggtgactactggttcactatgacacccgaagccacagacaatagcacccctttcccctggtgggagaaatctgcgtttttgaaggttgagtggccagtctttcatgttgacctgaatagaagtgcaaaggcagccgagggaacgtttcaagtgggcctgttcactagccagcctctttgcccgtttcccgtggataagcctaatattgtggtggatgtcatctttacgaattccttacccgaggcccgcagaaattctcgacaaccgctggagatacgtacaagcaaacgcaccgagctcgcacaggggcagtgggtggaattcggctgcgccccactgggaccggaagcttatgtgacagtggtgctgaagctgctgggtcgcgactctgtgataacttcaaccggcccgatcgatctcgctcagaagtttggttataaacttgttatggtcccagaacttacatgcgaatcaggggtggaagtcaccgtcctccccccgccctgtacctttgtccagggcgttgtgaccgtttttaaagaagcaccgagataccccggaaaaagaaccatccacctggcagaaaacagcctacccttgggagagagacgaaccatttttaattgtactctgtttgatatggggaaaaataaatactgttttgacttcggcatcagcagccgtagtcactttagtgccaaagaagaatgtatgttgatacagagaaatacagagacatggggcttatggcagccttggtctcagtgcagcgccacgtgtggcgatggtgtgcgagagcgaagacgggtctgtcttacttctttcccctctagtcccgtgtgtccaggaatgagtctagaggccagtttgtgctctcttgaggagtgtgctggcagattcagatcgtgctgtcctggatggtcagctatggtgcgcagtcgactcacgaactccgcctccagggtgcaagctattcttctgcctcagcctctggcttag

SEQ ID NO: 199521 - DNA, 1422 bp, Artificial Sequence
  derived and/or modified sequence
atgtctctggaggcttctctgtgttcactggaggaatgtgctgcttttcagccctcctctccttcccctcttcagccacaggggccagtgaagtcgaacaatatcgtaactgttactggcatctcgctttgtcttttcatcataatcgcgacggttctgattactctatggcggaggtttggacggcctgctaagtgctccacgccagcccgtcataactccatccattctcctagcttcagaaagaacagcgacgaagagaatatctgtgaactgagcgagcagcggggtagtttctctgacggcggtgatgggcctaccggatcaccgggcgacaccggaatccctttgacctaccgcaggtccggccctgtgccccctgaggacgacgcgtctgggtccgaaagctttcagtccaatgcacagaagataatccctcccctcttctcataccggctggcacaacagcaattgaaagaaatgaaaaagaaaggactgaccgaaactacaaaggtttaccatgtgagccagtccccccttacagataccgccatcgatgcagctccgagcgccccactagatctggaaagtccggaagaagctgccgccaataaatttagaatcaaaagtccctttcccgaacagcccgcagtgtccgctggcgaacggcccccctcccgtctggatctcaatgtcacgcaagcatcctgcgctatttccccaagtcaaacgctaatccgtaaatctcaggcccgccatgttggatcccgggggggtccctccgaacgtagtcatgctcggaacgcccactttcgccgaacagcatccttccatgaagctagacaggcccgcccatttagagagagaagcatgagcacccttacacctcgtcaagcacctgcatatagctcccggactagaacttgtgagcaggcagaagaccggtttaggcctcagtctcgcggcgcgcacctgtttcctgagaagctggagcactttcaagaggccagtggcactagggggcccctcaacccgctgccgaagtcctacaccttgggccagccactgcgaaagccggaccttggagatcatcaagcggggctcgtggctgggattgagaggaccgaaccccaccgcgctcgccgaggaccttctccttcccataagtcagtatcaagaaagcaaagtagcccaatttcccccaaggacaattatcagcgcgtgagctctttgagtccatcacagtgtcgcaaggacaagtgtcaatcgtttcccacacatccggaatttgcgttctatgataatacttcctttggcctaacggaagccgagcagcggatgctggatcttcctggctattttgggtctaacgaagaagatgagaccacctcgactctctctgtcgaaaaattggtgatctag

SEQ ID NO: 199522 - DNA, 2559 bp, Artificial Sequence
  derived and/or modified sequence
atgaagccaatgcttaaagacttctctaacctcttgctggttgtcctctgtgactacgttctcggggaagctgagtatttactcctgcgggaacccggacacgttgctctttcaaatgatacagtgtatgtcgacttccaatacttcgatggagcgaacggaacgttgaggaatgttagcgttcttctgcttgaggcgaacaccaaccagacggtcaccactaaatacctgctgacaaaccaaagccagggaacactgaagttcgaatgtttttactttaaggaagccggagactattggtttacaatgacccctgaagcaacagacaactcaacgccctttccatggtgggagaagagtgcttttctcaaagtggagtggcctgtttttcacgtagatctcaatagaagtgcaaaagcagctgaaggtacttttcaggtgggactctttacctctcagccattgtgcccattccctgtagataagcccaatattgtagtcgatgtgatctttacgaatagccttccggaagccagacgtaattctcgccagccattggaaattaggaccagcaagaggaccgaactcgcacagggccaatgggtggaattcggttgtgcccccctgggaccagaagcctacgtcaccgtggttctaaaactcctaggccgggattctgttataacgtccaccggtccaattgatcttgctcagaaatttggttataaactggtgatggtgcccgaacttacatgtgagagcggagttgaagtcaccgtgctgccaccaccatgcacttttgttcagggagtggtaacagtgtttaaagaggctccaagatatccaggtaaaagaactatccacttagctgagaattcgctaccactcggagagagaaggactatctttaattgcaccctttttgatatgggtaagaacaagtattgttttgattttggcatttcaagcaggagccattttagcgcaaaagaagaatgtatgctgatccaacgaaataccgaaacctggggtctgtggcagccctggtctcagtgctccgcaacctgcggtgacggggtacgtgagcggaggcgagtgtgtctgaccagtttcccttcctcccctgtctgtccaggaatgtctctggaagcctctttatgttcactagaggaatgtgccgcctttcagccatcctctccaagccctctgcaaccacaaggacccgtgaagagcaacaacatagtcaccgtgaccggcatctcactttgcctgttcattattatcgccactgttctcatcacactgtggcgacgtttcggccgccccgccaaatgtagcacacctgctcgacacaattccatccattccccttctttcagaaagaatagtgatgaagaaaatatttgcgaactgtccgaacaacgtggctccttcagtgacgggggtgacggcccaacaggatccccaggcgacaccggaatcccactgacctatcgcagaagcggtcctgttccacccgaagatgacgcatctggttccgaatcttttcagtcaaatgcccagaagatcatcccaccactgttctcctacagactggcccagcagcagttgaaagagatgaagaagaaaggtctaactgagacgaccaaggtttatcacgtatcccagtcgcctttaacagataccgccattgacgcagctcctagcgccccactcgacctggagtcacccgaggaagctgcagccaataagtttagaataaaatccccctttcccgagcagcccgctgtctctgccggtgaacgccccccttcaaggctcgatcttaatgtgacgcaggcaagctgcgcaatctctccttctcaaaccctcatcagaaagtctcaagccagacatgtcggaagccgcggcggaccatccgagaggagccacgccagaaacgcccactttagaagaacagcatcctttcatgaggcgagacaagcacgacccttcagagaaagatcaatgtccactcttacccctcggcaagcgcccgcttacagctctcggactaggacttgcgagcaggctgaggacaggttccgtccacagtctcgcggcgctcaccttttccctgagaaactcgagcacttccaagaagcttcaggcacccgtggcccgctcaatccgttgcccaaatcctacaccctgggccaacccctgaggaagcctgatctgggagatcaccaagccggcctggttgccggaattgagcgcaccgagcctcaccgcgcaagacgtggcccctcacccagtcacaagtccgtttcccggaagcaatccagcccaattagccctaaagacaattatcaaagagtctcctccctctcacctagtcagtgtagaaaagacaaatgccagagctttcctacacaccccgagtttgccttttatgataacaccagtttcggcctgactgaagccgaacaaaggatgcttgacctgcctggctattttggctccaatgaagaagacgagacaacatccacactctctgtagagaagttggtgatttag

SEQ ID NO: 199523 - DNA, 1287 bp, Artificial Sequence
  derived and/or modified sequence
atgaagcctatgctaaaagacttttccaacctcctattggtcgtgctgtgcgattatgttctcggcgaagcagaataccttttacttagagaaccgggacatgtcgccttgtctaatgacaccgtttatgtggattttcagtacttcgacggggcaaatggcacactgcggaatgtgtcggttctactcctggaagcaaacactaatcagactgtaacaaccaagtacttgcttacaaaccagagtcagggtacgttaaaattcgaatgtttttacttcaaagaagctggagattattggttcactatgacacccgaagccacagacaatagcacccctttcccctggtgggagaaatctgcgtttttgaaggttgagtggccagtctttcatgttgacctgaatagaagtgcaaaggcagccgagggaacgtttcaagtgggcctgttcactagccagcctctttgcccgtttcccgtggataagcctaatattgtggtggatgtcatctttacgaattccttacccgaggcccgcagaaattctcgacaaccgctggagatacgtacaagcaaacgcaccgagctcgcacaggggcagtgggtggaattcggctgtgccccattaggaccagaggcctacgtgactgtagtgttgaagcttctgggacgtgacagtgtaatcacatctaccggcccaatcgatctagcccagaaattcggttacaagctcgtgatggtaccagaattgacctgcgaatctggagtcgaagtaacagtgctcccccccccgtgtacctttgttcaaggcgtggtgaccgtcttcaaggaagcccctagatacccaggcaaaaggacaatccaccttgcggagaactccctgccactgggcgagcggcggaccatatttaattgtacactgttcgatatgggaaaaaacaagtattgctttgatttcgggatttcatcccggtcgcacttctccgcaaaagaggaatgtatgcttattcagaggaatacagaaacatggggtctttggcagccctggagtcagtgctccgcaacatgtggagatggagtgagagaacgacgtcgcgtttgtctgactagctttccttcctcccctgtatgccctggtatgagtctggaagcctccctgtgtagcctcgaagagtgcgcaggacgtttcaggagctgttgccctggctggtcagctatggtaaggtccagactgactaactccgcctctagagttcaagctattcttttgccccaaccgcttgcatag

SEQ ID NO: 199524 - DNA, 1422 bp, Artificial Sequence
  derived and/or modified sequence
atgtccttggaggctagtctatgttcattagaggaatgtgccgcatttcagccaagtagcccatcccccctgcagcctcaaggtccagtgaagtctaataatatcgtcactgttaccggcatctctctctgcctgtttataattatagccaccgtcctgatcactctctggagaaggttcggacgcccagctaagtgttccacaccagccaggcataatagtatacacagtccttcattcagaaaaaattcagacgaagagaatatttgtgaattgtctgaacaacgtggctccttttccgatggcggcgatggtcctaccggaagcccaggcgacacaggcataccacttacctatcgtagatcaggtccagtccctccggaagatgatgcaagcggctctgagagtttccagtcaaacgcccagaaaattatccccccattatttagctaccgccttgctcagcagcagttgaaggaaatgaagaaaaagggacttacagagacgaccaaagtttaccacgtgagtcagtccccacttacggacactgctatagacgcagcgcccagcgcaccccttgacttggaatctcctgaagaagctgccgccaataaatttagaatcaaaagtccctttcccgaacagcccgcagtgtccgctggcgaacggcccccctcccgtctggatctcaatgtcacgcaagcatcctgcgctatttccccaagtcaaacgctaatccgtaaatctcaggcccgccatgttggatcccgggggggtccctccgaacgtagtcatgctcggaacgcccactttcgccgaacagcatccttccatgaagctagacaggcccgcccatttagagagagaagcatgagcacccttacacctcgtcaagcacctgcatactcatcaagaacacgaacttgcgaacaggccgaagatcgctttcggccacagtcacggggggctcacctgtttcctgagaaattggagcatttccaagaggcctccgggacgcgcggacccctgaatccactcccaaaatcctatacactcggccagcctctgaggaaacccgacctcggcgatcatcaggcaggtctcgttgccggaatagagagaactgaaccgcatcgcgcacgcagaggaccctctccaagccacaagtcagtgtctcgtaagcaaagtagccccattagccccaaagataattaccagagagtgagttccctcagcccttctcagtgtcgtaaggacaagtgtcagtctttccccacacaccccgaatttgctttctatgacaatacatctttcggactgaccgaagcagaacaaagaatgcttgatttacccggatattttggatcaaatgaagaggatgagacaactagtaccctgtccgtggaaaaactggtcatttag

SEQ ID NO: 199525 - DNA, 1892 bp, Artificial Sequence
  derived and/or modified sequence
gtgcagtctgggacgcgggatgcttggcgctctacctcgccgcccctgagccttcccgtccgcctcgccacgcgcccggacggcctggggttgctgcccgtcagtctcgaaagaaacttggggactgtggcagccatggagccagtgtagtgccacatgtggggatggtgtcagagagcgtcgccgagtgtgtctcacttccttcccctccagtcctgtctgccctggaatgtccttggaggcctccctgtgttccctggaggagtgtgctgctttccagccatccagcccatctcctcttcagccccagggtccagtgaagtccaacaacatcgtgactgtcactggtatatccttgtgcttgttcatcatcattgccactgtgctcatcacgctgtggaggaggttcggccggccagccaagtgcagcacacctgctcgacacaactccatccactcccccagcttccggaagaactcggacgaggagaatatctgcgagctgagcgagcagcgcgggagcttctcggatgggggagacgggcccacggggagtccaggggacacaggcatccctctgacctacaggcggagcgggccggtacctcccgaggatgatgcctctggcagcgagagcttccagtccaacgcccagaagataatcccacctctgttcagctaccgccttgcccagcagcagttaaaggagatgaaaaagaaaggtctgacggaaactaccaaagtgtatcacgtgtctcagagtcccctgacagacactgccattgatgcggcccccagcgctcccttagatttggaaagcccggaagaagctgcagcaaacaagttccggatcaaatccccatttccggagcagcccgcggtcagtgccggggaaaggcctccctccaggctggatctaaatgtgactcaggccagttgtgccataagccccagccagactctgatccgcaagtcacaggcaaggcacgtgggcagcagagggggcccgtccgaaaggagccatgccaggaacgcccatttcaggaggacagcgagtttccatgaagccaggcaggcccggccgttccgagagaggagcatgtccactctgactccacggcaggcccctgcctacagctctaggacgcggacctgcgagcaggcagaggacagatttaggcctcagagtcgaggtgcccacctgtttcctgaaaaactggagcatttccaagaggcaagtggaacccgtggtccattaaaccctctccctaaatcctacactttggggcagcccttgaggaaaccagaccttggggatcaccaggcaggattagtggccggaattgagagaacagagccccacagagctcgtcggggaccgtcccccagtcacaagagtgtctcaaggaagcagtcttctcccatatcccccaaagataactaccagagggtcagttctctgagcccttctcagtgtagaaaagacaagtgtcaaagcttccccactcaccctgagtttgccttctatgacaatacgtcgtttggcctcactgaggctgagcagaggatgctggacctcccaggatattttgggtcaaatgaagaggatgaaaccacaagtacacttagcgtggagaagctggtgatctagactgagaatcagcctgagctttacacagctggggtctgctactcgcgttttgtagacttttgtgtaactatttgtaccgtaggacagaatgtgaggaggaagtaacacacagaggaggatgtgtgtgtatgcatgtgtttgaattcacaaggaagaaattatttatcttgagctttttcctttgttattcaatttctattgatttattagtaataacaatgataataaaatgtaaatgagc

SEQ ID NO: 199526 - DNA, 2962 bp, Artificial Sequence
  derived and/or modified sequence
cgggatgcttggcgctctacctcgccgcccctgagccttcccgtccgcctcgccacgcgcccggacggcctggggttgctgcccgtcagtctcgaaaggtgtttttggggaaaaaaatcacaatctggacgtgagaaaggacatgaggagactaaagacctgggattttgtcaatcagaatgaaaccaatgttgaaagacttttcaaatctattgttggtggtactctgtgactatgttcttggagaagctgaatatcttctcttgagagagccaggccatgtagcactaagcaacgacacagtgtatgtggatttccagtattttgatggtgctaatgggacactgaggaatgtatctgtcctgctgttggaggccaacaccaatcagactgtaactaccaagtacctcctgaccaaccagtcccagggaacactaaagtttgagtgcttctatttcaaggaggctggtgactactggttcacaatgactccagaagcaacagacaacagcactccattcccctggtgggagaaaagtgcctttctgaaggtggaatggcctgtctttcacgttgacttgaataggagtgccaaggcagcagaaggcaccttccaagtgggcctatttaccagtcaaccactgtgcccgtttcctgtggacaagcccaacatcgtagtggatgtcatcttcaccaacagtcttcctgaggcaagaagaaattcaagacagccgctggaaataagaaccagcaaaaggacagaacttgctcaaggtcagtgggttgagtttggctgtgcacccttggggccagaagcctatgtcaccgtggtgctgaagctgcttgggcgagactcagtcattacctccacaggacccattgacctggcccagaaatttggatacaaactggtgatggtgccagaactcacatgtgagtccggggtagaggtgacagtgctgcctccaccatgcaccttcgtccaaggagtggtcactgtcttcaaggaggcccccagataccctgggaagaggaccattcacttggctgaaaacagcctgcccctgggagagaggaggacaatttttaactgtactttgtttgacatggggaagaataagtactgctttgactttggcatttcaagcagaagccatttttctgcaaaggaggagtgcatgctaattcagagaaatacagaaacttggggactgtggcagccatggagccagtgtagtgccacatgtggggatggtgtcagagagcgtcgccgagtgtgtctcacttccttcccctccagtcctgtctgccctggaatgtccttggaggcctccctgtgttccctggaggagtgtgctgctttccagccatccagcccatctcctcttcagccccagggtccagtgaagtccaacaacatcgtgactgtcactggtatatccttgtgcttgttcatcatcattgccactgtgctcatcacgctgtggaggaggttcggccggccagccaagtgcagcacacctgctcgacacaactccatccactcccccagcttccggaagaactcggacgaggagaatatctgcgagctgagcgagcagcgcgggagcttctcggatgggggagacgggcccacggggagtccaggggacacaggcatccctctgacctacaggcggagcgggccggtacctcccgaggatgatgcctctggcagcgagagcttccagtccaacgcccagaagataatcccacctctgttcagctaccgccttgcccagcagcagttaaaggagatgaaaaagaaaggtctgacggaaactaccaaagtgtatcacgtgtctcagagtcccctgacagacactgccattgatgcggcccccagcgctcccttagatttggaaagcccggaagaagctgcagcaaacaagttccggatcaaatccccatttccggagcagcccgcggtcagtgccggggaaaggcctccctccaggctggatctaaatgtgactcaggccagttgtgccataagccccagccagactctgatccgcaagtcacaggcaaggcacgtgggcagcagagggggcccgtccgaaaggagccatgccaggaacgcccatttcaggaggacagcgagtttccatgaagccaggcaggcccggccgttccgagagaggagcatgtccactctgactccacggcaggcccctgcctacagctctaggacgcggacctgcgagcaggcagaggacagatttaggcctcagagtcgaggtgcccacctgtttcctgaaaaactggagcatttccaagaggcaagtggaacccgtggtccattaaaccctctccctaaatcctacactttggggcagcccttgaggaaaccagaccttggggatcaccaggcaggattagtggccggaattgagagaacagagccccacagagctcgtcggggaccgtcccccagtcacaagagtgtctcaaggaagcagtcttctcccatatcccccaaagataactaccagagggtcagttctctgagcccttctcagtgtagaaaagacaagtgtcaaagcttccccactcaccctgagtttgccttctatgacaatacgtcgtttggcctcactgaggctgagcagaggatgctggacctcccaggatattttgggtcaaatgaagaggatgaaaccacaagtacacttagcgtggagaagctggtgatctagactgagaatcagcctgagctttacacagctggggtctgctactcgcgttttgtagacttttgtgtaactatttgtaccgtaggacagaatgtgaggaggaagtaacacacagaggaggatgtgtgtgtatgcatgtgtttgaattcacaaggaagaaattatttatcttgagctttttcctttgttattcaatttctattgatttattagtaataacaatgata

SEQ ID NO: 199527 - DNA, 2559 bp, Artificial Sequence
  derived and/or modified sequence
atgaagcccatgctgaaggacttcagcaacctgctgctggtggtgctgtgcgactacgtgctgggcgaggccgagtacctgctgctgagagagcccggccacgtggccctgagcaacgacaccgtgtacgtggacttccagtacttcgacggcgccaacggcaccctgagaaacgtgagcgtgctgctgctggaggccaacaccaaccagaccgtgaccaccaagtacctgctgaccaaccagagccagggcaccctgaagttcgagtgcttctacttcaaggaggccggcgactactggttcaccatgacccccgaggccaccgacaacagcacccccttcccctggtgggagaagagcgccttcctgaaggtggagtggcccgtgttccacgtggacctgaacagaagcgccaaggccgccgagggcaccttccaggtgggcctgttcaccagccagcccctgtgccccttccccgtggacaagcccaacatcgtggtggacgtgatcttcaccaacagcctgcccgaggccagaagaaacagcagacagcccctggagatcagaaccagcaagagaaccgagctggcccagggccagtgggtggagttcggctgcgcccccctgggccccgaggcctacgtgaccgtggtgctgaagctgctgggcagagacagcgtgatcaccagcaccggccccatcgacctggcccagaagttcggctacaagctggtgatggtgcccgagctgacctgcgagagcggcgtggaggtgaccgtgctgccccccccctgcaccttcgtgcagggcgtggtgaccgtgttcaaggaggcccccagataccccggcaagagaaccatccacctggccgagaacagcctgcccctgggcgagagaagaaccatcttcaactgcaccctgttcgacatgggcaagaacaagtactgcttcgacttcggcatcagcagcagaagccacttcagcgccaaggaggagtgcatgctgatccagagaaacaccgagacctggggcctgtggcagccctggagccagtgcagcgccacctgcggcgacggcgtgagagagagaagaagagtgtgcctgaccagcttccccagcagccccgtgtgccccggcatgagcctggaggccagcctgtgcagcctggaggagtgcgccgccttccagcccagcagccccagccccctgcagccccagggccccgtgaagagcaacaacatcgtgaccgtgaccggcatcagcctgtgcctgttcatcatcatcgccaccgtgctgatcaccctgtggagaagattcggcagacccgccaagtgcagcacccccgccagacacaacagcatccacagccccagcttcagaaagaacagcgacgaggagaacatctgcgagctgagcgagcagagaggcagcttcagcgacggcggcgacggccccaccggcagccccggcgacaccggcatccccctgacctacagaagaagcggccccgtgccccccgaggacgacgccagcggcagcgagagcttccagagcaacgcccagaagatcatcccccccctgttcagctacagactggcccagcagcagctgaaggagatgaagaagaagggcctgaccgagaccaccaaggtgtaccacgtgagccagagccccctgaccgacaccgccatcgacgccgcccccagcgcccccctggacctggagagccccgaggaggccgccgccaacaagttcagaatcaagagccccttccccgagcagcccgccgtgagcgccggcgagagaccccccagcagactggacctgaacgtgacccaggccagctgcgccatcagccccagccagaccctgatcagaaagagccaggccagacacgtgggcagcagaggcggccccagcgagagaagccacgccagaaacgcccacttcagaagaaccgccagcttccacgaggccagacaggccagacccttcagagagagaagcatgagcaccctgacccccagacaggcccccgcctacagcagcagaaccagaacctgcgagcaggccgaggacagattcagaccccagagcagaggcgcccacctgttccccgagaagctggagcacttccaggaggccagcggcaccagaggccccctgaaccccctgcccaagagctacaccctgggccagcccctgagaaagcccgacctgggcgaccaccaggccggcctggtggccggcatcgagagaaccgagccccacagagccagaagaggccccagccccagccacaagagcgtgagcagaaagcagagcagccccatcagccccaaggacaactaccagagagtgagcagcctgagccccagccagtgcagaaaggacaagtgccagagcttccccacccaccccgagttcgccttctacgacaacaccagcttcggcctgaccgaggccgagcagagaatgctggacctgcccggctacttcggcagcaacgaggaggacgagaccaccagcaccctgagcgtggagaagctggtgatctag

SEQ ID NO: 199528 - DNA, 1287 bp, Artificial Sequence
  derived and/or modified sequence
atgaagcccatgctgaaggacttcagcaacctgctgctggtggtgctgtgcgactacgtgctgggcgaggccgagtacctgctgctgagagagcccggccacgtggccctgagcaacgacaccgtgtacgtggacttccagtacttcgacggcgccaacggcaccctgagaaacgtgagcgtgctgctgctggaggccaacaccaaccagaccgtgaccaccaagtacctgctgaccaaccagagccagggcaccctgaagttcgagtgcttctacttcaaggaggccggcgactactggttcaccatgacccccgaggccaccgacaacagcacccccttcccctggtgggagaagagcgccttcctgaaggtggagtggcccgtgttccacgtggacctgaacagaagcgccaaggccgccgagggcaccttccaggtgggcctgttcaccagccagcccctgtgccccttccccgtggacaagcccaacatcgtggtggacgtgatcttcaccaacagcctgcccgaggccagaagaaacagcagacagcccctggagatcagaaccagcaagagaaccgagctggcccagggccagtgggtggagttcggctgcgcccccctgggccccgaggcctacgtgaccgtggtgctgaagctgctgggcagagacagcgtgatcaccagcaccggccccatcgacctggcccagaagttcggctacaagctggtgatggtgcccgagctgacctgcgagagcggcgtggaggtgaccgtgctgccccccccctgcaccttcgtgcagggcgtggtgaccgtgttcaaggaggcccccagataccccggcaagagaaccatccacctggccgagaacagcctgcccctgggcgagagaagaaccatcttcaactgcaccctgttcgacatgggcaagaacaagtactgcttcgacttcggcatcagcagcagaagccacttcagcgccaaggaggagtgcatgctgatccagagaaacaccgagacctggggcctgtggcagccctggagccagtgcagcgccacctgcggcgacggcgtgagagagagaagaagagtgtgcctgaccagcttccccagcagccccgtgtgccccggcatgagcctggaggccagcctgtgcagcctggaggagtgcgccggcagattcagaagctgctgccccggctggagcgccatggtgagaagcagactgaccaacagcgccagcagagtgcaggccatcctgctgccccagcccctggcctag

SEQ ID NO: 199529 - DNA, 1422 bp, Artificial Sequence
  derived and/or modified sequence
atgagcctggaggccagcctgtgcagcctggaggagtgcgccgccttccagcccagcagccccagccccctgcagccccagggccccgtgaagagcaacaacatcgtgaccgtgaccggcatcagcctgtgcctgttcatcatcatcgccaccgtgctgatcaccctgtggagaagattcggcagacccgccaagtgcagcacccccgccagacacaacagcatccacagccccagcttcagaaagaacagcgacgaggagaacatctgcgagctgagcgagcagagaggcagcttcagcgacggcggcgacggccccaccggcagccccggcgacaccggcatccccctgacctacagaagaagcggccccgtgccccccgaggacgacgccagcggcagcgagagcttccagagcaacgcccagaagatcatcccccccctgttcagctacagactggcccagcagcagctgaaggagatgaagaagaagggcctgaccgagaccaccaaggtgtaccacgtgagccagagccccctgaccgacaccgccatcgacgccgcccccagcgcccccctggacctggagagccccgaggaggccgccgccaacaagttcagaatcaagagccccttccccgagcagcccgccgtgagcgccggcgagagaccccccagcagactggacctgaacgtgacccaggccagctgcgccatcagccccagccagaccctgatcagaaagagccaggccagacacgtgggcagcagaggcggccccagcgagagaagccacgccagaaacgcccacttcagaagaaccgccagcttccacgaggccagacaggccagacccttcagagagagaagcatgagcaccctgacccccagacaggcccccgcctacagcagcagaaccagaacctgcgagcaggccgaggacagattcagaccccagagcagaggcgcccacctgttccccgagaagctggagcacttccaggaggccagcggcaccagaggccccctgaaccccctgcccaagagctacaccctgggccagcccctgagaaagcccgacctgggcgaccaccaggccggcctggtggccggcatcgagagaaccgagccccacagagccagaagaggccccagccccagccacaagagcgtgagcagaaagcagagcagccccatcagccccaaggacaactaccagagagtgagcagcctgagccccagccagtgcagaaaggacaagtgccagagcttccccacccaccccgagttcgccttctacgacaacaccagcttcggcctgaccgaggccgagcagagaatgctggacctgcccggctacttcggcagcaacgaggaggacgagaccaccagcaccctgagcgtggagaagctggtgatctag

SEQ ID NO: 199530 - DNA, 2559 bp, Artificial Sequence
  derived and/or modified sequence
atgaaaccaatgttaaaggatttttccaatctactgctggtggtactatgtgactatgtcctcggcgaagccgaatatctgcttctgcgtgaaccaggccatgtggctctctcaaacgatactgtatacgtggactttcagtacttcgacggtgccaacggcaccctgaggaatgtgtccgttctcctgttggaagctaataccaaccagaccgtcactacaaagtacctgttgacaaatcagagccaagggactttaaagtttgaatgtttctactttaaagaggcaggggattactggttcacaatgacacctgaggccacagacaactcaacgcccttcccctggtgggagaaatcagctttcctaaaggtggagtggcctgtattccatgtggatctgaacagaagtgctaaagctgcagagggtaccttccaggtgggactgttcacatctcagccattatgcccgtttccagttgacaaaccaaacattgtcgtggacgtcatatttaccaactcactgcccgaagcacggcgtaacagcaggcaaccactggagatccggactagtaaacggactgagctggcacagggccagtgggtggaatttggctgtgcaccactgggcccagaggcttacgtgactgtcgtgttgaagctgctgggacgagactcagtgattacttccacaggccctatcgatctggcacagaagtttggctataaattggtcatggtgcctgaactgacttgcgagtccggtgtcgaggttactgtactgccacccccatgcacgttcgtgcagggagtggtgacagttttcaaagaagccccaagatacccgggaaagcggacaattcacttggccgaaaactctttgcccctgggggagcgacgcactatttttaattgcacattatttgacatgggcaaaaataagtattgctttgatttcggaatctcttctcggtcacatttttctgccaaggaggagtgcatgctgatccagagaaacaccgaaacctggggcctatggcagccatggtcccagtgttctgcgacatgcggcgatggcgtgagggagcggcgaagagtttgtcttacttcattcccgtcctcccctgtttgccctgggatgtctcttgaagcatcgctgtgttccctagaagagtgcgccgccttccagccatcatcacccagccctctccagccacagggtcctgtgaaaagtaacaatattgtaacggtgactgggatcagcttgtgccttttcattattatagcgactgtcctgataacactgtggcggaggtttggcagaccagccaagtgcagtacccccgcaagacataattccatacactcgccctccttccgaaagaatagcgacgaggagaacatctgcgagttgagcgaacagaggggctctttcagtgatgggggagatgggcctacagggtccccaggcgataccggaatccccctcacatatcgaaggtccgggccagtgccgccggaagatgacgcatcgggctctgaaagtttccaaagcaacgcgcagaagatcatacctcctctcttcagttacaggctggctcagcagcaactcaaggagatgaagaaaaaaggtctcacagagaccacaaaagtctaccacgtttctcagtcgccactgacagatactgctatagacgccgctcctagcgcccccctcgacctggagtcccctgaagaggcagccgcaaacaagttcagaattaaatcacctttccccgagcagcctgctgtgagcgctggagagcggcccccttcacgcctcgacctgaatgtcacccaagccagctgcgccatttcgccctcacagaccttaatccgaaagtctcaggccagacacgtgggatcccgcggaggcccatctgagagatcgcacgcccggaacgcacacttccgtaggactgcctcctttcatgaggctcggcaggcccggcctttccgggaacggtccatgagtaccctgactcccagacaggctcctgcctactcatctcgaactcggacctgtgaacaagcggaagatcggtttcgaccccagtccaggggtgcacacctgttccccgaaaaactcgaacatttccaagaggcctccggtacccggggaccattgaaccccctcccaaaatcatacactctcgggcaacccctgcggaagcccgacctaggggatcaccaggcaggcttagttgcgggcattgagcgaactgagccccatcgcgccaggcgcggcccaagcccaagtcataaaagcgtttctcggaaacagtcatcaccaatcagcccaaaagacaattatcagcgcgtatcatcactgtctccttcacaatgtagaaaggataaatgtcaatcttttcccacgcaccccgagttcgcattctatgacaacactagctttgggctgacagaggctgaacagaggatgttggacctgccgggctactttggatccaatgaagaggatgagaccacatccactctttctgttgagaagctggtaatctag

SEQ ID NO: 199531 - DNA, 1287 bp, Artificial Sequence
  derived and/or modified sequence
atgaaacctatgctgaaagacttctctaacctgttgttggtcgttctttgtgactatgtgctcggtgaggcggagtatctactattacgggagcccggccatgtggctctgagcaatgacacggtctacgtggattttcagtatttcgatggcgcaaatggcactctgagaaacgtgtccgtgctcctactagaagcaaataccaatcagacggttaccacaaagtatttgctcacaaatcagagccagggcactttgaagttcgaatgtttctacttcaaggaagctggtgactattggttcactatgaccccagaggccactgataactccacaccatttccttggtgggagaagagtgccttcctgaaagtggagtggcccgtgttccacgtagacttaaatagaagcgctaaagcagcggagggcacttttcaggttggactgtttacgtctcaaccgctgtgtccttttcctgtagataagccaaacatagtggtggatgttatcttcacaaatagcttaccagaggctcggcgcaatagcaggcagcccctggagatcagaaccagcaagaggaccgaactggcgcaaggacagtgggtcgaatttggatgtgccccactggggcctgaagcttatgtgacagtcgtactgaaacttttgggtcgagactccgtgattacctccactggcccgatcgacctggcgcaaaagtttgggtacaagcttgtaatggtgccagagttgacttgtgaatcaggcgtggaggtcaccgtgctcccacccccctgcacgttcgtacagggtgtggtgacagtgttcaaggaggcgccacgctatcccggcaaacggaccattcatctcgcagagaattcgttgcctctgggtgagcgtcgtactatctttaactgcactctctttgatatgggaaaaaacaagtattgctttgacttcggtatctcttcaagaagccactttagcgctaaagaagagtgtatgttgatccaacgcaatacagagacttggggtctgtggcaaccatggtcccaatgttccgctacctgtggtgatggcgtgagggaacggcggagggtatgcttgacatcattccctagctcaccagtatgccctggaatgtccttagaggcctccctgtgctctctcgaggaatgcgctggccggtttcggagctgctgtcccggttggtcagcaatggttcgatccaggctgactaactctgcttcacgggtgcaggccattctgctccctcagccccttgcatag

SEQ ID NO: 199532 - DNA, 1422 bp, Artificial Sequence
  derived and/or modified sequence
atgagcctcgaagccagtctgtgttctcttgaagaatgcgccgcctttcagccgagctcgccttcccctctgcagccccaaggcccggtgaagtctaataatatagtgaccgttactggcattagcctgtgtctgtttattattatcgctactgttctgattaccctgtggcgtaggttcggaagacctgctaagtgtagcacgccggcaagacataattctatccatagcccatccttcagaaaaaattccgacgaggagaacatctgtgagctgagtgaacagagaggaagcttcagcgacggaggggatggccccacaggtagtccgggggataccggtattcctctgacctatcgccgttctggaccagtgcctccagaagatgatgctagtgggtccgaatcttttcagtcaaacgctcagaagattatccccccgctcttttcctacaggctggcacagcagcagctcaaggagatgaaaaaaaaaggcttgaccgagaccacgaaagtgtatcacgtgagtcaatccccgctgactgacacagcgatcgacgcagccccatctgcacccctggatctcgagagccctgaggaagccgcagcgaataagttccggatcaagtctcccttccccgagcagcctgctgtgtcggcaggcgagcgccctcccagcaggctggacctgaacgtgactcaggcctcatgtgctattagcccgtcccaaactctgatcaggaagagtcaggcacggcacgtgggttctcggggtggccctagtgaacggagtcacgcaaggaatgcccatttccggagaactgccagctttcacgaggctagacaggctagaccgttccgggaaaggagtatgtctaccctcacccccagacaagcccctgcgtatagctccagaacccgcacttgtgaacaggctgaggaccggtttaggccacagagcagaggcgcccatctctttcccgaaaaacttgagcacttccaggaagcaagcggcacaaggggcccgctcaatcctctgcccaagagttataccttagggcagcctctccgcaaaccggatctgggagaccaccaggcaggtttggttgcaggcatcgagaggaccgagccgcaccgagcccgccgcggacctagtccaagccacaaaagcgtcagtcgtaaacagagctcacccatctctccaaaggataactaccagcgcgtgagctcactctctccaagccaatgtcggaaggacaaatgccagagtttccctacgcacccagagttcgctttctatgataatactagtttcggtctcaccgaggcagagcaacgtatgctcgacctgccaggatatttcggaagcaatgaagaggatgaaaccacaagtacgctgtcggtggagaagcttgtgatttag

SEQ ID NO: 199533 - DNA, 2559 bp, Artificial Sequence
  derived and/or modified sequence
atgaagcccatgctgaaggacttcagcaacctgctgctggtggtgctgtgtgactatgtgctgggggaggccgagtacctgctgctgcgggagcccggccacgtggccctgagcaatgacacagtgtatgtggacttccagtactttgatggagccaacggcaccctgagaaatgtgtctgtgctgctgctggaggccaacaccaaccagacagtgaccaccaagtacctgctgaccaaccagagccagggcaccctgaagtttgagtgcttctacttcaaggaggccggggactactggttcaccatgaccccagaggccacagacaacagcacccccttcccctggtgggagaagagcgccttcctgaaggtggagtggcctgtgttccacgtggacctgaacagaagtgccaaggctgctgagggcaccttccaggtgggcctcttcaccagccagcccctgtgccccttccctgtggacaagcccaacatcgtggtggatgtgatcttcaccaacagcctgcctgaggcccggaggaacagccggcagcccctggagatccgcaccagcaagaggacagagctggcccagggccagtgggtggagtttggctgtgcccccctgggccctgaggcctacgtgacagtggtgctgaagctgctgggccgggacagcgtcatcaccagcacaggccccatcgacctggcccagaagtttggctacaagctggtgatggtgcctgagctgacctgtgagagcggcgtggaggtgacagtgctgcccccaccctgcacctttgtgcagggcgtggtgacagtgttcaaggaggccccccgctacccaggcaagaggaccatccacctggccgagaacagcctgcccctgggggagaggaggaccatcttcaactgcaccctgtttgacatgggcaagaacaagtactgctttgattttggcatcagcagccgcagccacttcagcgccaaggaggagtgcatgctgatccagaggaacacagagacctggggcctgtggcagccctggagccagtgcagcgccacctgtggagatggagtgcgggagcggcggcgggtgtgcctgaccagcttccccagcagccctgtgtgccccggcatgagcctggaggccagcctgtgcagcctggaggagtgtgccgccttccagcccagcagccccagccccctgcagccccagggccctgtgaagagcaacaacatcgtgacagtgacaggcatcagcctgtgcctcttcatcatcatcgccaccgtgctgatcaccctgtggaggagatttggccggcctgccaagtgcagcaccccagcccggcacaacagcatccacagccccagcttcaggaagaacagtgatgaggagaacatctgtgagctgtctgagcagaggggcagcttcagtgatggaggagatggccccaccggcagccctggggacaccggcatccccctgacctacagaagaagtggccctgtgcccccagaagatgatgccagcggcagcgagagcttccagagcaatgcccagaagatcatccccccactcttctcctaccgcctggcccagcagcagctgaaggagatgaagaagaagggcctgacagagaccaccaaggtgtaccacgtgtcccagagccccctgacagacacagccattgatgctgcccccagcgcccccctggacctggagagccctgaggaggccgccgccaacaagttccgcatcaagagccccttccctgagcagcctgctgtgtctgctggggagaggcctcccagccggctggacctgaatgtgacccaggccagctgtgccatcagccccagccagaccctcatcaggaagagccaggcccggcacgtgggcagcagaggaggccccagcgagaggagccacgccagaaatgcccacttcagaagaacagccagcttccacgaggcccggcaggcccggcccttccgggagaggtccatgagcaccctgaccccccggcaggccccagcctacagcagcaggaccaggacctgtgagcaggccgaggaccgcttccggccccagagcagaggagcccacctgtttcctgagaagctggagcacttccaggaggccagcggcacccggggccccctgaaccccctgcccaagagctacaccctgggccagcccctgaggaagccagacctgggggaccaccaggccggcctggtggccggcattgaaagaacagagccccaccgggcccggcggggccccagccccagccacaagtctgtgtccaggaagcagagcagccccatcagccccaaggacaactaccagagggtgagcagcctgagccccagccagtgcaggaaggacaagtgccagagcttccccacccaccctgagtttgccttctatgacaacaccagctttggcctgacagaggccgagcagaggatgctggacctgcccggctacttcggcagcaatgaggaggatgagaccaccagcaccctgtctgtggagaagctggtgatctag

SEQ ID NO: 199534 - DNA, 1287 bp, Artificial Sequence
  derived and/or modified sequence
atgaagcccatgctgaaggacttcagcaacctgctgctggtggtgctgtgtgactatgtgctgggggaggccgagtacctgctgctgcgggagcccggccacgtggccctgagcaatgacacagtgtatgtggacttccagtactttgatggagccaacggcaccctgagaaatgtgtctgtgctgctgctggaggccaacaccaaccagacagtgaccaccaagtacctgctgaccaaccagagccagggcaccctgaagtttgagtgcttctacttcaaggaggccggggactactggttcaccatgaccccagaggccacagacaacagcacccccttcccctggtgggagaagagcgccttcctgaaggtggagtggcctgtgttccacgtggacctgaacagaagtgccaaggctgctgagggcaccttccaggtgggcctcttcaccagccagcccctgtgccccttccctgtggacaagcccaacatcgtggtggatgtgatcttcaccaacagcctgcctgaggcccggaggaacagccggcagcccctggagatccgcaccagcaagaggacagagctggcccagggccagtgggtggagtttggctgtgcccccctgggccctgaggcctacgtgacagtggtgctgaagctgctgggccgggacagcgtcatcaccagcacaggccccatcgacctggcccagaagtttggctacaagctggtgatggtgcctgagctgacctgtgagagcggcgtggaggtgacagtgctgcccccaccctgcacctttgtgcagggcgtggtgacagtgttcaaggaggccccccgctacccaggcaagaggaccatccacctggccgagaacagcctgcccctgggggagaggaggaccatcttcaactgcaccctgtttgacatgggcaagaacaagtactgctttgattttggcatcagcagccgcagccacttcagcgccaaggaggagtgcatgctgatccagaggaacacagagacctggggcctgtggcagccctggagccagtgcagcgccacctgtggagatggagtgcgggagcggcggcgggtgtgcctgaccagcttccccagcagccctgtgtgccccggcatgagcctggaggccagcctgtgcagcctggaggagtgtgccggccgcttccgcagctgctgccccggctggagcgccatggtgcgcagccggctgaccaacagcgccagccgggtgcaggccatcctgctgccccagcccctggcctag

SEQ ID NO: 199535 - DNA, 1422 bp, Artificial Sequence
  derived and/or modified sequence
atgagcctggaggccagcctgtgcagcctggaggagtgtgccgccttccagcccagcagccccagccccctgcagccccagggccctgtgaagagcaacaacatcgtgacagtgacaggcatcagcctgtgcctcttcatcatcatcgccaccgtgctgatcaccctgtggaggcgcttcggccgcccagccaagtgcagcaccccagcccggcacaacagcatccacagccccagcttcaggaagaacagtgatgaggagaacatctgtgagctgtctgagcagaggggcagcttcagtgatggaggagatggccccaccggcagccctggggacaccggcatccccctgacctaccgccgcagcggccctgtgcccccagaagatgatgccagcggcagcgagagcttccagagcaatgcccagaagatcatccccccactcttctcctaccgcctggcccagcagcagctgaaggagatgaagaagaagggcctgacagagaccaccaaggtgtaccacgtgtcccagagccccctgacagacacagccattgatgctgcccccagcgcccccctggacctggagagccctgaggaggccgccgccaacaagttccgcatcaagagccccttccctgagcagcctgctgtgtctgctggggagcggccccccagccggctggacctgaatgtgacccaggccagctgtgccatcagccccagccagaccctcatcaggaagagccaggcccggcacgtgggcagccggggcggccccagcgagaggagccacgccagaaatgcccacttccggaggacagccagcttccacgaggcccggcaggcccggcccttccgggagaggtccatgagcaccctgaccccccggcaggccccagcctacagcagcaggaccaggacctgtgagcaggctgaagatcgcttccggccccagagcagaggagcccacctgtttcctgagaagctggagcacttccaggaggccagcggcacccggggccccctgaaccccctgcccaagagctacaccctgggccagcccctgaggaagccagacctgggggaccaccaggccggcctggtggccggcatcgagaggacagagccccaccgggcccggcggggccccagccccagccacaagtctgtgtccaggaagcagagcagccccatcagccccaaggacaactaccagagggtgagcagcctgagccccagccagtgcaggaaggacaagtgccagagcttccccacccaccctgagtttgccttctatgacaacaccagctttggcctgacagaagctgagcagaggatgctggacctgcccggctacttcggcagcaatgaagaagatgagaccaccagcaccctgtctgtggagaagctggtgatctag

SEQ ID NO: 199536 - DNA, 2559 bp, Artificial Sequence
  derived and/or modified sequence
atgaagcccatgctgaaggacttcagcaacctgctgctggtggtgttgtgcgactatgtccttggagaggcggagtatttattattgcgggagccaggtcacgtagctctctccaacgacactgtctatgttgactttcagtatttcgatggggcgaatggcactctgcgcaatgtctctgtgctcctgctagaagccaacacaaatcagacagtgaccaccaaatatctgctgacgaatcagtctcagggcactttgaagtttgaatgcttctactttaaggaagcaggggattattggtttaccatgaccccagaggctactgacaatagtactccctttccttggtgggaaaagtctgcttttctcaaagttgagtggcccgtttttcatgttgatcttaaccgatctgccaaggcagccgagggtaccttccaggtgggcttatttactagccagccactgtgtccctttcccgtggacaagcccaatattgtcgtggacgtgatcttcaccaatagcttgcccgaggctaggcggaattcaaggcagcctctggagatccgaacatcgaaacgcacggaacttgctcagggccagtgggtcgaatttgggtgcgcccccctgggccctgaagcttatgtaactgtagtccttaagttactcggccgggactctgtgattacttcaacaggacccatcgacctggcacagaaattcggctacaagctcgtgatggttccagagctaacttgtgagagtggagtggaggtaaccgtactaccacctccatgcacattcgtgcagggagtagtgaccgtgtttaaggaagcaccacggtacccaggcaagcgcaccatccatctcgctgagaattcgctgcctctaggtgagcgaagaaccatctttaactgtacactttttgatatgggaaagaataaatattgtttcgatttcggtatctcttcccggtcccatttcagcgccaaagaggagtgcatgttgatccaacgcaataccgagacgtgggggctgtggcaaccctggtcccaatgttccgctacttgtggagatggggtccgggagcgtcgccgtgtctgtctcacaagtttcccttctagtcctgtctgtcctggcatgagcctcgaagccagtctctgttctcttgaggaatgcgctgcttttcaaccaagctccccatcgcccctgcagccccaagggccagtgaaaagcaataacatcgtgactgtaaccggcatatctctctgccttttcatcatcatcgccacggttctaattaccctgtggaggagatttggccgcccagctaaatgttccaccccggcacgccataactcaattcattcaccctcattccgcaagaatagtgatgaggaaaacatctgcgagctcagtgaacagcgcggatccttcagtgatggcggggacggcccaacagggtctccgggtgacacggggatccctttaacttatcgaaggtccggaccagtcccccctgaggatgacgcctccggttccgagtcctttcagtcaaacgcacagaagatcatcccccccctcttctcttataggcttgcacagcagcagttaaaggaaatgaaaaagaagggcctgacggaaactaccaaagtgtaccatgtgtcacagtcaccgctgactgataccgccatcgacgcagccccatccgcccccctggatttggagagtcccgaagaggctgccgccaataagtttcgcataaaatctccgttcccagagcagccagctgtgtcagccggcgaaaggcccccatcccgcctggacctcaacgtgacccaagcaagctgcgccattagtcccagccagacactcatccggaaatcacaggcacggcatgtgggatctaggggagggccttcagaaaggtcccacgcacgcaatgcccatttcagacggacagcttctttccacgaggccagacaagctcggccattcagagaaagatctatgagcaccctgactccccgtcaggctcccgcttattcatccagaacccgaacatgtgaacaggcggaagatcgctttcggccacagtcgcgtggagctcacctgttcccagaaaaattagagcactttcaagaggcctccggtacacgcgggcctctgaatccactgccaaaatcctatactttgggccagcctctgaggaaaccggacctgggcgaccatcaagcgggactggtggctggaattgaacgtacagagccccaccgcgcccggagaggtcccagcccctcccacaaaagtgtatccaggaagcaatcctcccctatctctcctaaagacaattaccagcgggtatccagcctgtccccttcccagtgcaggaaagataagtgccagagctttcctacacatcccgagttcgcattctatgataatacgagttttggactgacagaggctgaacagcgaatgctggacttacccggctatttcggatccaacgaagaggacgaaactacttctaccctgtcggttgagaagctcgtgatatag

SEQ ID NO: 199537 - DNA, 1829 bp, Artificial Sequence
  derived and/or modified sequence
actagagtagaagtgattgaatgtgaagtgtcaggagattgctcgctcgtccttcgttaaacccctggtccggctgtgtgctgtggatgcgggtgtgtgttgaggggacctgcgtctgccggggccgcaccccctcccgcaggaccttggctggccgcgcgtttcctgcctgtttcctgtccagcagctggcgagctggggaccggcaggaaaggatgcgctgcccagaaggggcgggaaccgaccacgcccggtcccgtgtgccccccgccctcccggcgcccgccctccccacgccgtcgggggcgggccccgcggggctgtgggagccgaacgccgcggggtcagggcgtgcagtctgggacgcgggatgcttggcgctctacctcgccgcccctgagccttcccgtccgcctcgccacgcgcccggacggcctggggttgctgcccgtcagtctcgaaaggtgtttttggggaaaaaaatcacaatctggacgtgagaaaggacatgaggagactaaagacctgggattttgtcaatcagaatgaaaccaatgttgaaagacttttcaaatctattgttggtggtactctgtgactatgttcttggagaagctgaatatcttctcttgagagagccaggccatgtagcactaagcaacgacacagtgtatgtggatttccagtattttgatggtgctaatgggacactgaggaatgtatctgtcctgctgttggaggccaacaccaatcagactgtaactaccaagtacctcctgaccaaccagtcccagggaacactaaagtttgagtgcttctatttcaaggaggctggtgactactggttcacaatgactccagaagcaacagacaacagcactccattcccctggtgggagaaaagtgcctttctgaaggtggaatggcctgtctttcacgttgacttgaataggagtgccaaggcagcagaaggcaccttccaagtgggcctatttaccagtcaaccactgtgcccgtttcctgtggacaagcccaacatcgtagtggatgtcatcttcaccaacagtcttcctgaggcaagaagaaattcaagacagccgctggaaataagaaccagcaaaaggacagaacttgctcaaggtcagtgggttgagtttggctgtgcacccttggggccagaagcctatgtcaccgtggtgctgaagctgcttgggcgagactcagtcattacctccacaggacccattgacctggcccagaaatttggatacaaactggtgatggtgccagaactcacatgtgagtccggggtagaggtgacagtgctgcctccaccatgcaccttcgtccaaggagtggtcactgtcttcaaggaggcccccagataccctgggaagaggaccattcacttggctgaaaacagcctgcccctgggagagaggaggacaatttttaactgtactttgtttgacatggggaagaataagtactgctttgactttggcatttcaagcagaagccatttttctgcaaaggaggagtgcatgctaattcagagaaatacagaaacttggggactgtggcagccatggagccagtgtagtgccacatgtggggatggtgtcagagagcgtcgccgagtgtgtctcacttccttcccctccagtcctgtctgccctggaatgtccttggaggcctccctgtgttccctggaggagtgtgctggtaggtttcgctcttgttgcccaggctggagtgcaatggtgcgatctcggctcacgaactccgcctcccgggttcaagcgattctcctgcctcagcctctggca

SEQ ID NO: 199538 - DNA, 1287 bp, Artificial Sequence
  derived and/or modified sequence
atgaagcccatgctgaaggacttcagcaacctgctgctggtggtgctgtgcgactacgtgctgggtgaagcagagtacttgctgctgagagagcctggccatgtggctctgtctaacgacaccgtgtatgtggatttccaatactttgatggggccaacgggacgctcaggaacgtgagtgtcttgctgctggaggcaaatacaaaccaaacagtgaccactaagtatctgctgacgaaccagtcccagggcacattgaaattcgagtgcttttacttcaaagaagctggtgattattggttcacaatgacaccggaggccacagacaacagtacacctttcccttggtgggagaagagcgcattcttgaaagtagagtggcccgtgtttcacgttgatctaaacagaagcgcaaaggctgctgaaggaaccttccaagtcggtctgttcactagccagcccctgtgccccttccctgtggacaaaccaaatatagttgtcgacgttatcttcaccaactctcttccagaagcgagaaggaatagcagacagccactggagattcgtacttctaagcggactgaactggctcaagggcagtgggtcgagtttggctgtgcgccgttgggtcccgaggcgtacgtgactgtggttttaaagctgttgggacgggattcagtgataacgtccacgggaccgattgatcttgctcagaaattcgggtacaagctagtcatggtaccagagcttacttgcgagtctggggtggaagtcaccgtcctgccaccaccctgcaccttcgtgcaaggggtggtcacagtatttaaagaagcgccaagataccccggcaaaagaaccattcatctagctgagaattccctgcccctgggggagcgacggaccatttttaactgtacactatttgacatgggcaagaacaagtactgcttcgatttcggaatttcttctcggtctcatttttctgccaaggaagagtgcatgctgattcagaggaacacagagacctggggactgtggcagccctggtcccaatgttcagctacctgtggagatggggtccgcgaacggaggagagtttgtcttacttccttcccttcctccccagtctgtccagggatgtccttagaagcatctttgtgttcattagaggaatgcgctggacgctttcggagttgttgcccaggctggtccgccatggtgaggtctaggctgactaattctgcaagtcgcgtccaggccatactgctgccacagcctcttgcttag

SEQ ID NO: 199539 - RNA, 2559 nt, Artificial Sequence
  derived and/or modified sequence
augaagccuauguugaaggauuuuaguaaccuguugcucguggugcugugcgauuacguguugggagaggcggaauaucuccugcugcgcgagccaggucacgucgcucucaguaaugauacuguguauguagacuuucaguacuuugauggcgcaaauggaacgcucagaaaugucagcguccugcuccuugaagccaacacuaaucagaccguuacaacuaaauaccugcucaccaaucagucccagggaacccucaaauucgagugcuuuuauuuuaaggaggccggagacuacugguucaccaugacuccugaggcuacugauaacuccacaccuuuuccauggugggagaagucugcauuccugaagguugaauggccgguuuuccauguggaucucaauaggagcgcuaaggcugccgaagguacauuccaagucggauuauucacuagucaaccccuaugccccuucccuguagacaagcccaacauuguaguagaugugauuuucacuaauucucucccugaggcacgcagaaauucacgucagccuuuagagauccgaacaucuaagcgcacagagcuugcgcagggccagugggucgaguucggaugugcuccucugggccccgaagccuacgugacaguuguuuugaagcuccuuggcagagacagcgugaucaccaguacaggaccgaucgacuuggcucagaaguucggauauaaguuggugauggugccagagcucacaugcgaaagcgggguugaggugacuguuuuacccccaccuugcacguucguucaaggcgucgugacuguuuuuaaggaggcaccaagauacccagggaagagaacuauccaccuggccgagaacucccugccucucggugagcggcgcacaauuuuuaauugcacguuguucgacauggggaaaaacaaauacuguuuugacuuuggcauuagcucaaggagccacuuuuccgcgaaggaggaauguauguuaauucagaggaacaccgagacuuggggccuguggcagccuuggagucagugcagcgccaccugcggcgacggaguaagagagcggagaagggugugucugaccuccuuuccgagcucucccgucugucccggcauguccuuggaggcuagccuuugcagccuggaagaaugcgccgcauuccaacccucgagcccauccccccuccaaccucagggcccagucaaguccaauaauauuguaacuguuacaggaauuagucuuugccuguuuaucaucauagccaccguacucauuacacuguggcgcagguuuggacgccccgcgaagugcaguacccccgcacgacacaacagcauccacuccccaucuuucaggaagaauagugacgaggagaauauaugcgagcucuccgaacagagagggagcuuuucagauggcggcgaugguccuaccggaucucccggggacaccggcaucccgcucaccuauaggagaagcgguccuguuccacccgaagaugacgcaucugguuccgaaucuuuucagucaaaugcccagaagaucaucccaccacuguucuccuacagacuggcccagcagcaguugaaagagaugaagaagaaaggucuaacugagacgaccaagguuuaucacguaucccagucgccuuuaacagauaccgccauugacgcagcuccuagcgccccacucgaccuggagucacccgaggaagcugcagccaauaaguuuagaauaaaaucccccuuucccgagcagcccgcugucucugccggugaaagacccccgucuagacuugauuugaaugugacacaggccuccugugcgauaagccccagccagacccugauccgcaaaucucaggcucgucacgugggcucccgagggggccccagugaacgcucacaugccaggaacgcacauuuucgacgaacagccuccuuccaugaggcuagacaggcaaggccauuuagggagaggucaauguccacacugaccccacgccaggcacccgccuauagcagcagaacuagaacuugugagcaggccgaggauagauucagaccccagucuaggggcgcccaccuuuuucccgagaagcuugagcauuuccaagaggccaguggcacacgugguccucucaauccucugccuaagucauacacucucggccagccacugcgaaaaccagaccucggggaccaccaggcuggccuugucgccggaauugaaaggaccgagccccaucgggcccgcagagguccuucuccgagccauaagagcguauccagaaagcagucgucaccaauuucccccaaagacaacuaucaacgcguguccucccuuuccccaucccagugccgcaaggacaagugccagucuuuuccaacacacccugaguucgcguuuuacgauaauacgucuuuuggguuaacugaggcagaacagcgcaugcucgaucuaccugguuacuucggguccaacgaagaggacgagaccacuucuacucuaaguguugagaagcucguuaucuag

SEQ ID NO: 199540 - RNA, 1287 nt, Artificial Sequence
  derived and/or modified sequence
augaagccgaugcucaaggauuucuccaaccuccugcugguagucuugugcgauuacguccugggagaagcggaauauuuauuguugagagaaccaggacaugucgcacucucgaaugauacagucuauguagauuuucaauacuuugauggcgcuaauggcacacugagaaaugucuccguguuacuuuuggaggcuaauacaaaccaaacugugaccacaaaauaucugcugacgaaccaaucucagggcacucugaaauucgaauguuuuuacuucaaggaagccggugacuacugguucacuaugacacccgaagccacagacaauagcaccccuuuccccuggugggagaaaucugcguuuuugaagguugaguggccagucuuucauguugaccugaauagaagugcaaaggcagccgagggaacguuucaagugggccuguucacuagccagccucuuugcccguuucccguggauaagccuaauauugugguggaugucaucuuuacgaauuccuuacccgaggcccgcagaaauucucgacaaccgcuggagauacguacaagcaaacgcaccgagcucgcacaggggcaguggguggaauucggcugcgccccacugggaccggaagcuuaugugacaguggugcugaagcugcugggucgcgacucugugauaacuucaaccggcccgaucgaucucgcucagaaguuugguuauaaacuuguuauggucccagaacuuacaugcgaaucagggguggaagucaccguccuccccccgcccuguaccuuuguccagggcguugugaccguuuuuaaagaagcaccgagauaccccggaaaaagaaccauccaccuggcagaaaacagccuacccuugggagagagacgaaccauuuuuaauuguacucuguuugauauggggaaaaauaaauacuguuuugacuucggcaucagcagccguagucacuuuagugccaaagaagaauguauguugauacagagaaauacagagacauggggcuuauggcagccuuggucucagugcagcgccacguguggcgauggugugcgagagcgaagacgggucugucuuacuucuuuccccucuagucccguguguccaggaaugagucuagaggccaguuugugcucucuugaggagugugcuggcagauucagaucgugcuguccuggauggucagcuauggugcgcagucgacucacgaacuccgccuccagggugcaagcuauucuucugccucagccucuggcuuag

SEQ ID NO: 199541 - RNA, 1422 nt, Artificial Sequence
  derived and/or modified sequence
augucucuggaggcuucucuguguucacuggaggaaugugcugcuuuucagcccuccucuccuuccccucuucagccacaggggccagugaagucgaacaauaucguaacuguuacuggcaucucgcuuugucuuuucaucauaaucgcgacgguucugauuacucuauggcggagguuuggacggccugcuaagugcuccacgccagcccgucauaacuccauccauucuccuagcuucagaaagaacagcgacgaagagaauaucugugaacugagcgagcagcgggguaguuucucugacggcggugaugggccuaccggaucaccgggcgacaccggaaucccuuugaccuaccgcagguccggcccugugcccccugaggacgacgcgucuggguccgaaagcuuucaguccaaugcacagaagauaaucccuccccucuucucauaccggcuggcacaacagcaauugaaagaaaugaaaaagaaaggacugaccgaaacuacaaagguuuaccaugugagccaguccccccuuacagauaccgccaucgaugcagcuccgagcgccccacuagaucuggaaaguccggaagaagcugccgccaauaaauuuagaaucaaaagucccuuucccgaacagcccgcaguguccgcuggcgaacggccccccucccgucuggaucucaaugucacgcaagcauccugcgcuauuuccccaagucaaacgcuaauccguaaaucucaggcccgccauguuggaucccgggggggucccuccgaacguagucaugcucggaacgcccacuuucgccgaacagcauccuuccaugaagcuagacaggcccgcccauuuagagagagaagcaugagcacccuuacaccucgucaagcaccugcauauagcucccggacuagaacuugugagcaggcagaagaccgguuuaggccucagucucgcggcgcgcaccuguuuccugagaagcuggagcacuuucaagaggccaguggcacuagggggccccucaacccgcugccgaaguccuacaccuugggccagccacugcgaaagccggaccuuggagaucaucaagcggggcucguggcugggauugagaggaccgaaccccaccgcgcucgccgaggaccuucuccuucccauaagucaguaucaagaaagcaaaguagcccaauuucccccaaggacaauuaucagcgcgugagcucuuugaguccaucacagugucgcaaggacaagugucaaucguuucccacacauccggaauuugcguucuaugauaauacuuccuuuggccuaacggaagccgagcagcggaugcuggaucuuccuggcuauuuugggucuaacgaagaagaugagaccaccucgacucucucugucgaaaaauuggugaucuag

SEQ ID NO: 199542 - RNA, 2559 nt, Artificial Sequence
  derived and/or modified sequence
augaagccaaugcuuaaagacuucucuaaccucuugcugguuguccucugugacuacguucucggggaagcugaguauuuacuccugcgggaacccggacacguugcucuuucaaaugauacaguguaugucgacuuccaauacuucgauggagcgaacggaacguugaggaauguuagcguucuucugcuugaggcgaacaccaaccagacggucaccacuaaauaccugcugacaaaccaaagccagggaacacugaaguucgaauguuuuuacuuuaaggaagccggagacuauugguuuacaaugaccccugaagcaacagacaacucaacgcccuuuccauggugggagaagagugcuuuucucaaaguggaguggccuguuuuucacguagaucucaauagaagugcaaaagcagcugaagguacuuuucaggugggacucuuuaccucucagccauugugcccauucccuguagauaagcccaauauuguagucgaugugaucuuuacgaauagccuuccggaagccagacguaauucucgccagccauuggaaauuaggaccagcaagaggaccgaacucgcacagggccaauggguggaauucgguugugccccccugggaccagaagccuacgucaccgugguucuaaaacuccuaggccgggauucuguuauaacguccaccgguccaauugaucuugcucagaaauuugguuauaaacuggugauggugcccgaacuuacaugugagagcggaguugaagucaccgugcugccaccaccaugcacuuuuguucagggagugguaacaguguuuaaagaggcuccaagauauccagguaaaagaacuauccacuuagcugagaauucgcuaccacucggagagagaaggacuaucuuuaauugcacccuuuuugauauggguaagaacaaguauuguuuugauuuuggcauuucaagcaggagccauuuuagcgcaaaagaagaauguaugcugauccaacgaaauaccgaaaccuggggucuguggcagcccuggucucagugcuccgcaaccugcggugacgggguacgugagcggaggcgagugugucugaccaguuucccuuccuccccugucuguccaggaaugucucuggaagccucuuuauguucacuagaggaaugugccgccuuucagccauccucuccaagcccucugcaaccacaaggacccgugaagagcaacaacauagucaccgugaccggcaucucacuuugccuguucauuauuaucgccacuguucucaucacacuguggcgacguuucggccgccccgccaaauguagcacaccugcucgacacaauuccauccauuccccuucuuucagaaagaauagugaugaagaaaauauuugcgaacuguccgaacaacguggcuccuucagugacgggggugacggcccaacaggauccccaggcgacaccggaaucccacugaccuaucgcagaagcgguccuguuccacccgaagaugacgcaucugguuccgaaucuuuucagucaaaugcccagaagaucaucccaccacuguucuccuacagacuggcccagcagcaguugaaagagaugaagaagaaaggucuaacugagacgaccaagguuuaucacguaucccagucgccuuuaacagauaccgccauugacgcagcuccuagcgccccacucgaccuggagucacccgaggaagcugcagccaauaaguuuagaauaaaaucccccuuucccgagcagcccgcugucucugccggugaacgccccccuucaaggcucgaucuuaaugugacgcaggcaagcugcgcaaucucuccuucucaaacccucaucagaaagucucaagccagacaugucggaagccgcggcggaccauccgagaggagccacgccagaaacgcccacuuuagaagaacagcauccuuucaugaggcgagacaagcacgacccuucagagaaagaucaauguccacucuuaccccucggcaagcgcccgcuuacagcucucggacuaggacuugcgagcaggcugaggacagguuccguccacagucucgcggcgcucaccuuuucccugagaaacucgagcacuuccaagaagcuucaggcacccguggcccgcucaauccguugcccaaauccuacacccugggccaaccccugaggaagccugaucugggagaucaccaagccggccugguugccggaauugagcgcaccgagccucaccgcgcaagacguggccccucacccagucacaaguccguuucccggaagcaauccagcccaauuagcccuaaagacaauuaucaaagagucuccucccucucaccuagucaguguagaaaagacaaaugccagagcuuuccuacacaccccgaguuugccuuuuaugauaacaccaguuucggccugacugaagccgaacaaaggaugcuugaccugccuggcuauuuuggcuccaaugaagaagacgagacaacauccacacucucuguagagaaguuggugauuuag

SEQ ID NO: 199543 - RNA, 1287 nt, Artificial Sequence
  derived and/or modified sequence
augaagccuaugcuaaaagacuuuuccaaccuccuauuggucgugcugugcgauuauguucucggcgaagcagaauaccuuuuacuuagagaaccgggacaugucgccuugucuaaugacaccguuuauguggauuuucaguacuucgacggggcaaauggcacacugcggaaugugucgguucuacuccuggaagcaaacacuaaucagacuguaacaaccaaguacuugcuuacaaaccagagucaggguacguuaaaauucgaauguuuuuacuucaaagaagcuggagauuauugguucacuaugacacccgaagccacagacaauagcaccccuuuccccuggugggagaaaucugcguuuuugaagguugaguggccagucuuucauguugaccugaauagaagugcaaaggcagccgagggaacguuucaagugggccuguucacuagccagccucuuugcccguuucccguggauaagccuaauauugugguggaugucaucuuuacgaauuccuuacccgaggcccgcagaaauucucgacaaccgcuggagauacguacaagcaaacgcaccgagcucgcacaggggcaguggguggaauucggcugugccccauuaggaccagaggccuacgugacuguaguguugaagcuucugggacgugacaguguaaucacaucuaccggcccaaucgaucuagcccagaaauucgguuacaagcucgugaugguaccagaauugaccugcgaaucuggagucgaaguaacagugcucccccccccguguaccuuuguucaaggcguggugaccgucuucaaggaagccccuagauacccaggcaaaaggacaauccaccuugcggagaacucccugccacugggcgagcggcggaccauauuuaauuguacacuguucgauaugggaaaaaacaaguauugcuuugauuucgggauuucaucccggucgcacuucuccgcaaaagaggaauguaugcuuauucagaggaauacagaaacauggggucuuuggcagcccuggagucagugcuccgcaacauguggagauggagugagagaacgacgucgcguuugucugacuagcuuuccuuccuccccuguaugcccugguaugagucuggaagccucccuguguagccucgaagagugcgcaggacguuucaggagcuguugcccuggcuggucagcuaugguaagguccagacugacuaacuccgccucuagaguucaagcuauucuuuugccccaaccgcuugcauag

SEQ ID NO: 199544 - RNA, 1422 nt, Artificial Sequence
  derived and/or modified sequence
auguccuuggaggcuagucuauguucauuagaggaaugugccgcauuucagccaaguagcccauccccccugcagccucaagguccagugaagucuaauaauaucgucacuguuaccggcaucucucucugccuguuuauaauuauagccaccguccugaucacucucuggagaagguucggacgcccagcuaaguguuccacaccagccaggcauaauaguauacacaguccuucauucagaaaaaauucagacgaagagaauauuugugaauugucugaacaacguggcuccuuuuccgauggcggcgaugguccuaccggaagcccaggcgacacaggcauaccacuuaccuaucguagaucagguccagucccuccggaagaugaugcaagcggcucugagaguuuccagucaaacgcccagaaaauuauccccccauuauuuagcuaccgccuugcucagcagcaguugaaggaaaugaagaaaaagggacuuacagagacgaccaaaguuuaccacgugagucaguccccacuuacggacacugcuauagacgcagcgcccagcgcaccccuugacuuggaaucuccugaagaagcugccgccaauaaauuuagaaucaaaagucccuuucccgaacagcccgcaguguccgcuggcgaacggccccccucccgucuggaucucaaugucacgcaagcauccugcgcuauuuccccaagucaaacgcuaauccguaaaucucaggcccgccauguuggaucccgggggggucccuccgaacguagucaugcucggaacgcccacuuucgccgaacagcauccuuccaugaagcuagacaggcccgcccauuuagagagagaagcaugagcacccuuacaccucgucaagcaccugcauacucaucaagaacacgaacuugcgaacaggccgaagaucgcuuucggccacagucacggggggcucaccuguuuccugagaaauuggagcauuuccaagaggccuccgggacgcgcggaccccugaauccacucccaaaauccuauacacucggccagccucugaggaaacccgaccucggcgaucaucaggcaggucucguugccggaauagagagaacugaaccgcaucgcgcacgcagaggacccucuccaagccacaagucagugucucguaagcaaaguagccccauuagccccaaagauaauuaccagagagugaguucccucagcccuucucagugucguaaggacaagugucagucuuuccccacacaccccgaauuugcuuucuaugacaauacaucuuucggacugaccgaagcagaacaaagaaugcuugauuuacccggauauuuuggaucaaaugaagaggaugagacaacuaguacccuguccguggaaaaacuggucauuuag

SEQ ID NO: 199545 - protein, 651 aa, Artificial Sequence
  derived and/or modified sequence
MMVRWALLCEFWGDIAKEFYWKTPCPGPFLRYNFDVTKGKIFIEWMKGATTNICYNVLDRNVHEKKLGDKVAFYWEGNEPGETTQITYHQLLVQVCQFSNVLRKQGIQKGDRVAIYMPMIPELVVAMLACARIGALHSIVFAGFSSESLCERILDSSCSLLITTDAFYRGEKLVNLKELADEALQKCQEKGFPVRCCIVVKHLGRAELGMGDSTSQSPPIKRSCPDVQISWNQGIDLWWHELMQEAGDECEPEWCDAEDPLFILYTSGSTGKPKGVVHTVGGYMLYVATTFKYVFDFHAEDVFWCTADIGWITGHSYVTYGPLANGATSVLFEGIPTYPDVNRLWSIVDKYKVTKFYTAPTAIRLLMKFGDEPVTKHSRASLQVLGTVGEPINPEAWLWYHRVVGAQRCPIVDTFWQTETGGHMLTPLPGATPMKPGSATFPFFGVAPAILNESGEELEGEAEGYLVFKQPWPGIMRTVYGNHERFETTYFKKFPGYYVTGDGCQRDQDGYYWITGRIDDMLNVSGHLLSTAEVESALVEHEAVAEAAVVGHPHPVKGECLYCFVTLCDGHTFSPKLTEELKKQIREKIGPIATPDYIQNAPGLPKTRSGKIMRRVLRKIAQNDHDLGDMSTVADPSVISHLFSHRCLTIQ

SEQ ID NO: 199546 - protein, 701 aa, Artificial Sequence [sequence omitted]

SEQ ID NO: 199547 - protein, 699 aa, Artificial Sequence
  derived and/or modified sequence
MGLPEERVRSGSGSRGQEEAGAGGRARSWSPPPEVSRSAHVPSLQRYRELHRRSVEEPREFWGDIAKEFYWKTPCPGPFLRYNFDVTKGKIFIEWMKGATTNICYNVLDRNVHEKKLGDKVAFYWEGNEPGETTQITYHQLLVQVCQFSNVLRKQGIQKGDRVAIYMPMIPELVVAMLACARIGALHSIVFAGFSSESLCERILDSSCSLLITTDAFYRGEKLVNLKELADEALQKCQEKGFPVRCCIVVKHLGRAELGMGDSTSQSPPIKRSCPDVQISWNQGIDLWWHELMQEAGDECEPEWCDAEHSSSCTPVAPQANPRVWFTQLGATCYVATTFKYVFDFHAEDVFWCTADIGWITGHSYVTYGPLANGATSVLFEGIPTYPDVNRLWSIVDKYKVTKFYTAPTAIRLLMKFGDEPVTKHSRASLQVLGTVGEPINPEAWLWYHRVVGAQRCPIVDTFWQTETGGHMLTPLPGATPMKPGSATFPFFGVAPAILNESGEELEGEAEGYLVFKQPWPGIMRTVYGNHERFETTYFKKFPGYYVTGDGCQRDQDGYYWITGRIDDMLNVSGHLLSTAEVESALVEHEAVAEAAVVGHPHPVKGECLYCFVTLCDGHTFSPKLTEELKKQIREKIGPIATPDYIQNAPGLPKTRSGKIMRRVLRKIAQNDHDLGDMSTVADPSVISHLFSHRCLTIQ

SEQ ID NO: 199548 - DNA, 2106 bp, Artificial Sequence
  derived and/or modified sequence
atgggcctccccgaggaacgcgtgagaagtggatctgggagtcgcggtcaggaggaagcgggcgccggcgggagggctagaagctggtccccccctcctgaggtgtctagatctgcacacgttccttccctgcagagatacagggagctgcaccgcaggagtgttgaagagcctagagagttttggggcgacatcgctaaagagttttactggaagactccctgtcccggccccttcctgcgctataattttgacgtaacaaaagggaagatatttattgaatggatgaagggagccacaacaaatatatgctataacgtgcttgataggaatgtgcatgaaaagaaactgggcgataaggtcgccttttactgggaaggcaacgagcctggggaaaccacacagataacttaccaccagctactggtgcaagtttgtcagttttccaatgtgctacgcaaacaaggcatccagaaaggcgacagggtggccatatatatgccgatgatcccagaattggtcgtggccatgttggcatgtgcgagaatcggggcccttcacagtattgtctttgccggtttctccagcgaaagcctctgtgagagaattctggattctagttgcagcctgctcataacgactgatgccttctaccgtggagagaaactggtgaacttgaaggaattggccgatgaggcattgcaaaagtgccaagagaaggggtttcctgtgcgctgctgcattgtcgtgaaacatctgggccgagccgaactgggcatgggggactccacctcccagtcacccccaatcaaaaggagctgccccgatgtacagatctcatggaaccaaggaatcgatctgtggtggcatgagctgatgcaggaggcaggcgatgagtgcgaacctgagtggtgcgatgccgaggaccccctgtttatattgtacacgtctggttctaccggcaagccaaaaggagtggtgcatactgttggtggatacatgctatatgttgctaccaccttcaagtatgtgttcgactttcacgctgaagatgttttctggtgcactgctgacatcggttggatcaccgggcactcgtacgtgacatatggaccccttgcaaacggggcaacaagcgtgctctttgaaggtatccccacctaccctgacgttaaccgcctgtggagcattgttgataaatataaggttactaaattctatacggccccaacagccatccgcttactcatgaagtttggcgacgagcccgtcactaagcactcgcgggcttcccttcaggtactgggcaccgtgggtgagcctatcaacccagaagcatggctctggtaccacagagttgtaggggctcagaggtgccctattgtcgataccttctggcagaccgagacaggagggcatatgctcacccccctccccggggcaacccctatgaaacctggttccgccacattcccctttttcggcgtggctcccgccatccttaatgagagcggtgaagagttggagggggaggcagagggttacttggtcttcaagcaaccttggcctggcattatgagaacagtatacggtaatcatgagcggttcgagacaacctactttaaaaaatttcccggatattacgtaaccggcgacggatgccagcgggaccaggacggttattactggataaccggaaggatcgatgacatgctcaacgtgagcggacatctgttatcaacagcggaagtcgaaagtgctctcgttgagcatgaagcagtggcagaagccgctgttgtgggacatccccatcctgtcaagggggagtgcctctattgttttgtgacgctatgcgacggacataccttttctccgaagctgaccgaagagttgaagaagcagatccgcgagaaaatcggacccattgccactccggattacatccagaatgcgcccggactcccaaaaactagaagtggaaaaattatgcgacgggtcttgcggaaaatcgctcagaatgatcacgatttgggagacatgagtacagtggcagacccatccgtcatcagccaccttttttcccaccgatgtctgaccatccagtag

SEQ ID NO: 199549 - DNA, 2100 bp, Artificial Sequence
  derived and/or modified sequence
atgggcctgcccgaggagcgagttagatccgggtcaggctctcgcggacaggaggaagctggcgctggaggcagagcgcgttcatggagcccacctcctgaggtgtcacgatctgctcacgttccgtccctgcagcgctaccgcgagcttcaccgaagatcggtggaggaacccagagagttctggggcgacattgcaaaagagttttactggaaaacaccctgcccaggcccatttttaagatataatttcgatgtgacaaaagggaagattttcattgagtggatgaagggtgcgacaaccaacatctgctacaatgtcttggaccgaaacgtacatgaaaagaagttgggggacaaggtggcattctactgggaaggaaatgaacccggcgagaccacccagattacttaccatcagcttctcgtgcaggtatgccaattcagcaatgtgctaaggaagcaaggaatacagaaaggtgacagagtagcgatttacatgccgatgatacctgagttagtggtggctatgctggcctgtgcgaggattggggctctgcattccattgtctttgcgggtttttccagtgagtctttgtgcgagagaatcctggactcgtcatgcagtctgctgattacaacggacgcattttaccgcggagaaaagctggtgaatttgaaagaattagccgacgaggccctgcaaaagtgccaggagaaagggttccccgtgaggtgctgcatcgtagtcaaacatttaggtcgcgccgagctgggaatgggtgatagtactagccagagccccccaataaaacggtcttgtcctgatgtgcagatttcctggaaccagggaattgatctgtggtggcacgagctgatgcaggaggcaggtgatgaatgtgaacctgaatggtgcgacgccgagcatagtagctcatgtactcccgtggccccacaagctaatccccgcgtgtggttcactcagttaggcgcaacttgttacgtggctactactttcaagtatgtgtttgactttcatgctgaggatgtcttttggtgcaccgcagacatcggatggatcactggacactcatacgtcacttacggacctttagcaaatggcgctacatctgtcctgtttgaaggtatcccaacatacccagatgttaacagattatggtctatcgtggacaagtacaaggtaacgaaattctacaccgcgccaactgccatcagactgttaatgaagttcggcgacgagccggttacgaagcactcccgggcaagccttcaggtcctcgggactgtcggggagccaattaacccagaagcttggctctggtaccatcgagttgtgggtgcgcagcggtgcccaattgtggatactttttggcagacagagacggggggacacatgttaactcccctgcctggggcgactcccatgaagccaggaagtgccacattcccattttttggggtggccccagccattctgaatgagagcggagaggaactagaaggggaagccgagggctatctcgtatttaagcagccttggccagggatcatgcggaccgtgtacgggaatcacgaacgttttgagaccacatattttaaaaaatttccaggctactacgtcactggggatggttgtcagagggaccaggacggctactactggatcaccgggcggatagatgacatgttgaacgtgagcgggcacttgctctccaccgctgaagtcgaatctgctttggtagaacacgaggcagtcgccgaagccgctgtggtaggccacccccaccctgtgaagggtgagtgcctgtattgtttcgtgacgttgtgtgatggtcacaccttctcccctaagcttaccgaagagcttaaaaaacagattcgtgagaaaattggcccgattgcaacccccgactatatccagaatgcccccggtttaccgaagacaagaagtggaaagatcatgcggagggtgctccgaaagatagcccagaacgaccacgatctcggagacatgagtactgtggcagatccttctgtaatatctcatttgtttagccaccggtgcctcaccatccagtag

SEQ ID NO: 199550 - DNA, 2106 bp, Artificial Sequence
  derived and/or modified sequence
atgggcctgcctgaggagcgggtgcgcagcggcagcggcagccggggccaggaggaggccggggccggcggccgggcccgctcctggagccccccacctgaggtgagccgcagcgcccacgtgcccagcctgcagcgctaccgggagctgcaccggcgctctgtggaggagccccgggagttctggggagacatcgccaaggagttctactggaagaccccctgccccggccccttcctgcgctacaactttgatgtgaccaagggcaagatcttcatcgagtggatgaagggggccaccaccaacatctgctacaacgtgctggacagaaatgtgcatgagaagaagctgggggacaaggtggccttctactgggagggcaatgagcccggggagaccacccagatcacctaccaccagctgctggtgcaggtgtgccagttcagcaatgtgctgaggaagcagggcatccagaagggggacagagtggccatctacatgcccatgatccctgagctggtggtggccatgctggcctgtgccagaattggagccctgcacagcatcgtgtttgctggcttcagcagcgagagcctgtgtgagcgcatcctggacagcagctgcagcctgctgatcaccacagatgccttctacagaggagagaagctggtgaacctgaaggagctggctgatgaggccctgcagaagtgccaggagaagggcttccctgtgcgctgctgcatcgtggtgaagcacctgggccgggcagagctgggcatgggagacagcaccagccagagcccccccatcaagaggagctgcccagatgtgcagatctcctggaaccagggcatcgacctgtggtggcatgagctgatgcaggaggccggagatgaatgtgagcctgagtggtgtgatgctgaggaccccctcttcatcctgtacaccagcggcagcacaggcaagcccaagggcgtggtgcacacagtgggcggctacatgctgtatgtggccaccaccttcaagtatgtgtttgacttccacgccgaggatgtgttctggtgcacagctgacatcggctggatcaccggccacagctatgtgacctacggccccctggccaatggagccacctctgtgctgtttgagggcatccccacctacccagatgtgaaccggctgtggagcatcgtggacaagtacaaggtgaccaagttctacacagcccccacagccatccggctgctgatgaagtttggagatgagcctgtgaccaagcacagccgggccagcctgcaggtgctgggcaccgtgggggagcccatcaaccctgaggcctggctgtggtaccaccgggtggtgggcgcccagcgctgccccatcgtggacaccttctggcagacagagaccggcggccacatgctgacccccctgcccggggccacccccatgaagccaggcagcgccaccttccccttcttcggcgtggccccagccatcctgaatgaaagtggagaggagctggagggggaggccgagggctacctggtgttcaagcagccctggccaggcatcatgaggacagtgtatggcaaccacgagagatttgagaccacctacttcaagaagtttcctggctactacgtgactggagatggctgccagagggaccaggacggctactactggatcaccggcagaattgatgacatgctgaatgtgtctggccacctgctgagcacagctgaggtggagagcgccctggtggagcatgaagctgtggccgaggccgctgtggtgggccacccccaccctgtgaagggagaatgtctgtactgctttgtgaccctgtgtgatggccacaccttcagccccaagctgacagaggagctgaagaagcagatccgggagaagattggccccatcgccaccccagactacatccagaatgcccctggcctgcccaagaccaggtctgggaagatcatgagaagagtgctgaggaagatcgcccagaatgaccatgacctgggggacatgagcacagtggccgaccccagcgtcatcagccacctgttcagccaccgctgcctgaccatccagtag

SEQ ID NO: 199551 - DNA, 2100 bp, Artificial Sequence
  derived and/or modified sequence
atgggcctgcctgaggagcgggtgcgcagcggcagcggcagccggggccaggaggaggccggggccggcggccgggcccgctcctggagccccccacctgaggtgagccgcagcgcccacgtgcccagcctgcagcgctaccgggagctgcaccggcgctctgtggaggagccccgggagttctggggagacatcgccaaggagttctactggaagaccccctgccccggccccttcctgcgctacaactttgatgtgaccaagggcaagatcttcatcgagtggatgaagggggccaccaccaacatctgctacaacgtgctggacagaaatgtgcatgagaagaagctgggggacaaggtggccttctactgggagggcaatgagcccggggagaccacccagatcacctaccaccagctgctggtgcaggtgtgccagttcagcaatgtgctgaggaagcagggcatccagaagggggacagagtggccatctacatgcccatgatccctgagctggtggtggccatgctggcctgtgccagaattggagccctgcacagcatcgtgtttgctggcttcagcagcgagagcctgtgtgagcgcatcctggacagcagctgcagcctgctgatcaccacagatgccttctacagaggagagaagctggtgaacctgaaggagctggctgatgaggccctgcagaagtgccaggagaagggcttccctgtgcgctgctgcatcgtggtgaagcacctgggccgggcagagctgggcatgggagacagcaccagccagagcccccccatcaagaggagctgcccagatgtgcagatctcctggaaccagggcatcgacctgtggtggcatgagctgatgcaggaggccggagatgaatgtgagcctgagtggtgtgatgctgagcacagcagcagctgcacccctgtggccccccaggccaacccccgggtgtggttcacccagctgggcgccacctgctacgtggccaccaccttcaagtatgtgtttgacttccacgccgaggatgtgttctggtgcacagctgacatcggctggatcaccggccacagctatgtgacctacggccccctggccaatggagccacctctgtgctgtttgagggcatccccacctacccagatgtgaaccggctgtggagcatcgtggacaagtacaaggtgaccaagttctacacagcccccacagccatccggctgctgatgaagtttggagatgagcctgtgaccaagcacagccgggccagcctgcaggtgctgggcaccgtgggggagcccatcaaccctgaggcctggctgtggtaccaccgggtggtgggcgcccagcgctgccccatcgtggacaccttctggcagacagagaccggcggccacatgctgacccccctgcccggggccacccccatgaagccaggcagcgccaccttccccttcttcggcgtggccccagccatcctgaatgaaagtggagaggagctggagggggaggccgagggctacctggtgttcaagcagccctggccaggcatcatgaggacagtgtatggcaaccacgagagatttgagaccacctacttcaagaagtttcctggctactacgtgactggagatggctgccagagggaccaggacggctactactggatcaccggcagaattgatgacatgctgaatgtgtctggccacctgctgagcacagctgaggtggagagcgccctggtggagcatgaagctgtggccgaggccgctgtggtgggccacccccaccctgtgaagggagaatgtctgtactgctttgtgaccctgtgtgatggccacaccttcagccccaagctgacagaggagctgaagaagcagatccgggagaagattggccccatcgccaccccagactacatccagaatgcccctggcctgcccaagaccaggtctgggaagatcatgagaagagtgctgaggaagatcgcccagaatgaccatgacctgggggacatgagcacagtggccgaccccagcgtcatcagccacctgttcagccaccgctgcctgaccatccagtag

SEQ ID NO: 199552 - DNA, 2106 bp, Artificial Sequence
  derived and/or modified sequence
atgggcctgcccgaggagcgggtgcggagcggcagcggcagccggggccaagaagaggcaggcgccggagggagggccaggagctggagtccaccccctgaagtgtcacgctccgcccacgtgccatcgcttcagcggtaccgcgagctccaccggaggtccgtcgaagagcctcgggaattctggggcgatatcgccaaggagttctactggaagaccccctgccctgggcctttcctgcggtataacttcgacgtcactaaaggcaaaatcttcattgagtggatgaagggagccacaactaacatctgttacaatgtgcttgatagaaatgtgcacgagaagaagctgggcgataaagtggctttctactgggaggggaacgaacctggagagactacccaaatcacttatcaccagttactggtacaggtgtgtcagttttccaacgtcctgaggaagcaggggatacagaaaggcgatcgggtggctatttacatgcccatgatccccgagttagttgtggccatgctggcttgtgcccggatcggtgctctgcacagtattgtgttcgccgggttcagtagtgagtctctgtgtgaacggatcctggattcaagctgtagcctgcttattacaacagacgcattttacagaggggagaaattagtgaacttaaaggaactggcagatgaggcccttcagaagtgtcaggaaaaaggatttcccgtcagatgttgcatagtcgttaaacacttagggcgggctgagctgggcatgggagacagtacatctcagtcacctcccattaagagaagctgtccagacgtacagattagttggaaccaggggatcgacctttggtggcatgagctgatgcaggaagccggtgacgagtgcgagccggaatggtgtgatgctgaggaccccctgtttatactgtatacatctggttcaacagggaagccgaaaggggtcgttcacactgtgggtggctatatgctctatgtggcaacaacgtttaagtacgtattcgacttccatgctgaagacgtcttttggtgcaccgctgacattggttggataactgggcatagctacgtcacatatgggcctcttgctaacggcgcaacaagcgtgctcttcgagggcatccccacgtatccagacgttaacaggctctggtctattgtggacaaatataaagtaacaaagttttacaccgcgccaacagctatacggctgctgatgaaatttggcgacgaaccagtcactaaacactccagagcaagcctacaggtcctgggtaccgtcggcgaacctatcaaccccgaagcctggctttggtatcatcgcgtggtgggggcacagagatgtccgattgtggacaccttttggcaaacagagacaggtggccacatgctgacaccattgcctggcgcgacaccgatgaagcctggatcggcaaccttcccattctttggcgttgccccagccatcctaaatgagagcggtgaagagctggaaggcgaggccgaaggctatctcgtctttaaacaaccatggcccgggatcatgagaaccgtttatggcaatcatgagcggttcgagaccacgtattttaagaaattccccggctactacgttacaggagacggatgtcagagagaccaagacggctactattggatcaccggtaggatcgatgacatgctgaacgtttccggtcatttgctctccaccgccgaggtcgagtccgccttggttgagcacgaggccgtcgctgaagcagcagtggtgggccatcctcaccccgtaaagggcgagtgcctgtactgttttgtgacactatgcgacggccataccttcagcccgaaactcactgaagaactcaaaaagcaaatacgggagaagattgggccaattgccacgcccgattatattcagaacgctcctgggctccctaaaaccagatcggggaaaatcatgcgacgggttctgagaaagattgcccagaacgatcacgatctgggcgatatgtccaccgtggctgatcctagcgtgattagccacctgtttagccacagatgtctgaccattcagtag

SEQ ID NO: 199553 - DNA, 2100 bp, Artificial Sequence
  derived and/or modified sequence
atgggcctgcccgaggagcgggtgcggagcggcagcggcagccggggccaggaagaagcaggcgctggcggacgggctcgcagctggtctccaccgccagaagtttccagaagcgcacatgtgcctagcctgcagcgctatagagagcttcataggcgtagtgtcgaggagccacgcgagttttggggagatatcgcgaaagaattttattggaagaccccatgtccaggtccatttctgaggtacaactttgacgttacaaaaggcaaaatattcattgagtggatgaaaggggccactaccaatatatgctataacgtgctagatagaaatgttcacgagaaaaaactgggagacaaggtcgccttctattgggaaggaaatgagccgggtgaaacgacccagatcacataccaccagctgttggtccaggtgtgtcagtttagtaacgtgctgcgcaagcagggcatccagaaaggcgaccgagtggcaatttacatgcccatgatacctgagctggtcgtggccatgctggcttgcgctcgcattggggccttacactctatcgtgttcgccggctttagctcagaaagcctttgcgagagaattcttgattcctcctgctctctccttataactaccgatgcattttatcgcggcgagaagctcgtgaatctcaaggaactggccgatgaggccctgcagaagtgtcaggagaaaggcttccccgtgagatgttgcatagtggtgaagcacttgggacgggcggagttaggaatgggcgactcaacttcacaatcacctccgatcaaaaggtcatgccccgatgtgcaaatcagctggaatcagggcatcgatctatggtggcacgaactcatgcaggaggccggagacgagtgcgagccggaatggtgtgatgccgaacattcaagtagctgcacgcctgtagcgccgcaggctaacccgcgtgtgtggtttacccaactgggtgccacttgttatgtggccaccacctttaaatacgttttcgactttcacgccgaagatgtgttctggtgcacagctgatatcggttggataacgggccactcatacgtcacatacggccctctggctaatggagcaacctccgttctcttcgaaggtatcccgacatacccagacgtcaatcggctgtggagcatcgtggataagtacaaggtaaccaagttttatacagcaccgacagccatacggctcctgatgaagttcggggatgagcctgtaaccaaacattcccgcgctagtttacaagtgctgggaacggtgggagagccgataaaccccgaggcatggctctggtaccatcgggtcgtgggggcacagagatgccccattgtggacactttctggcagaccgagacgggtggtcacatgctcaccccccttcctggcgccacccctatgaagcctgggagcgccactttcccgttttttggtgtcgccccagccattctgaacgagtctggggaagaactagagggggaggccgaaggatatctggtctttaagcagccatggccagggattatgcgcaccgtgtatggcaatcacgagagatttgagactacttattttaagaagttcccgggatactacgtcacgggagacggttgccagagagatcaagatgggtactactggatcaccggccgtattgatgacatgctcaatgtttcagggcaccttctctccactgctgaggtggaatctgctctggtggaacacgaggcggtcgccgaagcggccgtggtaggacacccacatcctgtcaagggtgagtgtttgtattgttttgtgactctgtgcgatggccacaccttctcacccaaactcaccgaggagctgaaaaagcagatacgcgagaagattggccctattgctacccccgattatatccaaaacgctcctggcctgccaaaaactagatcaggcaagatcatgagaagagtgctgcggaagatcgcacaaaacgatcacgatctcggagatatgagtacagtggccgacccatccgtaatctcccacctctttagccacaggtgcctgaccattcagtag

SEQ ID NO: 199554 - DNA, 2106 bp, Artificial Sequence
  derived and/or modified sequence
atgggattacctgaggagcgtgtgaggtccggttctggatcccgcggtcaagaagaagccggagccggaggcagagctaggtcctggtccccaccaccagaagtgtctcggtctgcccatgtgcccagcctccaaagatatagggagttgcaccgccgttctgtggaggagccacgagagttctggggcgacatagcgaaagaattttactggaagaccccttgtcccggtcccttcctgcgatacaatttcgatgtgaccaaaggtaagatattcattgagtggatgaagggggcaactacaaacatctgttataatgtgcttgaccgcaacgtgcacgagaagaaacttggcgacaaggtcgctttctattgggagggaaacgaacccggagagaccacacaaattacctaccaccagctgctcgtacaggtctgtcaatttagcaatgttctgcgcaagcagggcatccagaagggggatcgcgtggccatctatatgccaatgatcccagaactggtagttgcgatgcttgcctgcgccagaataggcgctcttcatagtatcgtgttcgctggcttttcgtctgaatccttgtgcgaacgcatcctcgactcctcttgtagcctattaattactactgacgccttctaccgcggtgagaagctggtcaacttgaaagagttggcagatgaggcgctgcaaaaatgtcaggaaaaggggttccctgtgcgatgctgtatcgttgtgaagcatctggggcgtgccgagttgggaatgggcgactctaccagccagagtccgccaataaagcgctcttgtcccgatgtgcagatttcctggaatcaggggatcgacctgtggtggcatgagctgatgcaagaagccggagacgaatgtgaacccgagtggtgcgacgccgaggaccctcttttcatcctctacaccagcggatccactgggaagcccaaaggagtggtgcataccgtaggaggctatatgctgtacgtggctacaacatttaaatacgtgttcgatttccatgccgaagacgtattctggtgcacagccgacattggatggataactggccacagctatgtcacatacggcccactggccaatggcgctacttctgttctgttcgaggggattcctacttacccagacgtgaatcggctgtggtccattgtggacaaatataaagtaacgaagttctacaccgcccctaccgctattcggctgctgatgaagttcggggatgaacctgtgacaaagcactcacgagcctcgctccaggtgctcggtaccgtgggggaaccgattaacccagaggcgtggctttggtatcatagagtcgtcggtgcacagcgctgtcccattgtagataccttctggcagaccgaaaccgggggacatatgctgactcctttgcccggagccaccccgatgaagcctggcagcgccacattccccttctttggcgtggccccagcaattctaaacgagtcgggcgaggaattggagggcgaagctgaggggtatttagtgttcaagcaaccatggccaggcatcatgaggacagtgtacgggaatcacgaacgctttgagacgacctacttcaaaaagtttccaggttactacgtaaccggagatggatgtcagagggaccaggacggctactactggattacaggtcggatcgacgacatgctcaatgtgtctgggcatctcctctctaccgccgaggtggaaagtgcgctagtagagcacgaggccgtggccgaggctgctgtggtggggcacccacacccggtcaagggcgagtgtttgtattgttttgtcacgctgtgcgacgggcatactttttctcccaagttgaccgaggaacttaagaagcaaatccgggagaaaattggtcctatcgccacgccggactacattcagaacgctcctggactgccaaaaactcggagcggcaagatcatgcgaagggtgctccggaaaatcgcacagaatgatcatgatctcggggatatgtcaactgttgccgacccatctgttatctcccatttattttcccatcggtgtctcacgatccaatag

SEQ ID NO: 199555 - DNA, 2100 bp, Artificial Sequence
  derived and/or modified sequence
atgggacttccagaggaacgcgtgcgctcaggttctgggagcagaggtcaagaggaagctggagctggaggcagggccagaagttggtcaccccctcccgaggtttcgaggtcagctcacgtcccttcacttcagaggtatcgggagctccatagaaggtctgtcgaagaaccacgtgagttttggggagatatcgcaaaggagttttattggaaaacaccgtgtccgggaccattcctgagatacaactttgacgtgacaaaaggcaagattttcattgagtggatgaaaggcgctacaaccaatatatgctacaacgtccttgatcgcaacgtgcatgaaaaaaaactgggggacaaagtagctttttactgggaggggaacgagcccggagagacgacccagatcacctaccaccagttactggtccaggtgtgccagttcagcaacgtgcttaggaagcaaggtatacaaaagggtgatcgcgtggctatatacatgcccatgattcccgagttggtggtggctatgctggcctgcgctcgcattggggcactgcactccatcgttttcgcaggtttttctagcgaaagtctgtgtgagagaattttggatagctcttgctcccttctgattaccacagatgccttctaccgtggagagaaattggtgaacctgaaggaactggctgatgaggccctgcaaaagtgccaggaaaagggcttccccgttcgctgttgtattgtggtaaagcacttagggagagccgaattagggatgggagatagtacatcgcagtccccgccaatcaaaaggagctgtccggacgtccaaatttcctggaatcaagggatcgatctgtggtggcacgagctgatgcaggaagcaggtgatgagtgtgagccggagtggtgcgatgcagagcatagtagctcgtgcactcccgtagctcctcaagccaaccccagagtctggtttacgcagctcggggctacgtgctatgtggcgaccacattcaagtatgtctttgacttccacgccgaagatgtattttggtgtacggctgacattggatggataactgggcacagctatgtcacatacgggccacttgccaacggtgccacgagcgttctttttgaggggattcccacctaccccgatgtgaacaggctttggagcattgtcgacaagtataaggtgacaaagttttataccgcccctaccgcaatcagattactgatgaaatttggagatgaacctgtgaccaaacattcacgggctagcctacaagtgctgggaaccgtgggcgagcccattaacccagaggcttggctctggtaccaccgggttgttggggcacagaggtgtcctatagtggacaccttttggcagactgaaaccggagggcatatgctcacccccctcccaggggctacccctatgaaaccaggcagcgcaacctttccattttttggggtggctccagcaatcctcaatgagagcggtgaagaactggagggcgaagctgagggctatctagttttcaagcaaccctggcccggaattatgcggaccgtatatggaaaccatgagaggttcgagaccacctactttaaaaagtttccaggatattacgtgacaggagacgggtgtcagagagaccaggatgggtattattggattactggcagaatcgacgacatgctgaatgtatccgggcacctgttgagcaccgcggaggtggagtccgccctggtagaacatgaagctgtggcagaggcagctgtcgtgggacatccccaccccgttaaaggggagtgcctgtattgcttcgtgacgctatgtgacgggcatacattcagccctaagttgactgaggaacttaaaaagcagattagggagaagattggacctattgcaacccccgattatatccaaaatgcccctggcctgccaaagacaagaagcggtaaaattatgcggagggtactgagaaaaatcgctcaaaatgaccacgaccttggagacatgagcactgtggccgatccttcggtgatttctcatctcttctctcatcggtgcctgaccatacagtag

SEQ ID NO: 199556 - DNA, 2106 bp, Artificial Sequence
  derived and/or modified sequence
atgggcctgcccgaggagagagtgagaagcggcagcggcagcagaggccaggaggaggccggcgccggcggcagagccagaagctggagccccccccccgaggtgagcagaagcgcccacgtgcccagcctgcagagatacagagagctgcacagaagaagcgtggaggagcccagagagttctggggcgacatcgccaaggagttctactggaagaccccctgccccggccccttcctgagatacaacttcgacgtgaccaagggcaagatcttcatcgagtggatgaagggcgccaccaccaacatctgctacaacgtgctggacagaaacgtgcacgagaagaagctgggcgacaaggtggccttctactgggagggcaacgagcccggcgagaccacccagatcacctaccaccagctgctggtgcaggtgtgccagttcagcaacgtgctgagaaagcagggcatccagaagggcgacagagtggccatctacatgcccatgatccccgagctggtggtggccatgctggcctgcgccagaatcggcgccctgcacagcatcgtgttcgccggcttcagcagcgagagcctgtgcgagagaatcctggacagcagctgcagcctgctgatcaccaccgacgccttctacagaggcgagaagctggtgaacctgaaggagctggccgacgaggccctgcagaagtgccaggagaagggcttccccgtgagatgctgcatcgtggtgaagcacctgggcagagccgagctgggcatgggcgacagcaccagccagagcccccccatcaagagaagctgccccgacgtgcagatcagctggaaccagggcatcgacctgtggtggcacgagctgatgcaggaggccggcgacgagtgcgagcccgagtggtgcgacgccgaggaccccctgttcatcctgtacaccagcggcagcaccggcaagcccaagggcgtggtgcacaccgtgggcggctacatgctgtacgtggccaccaccttcaagtacgtgttcgacttccacgccgaggacgtgttctggtgcaccgccgacatcggctggatcaccggccacagctacgtgacctacggccccctggccaacggcgccaccagcgtgctgttcgagggcatccccacctaccccgacgtgaacagactgtggagcatcgtggacaagtacaaggtgaccaagttctacaccgcccccaccgccatcagactgctgatgaagttcggcgacgagcccgtgaccaagcacagcagagccagcctgcaggtgctgggcaccgtgggcgagcccatcaaccccgaggcctggctgtggtaccacagagtggtgggcgcccagagatgccccatcgtggacaccttctggcagaccgagaccggcggccacatgctgacccccctgcccggcgccacccccatgaagcccggcagcgccaccttccccttcttcggcgtggcccccgccatcctgaacgagagcggcgaggagctggagggcgaggccgagggctacctggtgttcaagcagccctggcccggcatcatgagaaccgtgtacggcaaccacgagagattcgagaccacctacttcaagaagttccccggctactacgtgaccggcgacggctgccagagagaccaggacggctactactggatcaccggcagaatcgacgacatgctgaacgtgagcggccacctgctgagcaccgccgaggtggagagcgccctggtggagcacgaggccgtggccgaggccgccgtggtgggccacccccaccccgtgaagggcgagtgcctgtactgcttcgtgaccctgtgcgacggccacaccttcagccccaagctgaccgaggagctgaagaagcagatcagagagaagatcggccccatcgccacccccgactacatccagaacgcccccggcctgcccaagaccagaagcggcaagatcatgagaagagtgctgagaaagatcgcccagaacgaccacgacctgggcgacatgagcaccgtggccgaccccagcgtgatcagccacctgttcagccacagatgcctgaccatccagtag

SEQ ID NO: 199557 - DNA, 2100 bp, Artificial Sequence
  derived and/or modified sequence
atgggcctgcccgaggagagagtgagaagcggcagcggcagcagaggccaggaggaggccggcgccggcggcagagccagaagctggagccccccccccgaggtgagcagaagcgcccacgtgcccagcctgcagagatacagagagctgcacagaagaagcgtggaggagcccagagagttctggggcgacatcgccaaggagttctactggaagaccccctgccccggccccttcctgagatacaacttcgacgtgaccaagggcaagatcttcatcgagtggatgaagggcgccaccaccaacatctgctacaacgtgctggacagaaacgtgcacgagaagaagctgggcgacaaggtggccttctactgggagggcaacgagcccggcgagaccacccagatcacctaccaccagctgctggtgcaggtgtgccagttcagcaacgtgctgagaaagcagggcatccagaagggcgacagagtggccatctacatgcccatgatccccgagctggtggtggccatgctggcctgcgccagaatcggcgccctgcacagcatcgtgttcgccggcttcagcagcgagagcctgtgcgagagaatcctggacagcagctgcagcctgctgatcaccaccgacgccttctacagaggcgagaagctggtgaacctgaaggagctggccgacgaggccctgcagaagtgccaggagaagggcttccccgtgagatgctgcatcgtggtgaagcacctgggcagagccgagctgggcatgggcgacagcaccagccagagcccccccatcaagagaagctgccccgacgtgcagatcagctggaaccagggcatcgacctgtggtggcacgagctgatgcaggaggccggcgacgagtgcgagcccgagtggtgcgacgccgagcacagcagcagctgcacccccgtggccccccaggccaaccccagagtgtggttcacccagctgggcgccacctgctacgtggccaccaccttcaagtacgtgttcgacttccacgccgaggacgtgttctggtgcaccgccgacatcggctggatcaccggccacagctacgtgacctacggccccctggccaacggcgccaccagcgtgctgttcgagggcatccccacctaccccgacgtgaacagactgtggagcatcgtggacaagtacaaggtgaccaagttctacaccgcccccaccgccatcagactgctgatgaagttcggcgacgagcccgtgaccaagcacagcagagccagcctgcaggtgctgggcaccgtgggcgagcccatcaaccccgaggcctggctgtggtaccacagagtggtgggcgcccagagatgccccatcgtggacaccttctggcagaccgagaccggcggccacatgctgacccccctgcccggcgccacccccatgaagcccggcagcgccaccttccccttcttcggcgtggcccccgccatcctgaacgagagcggcgaggagctggagggcgaggccgagggctacctggtgttcaagcagccctggcccggcatcatgagaaccgtgtacggcaaccacgagagattcgagaccacctacttcaagaagttccccggctactacgtgaccggcgacggctgccagagagaccaggacggctactactggatcaccggcagaatcgacgacatgctgaacgtgagcggccacctgctgagcaccgccgaggtggagagcgccctggtggagcacgaggccgtggccgaggccgccgtggtgggccacccccaccccgtgaagggcgagtgcctgtactgcttcgtgaccctgtgcgacggccacaccttcagccccaagctgaccgaggagctgaagaagcagatcagagagaagatcggccccatcgccacccccgactacatccagaacgcccccggcctgcccaagaccagaagcggcaagatcatgagaagagtgctgagaaagatcgcccagaacgaccacgacctgggcgacatgagcaccgtggccgaccccagcgtgatcagccacctgttcagccacagatgcctgaccatccagtag

SEQ ID NO: 199558 - DNA, 3065 bp, Artificial Sequence
  derived and/or modified sequence
tatagtatttctgtccttgccaacctcgatccctccccaaccagacacggccccgccccctctggcaccgcccacccgccagactaagccactcccccactcaccaggccccgcccctctacggaggccccgcctctagttcggcctgttttctcagtcccggcacccgccgcgaccgcaaaggcggccgcggttctaggaacttgacgtgatggggcttcctgaggagcgggtccggagcggcagcgggagccggggccaggaggaagctggagccggaggccgggcgcggagttggtctccgccgcccgaggtcagccgctccgcgcacgtcccctcgctgcagcgctaccgcgagctgcaccggcgctccgtggaggagccgcgggaattctggggagacattgccaaggaattttactggaagactccatgccctggcccattccttcggtacaactttgatgtgactaaagggaaaatcttcattgagtggatgaaaggagcaactaccaacatctgctacaatgtactggatcgaaatgtccatgagaaaaagcttggagataaagttgctttttactgggagggcaatgagccaggggagaccactcagatcacataccatcagcttctggtccaagtgtgtcagttcagcaatgttctccgaaaacagggcattcagaagggggaccgagtggccatctacatgcctatgatcccagagcttgtggtggccatgctggcatgtgcccgcattggggctttgcactccattgtgtttgcaggcttctcttcagagtctctatgtgaacggatcttggattccagctgcagtcttctcatcactacagatgccttctacaggggggaaaagcttgtgaacctgaaggagctggctgacgaggccctgcagaagtgtcaggagaagggtttcccagtaagatgctgcattgtggtcaagcacctggggcgggcagagctcggcatgggtgactccaccagccagtcccccccaattaagaggtcatgcccagatgtgcagatctcatggaaccaagggattgacttgtggtggcatgagctcatgcaagaggcaggggatgagtgtgagcccgagtggtgtgatgccgaggacccactcttcatcctgtacaccagtggctccacaggcaaacccaagggtgtggttcacacagttgggggctacatgctctatgtagccacaaccttcaagtatgtgtttgacttccatgcagaggatgtgttctggtgcacggcagacattggttggatcactggtcattcctacgtcacctatgggccactggccaatggtgccaccagtgttttgtttgaggggattcccacatatccggacgtgaaccgcctgtggagcattgtggacaaatacaaggtgaccaagttctacacagcacccacagccatccgtctgctcatgaagtttggagatgagcctgtcaccaagcatagccgggcatccttgcaggtgttaggcacagtgggtgaacccatcaaccctgaggcctggctatggtaccaccgggtggtaggtgcccagcgctgccccatcgtggacaccttctggcaaacagagacaggtggccacatgttgactccccttcctggtgccacacccatgaaacccggttctgctactttcccattctttggtgtagctcctgcaatcctgaatgagtccggggaagagttggaaggtgaagctgaaggttatctggtgttcaagcagccctggccagggatcatgcgcacagtctatgggaaccacgaacgctttgagacaacctactttaagaagtttcctggatactatgttacaggagatggctgccagcgggaccaggatggctattactggatcactggcaggattgatgacatgctcaatgtatctggacacctgctgagtacagcagaggtggagtcagcacttgtggaacatgaggctgttgcagaggcagctgtggtgggccaccctcatcctgtgaagggtgaatgcctctactgctttgtcaccttgtgtgatggccacaccttcagccccaagctcaccgaggagctcaagaagcagattagagaaaagattggccccattgccacaccagactacatccagaatgcacctggcttgcctaaaacccgctcagggaaaatcatgaggcgagtgcttcggaagattgctcagaatgaccatgacctcggggacatgtctactgtggctgacccatctgtcatcagtcacctcttcagccaccgctgcctgaccatccagtgaacatgatcctgacctttacctaggattcctcctgctccaaactttgcccatcctctttgccccctcaggagtgctgagggccagtgttgacccacactaccctcccttgaccagctgtctgggaccggaaaccagctttgtctccaggtagagacaacatcctgtgactgccaggcagaaaggacagggcccaggtcagcctcagtctgctgtgcctccagactgcagagctctcagaacccagaacagagacgaaaaggctacctctcctacccaagttaagtgttcaaaggggatgtgagggcctccactgaagcagggaggcagctgtgtaatcctatgtcagctctcttaggaagccccagtacttatattgggcatgcacttgcccttaaaaacaatgatttgtgagtccaggaacaatttactatttttaaaatattttgctgcttctgttctgggtctgaattcccttttgtgccagatgccagtactgtctgcccattggctccaggggctgtatgggcagattcagtctccagagggtattcagatcatctgcttctttgaaggagtaaatgtgttttgttcctagggccagaggagcttgtcttccttgtcctctgttcccaccctcccctgaacagaacccagcccataagagacattctcagatgaaactctgttttcttgccccagtcaggctcaagccctgtggttgtaggaataaagcctgtgatctcaagaa

SEQ ID NO: 199559 - DNA, 2973 bp, Artificial Sequence
  derived and/or modified sequence
actcccccactcaccaggccccgcccctctacggaggccccgcctctagttcggcctgttttctcagtcccggcacccgccgcgaccgcaaaggcggccgcggttctaggaacttgacgtgatggggcttcctgaggagcgggtccggagcggcagcgggagccggggccaggaggaagctggagccggaggccgggcgcggagttggtctccgccgcccgaggtcagccgctccgcgcacgtcccctcgctgcagcgctaccgcgagctgcaccggcgctccgtggaggagccgcgggaattctggggagacattgccaaggaattttactggaagactccatgccctggcccattccttcggtacaactttgatgtgactaaagggaaaatcttcattgagtggatgaaaggagcaactaccaacatctgctacaatgtactggatcgaaatgtccatgagaaaaagcttggagataaagttgctttttactgggagggcaatgagccaggggagaccactcagatcacataccatcagcttctggtccaagtgtgtcagttcagcaatgttctccgaaaacagggcattcagaagggggaccgagtggccatctacatgcctatgatcccagagcttgtggtggccatgctggcatgtgcccgcattggggctttgcactccattgtgtttgcaggcttctcttcagagtctctatgtgaacggatcttggattccagctgcagtcttctcatcactacagatgccttctacaggggggaaaagcttgtgaacctgaaggagctggctgacgaggccctgcagaagtgtcaggagaagggtttcccagtaagatgctgcattgtggtcaagcacctggggcgggcagagctcggcatgggtgactccaccagccagtcccccccaattaagaggtcatgcccagatgtgcagatctcatggaaccaagggattgacttgtggtggcatgagctcatgcaagaggcaggggatgagtgtgagcccgagtggtgtgatgccgagcactcttcatcctgtacaccagtggctccacaggcaaacccaagggtgtggttcacacagttgggggctacatgctatgtagccacaaccttcaagtatgtgtttgacttccatgcagaggatgtgttctggtgcacggcagacattggttggatcactggtcattcctacgtcacctatgggccactggccaatggtgccaccagtgttttgtttgaggggattcccacatatccggacgtgaaccgcctgtggagcattgtggacaaatacaaggtgaccaagttctacacagcacccacagccatccgtctgctcatgaagtttggagatgagcctgtcaccaagcatagccgggcatccttgcaggtgttaggcacagtgggtgaacccatcaaccctgaggcctggctatggtaccaccgggtggtaggtgcccagcgctgccccatcgtggacaccttctggcaaacagagacaggtggccacatgttgactccccttcctggtgccacacccatgaaacccggttctgctactttcccattctttggtgtagctcctgcaatcctgaatgagtccggggaagagttggaaggtgaagctgaaggttatctggtgttcaagcagccctggccagggatcatgcgcacagtctatgggaaccacgaacgctttgagacaacctactttaagaagtttcctggatactatgttacaggagatggctgccagcgggaccaggatggctattactggatcactggcaggattgatgacatgctcaatgtatctggacacctgctgagtacagcagaggtggagtcagcacttgtggaacatgaggctgttgcagaggcagctgtggtgggccaccctcatcctgtgaagggtgaatgcctctactgctttgtcaccttgtgtgatggccacaccttcagccccaagctcaccgaggagctcaagaagcagattagagaaaagattggccccattgccacaccagactacatccagaatgcacctggcttgcctaaaacccgctcagggaaaatcatgaggcgagtgcttcggaagattgctcagaatgaccatgacctcggggacatgtctactgtggctgacccatctgtcatcagtcacctcttcagccaccgctgcctgaccatccagtgaacatgatcctgacctttacctaggattcctcctgctccaaactttgcccatcctctttgccccctcaggagtgctgagggccagtgttgacccacactaccctcccttgaccagctgtctgggaccggaaaccagctttgtctccaggtagagacaacatcctgtgactgccaggcagaaaggacagggcccaggtcagcctcagtctgctgtgcctccagactgcagagctctcagaacccagaacagagacgaaaaggctacctctcctacccaagttaagtgttcaaaggggatgtgagggcctccactgaagcagggaggcagctgtgtaatcctatgtcagctctcttaggaagccccagtacttatattgggcatgcacttgcccttaaaaacaatgatttgtgagtccaggaacaatttactatttttaaaatattttgctgcttctgttctgggtctgaattcccttttgtgccagatgccagtactgtctgcccattggctccaggggctgtatgggcagattcagtctccagagggtattcagatcatctgcttctttgaaggagtaaatgtgttttgttcctagggccagaggagcttgtcttccttgtcctctgttcccaccctcccctgaacagaacccagcccataagagacattctcagatgaaactctgttttcttgccccagtcaggctcaagccctgtggttgtaggaataaagcctgtgatctcaagaagtgg

SEQ ID NO: 199560 - DNA, 2851 bp, Artificial Sequence
  derived and/or modified sequence
gaagggaggctgggctagatggggtcacaaggcctgtgtaggcttcaggaggtgggagctgcccgcttcaggcctcagaatcactcttggagttagatatttaagaatccttcctgccttgacagccagtctgtgaaatgatggtgaggtgggcacttctttgtggtgagtgcagaattctggggagacattgccaaggaattttactggaagactccatgccctggcccattccttcggtacaactttgatgtgactaaagggaaaatcttcattgagtggatgaaaggagcaactaccaacatctgctacaatgtactggatcgaaatgtccatgagaaaaagcttggagataaagttgctttttactgggagggcaatgagccaggggagaccactcagatcacataccatcagcttctggtccaagtgtgtcagttcagcaatgttctccgaaaacagggcattcagaagggggaccgagtggccatctacatgcctatgatcccagagcttgtggtggccatgctggcatgtgcccgcattggggctttgcactccattgtgtttgcaggcttctcttcagagtctctatgtgaacggatcttggattccagctgcagtcttctcatcactacagatgccttctacaggggggaaaagcttgtgaacctgaaggagctggctgacgaggccctgcagaagtgtcaggagaagggtttcccagtaagatgctgcattgtggtcaagcacctggggcgggcagagctcggcatgggtgactccaccagccagtcccccccaattaagaggtcatgcccagatgtgcagatctcatggaaccaagggattgacttgtggtggcatgagctcatgcaagaggcaggggatgagtgtgagcccgagtggtgtgatgccgaggacccactcttcatcctgtacaccagtggctccacaggcaaacccaagggtgtggttcacacagttgggggctacatgctctatgtagccacaaccttcaagtatgtgtttgacttccatgcagaggatgtgttctggtgcacggcagacattggttggatcactggtcattcctacgtcacctatgggccactggccaatggtgccaccagtgttttgtttgaggggattcccacatatccggacgtgaaccgcctgtggagcattgtggacaaatacaaggtgaccaagttctacacagcacccacagccatccgtctgctcatgaagtttggagatgagcctgtcaccaagcatagccgggcatccttgcaggtgttaggcacagtgggtgaacccatcaaccctgaggcctggctatggtaccaccgggtggtaggtgcccagcgctgccccatcgtggacaccttctggcaaacagagacaggtggccacatgttgactccccttcctggtgccacacccatgaaacccggttctgctactttcccattctttggtgtagctcctgcaatcctgaatgagtccggggaagagttggaaggtgaagctgaaggttatctggtgttcaagcagccctggccagggatcatgcgcacagtctatgggaaccacgaacgctttgagacaacctactttaagaagtttcctggatactatgttacaggagatggctgccagcgggaccaggatggctattactggatcactggcaggattgatgacatgctcaatgtatctggacacctgctgagtacagcagaggtggagtcagcacttgtggaacatgaggctgttgcagaggcagctgtggtgggccaccctcatcctgtgaagggtgaatgcctctactgctttgtcaccttgtgtgatggccacaccttcagccccaagctcaccgaggagctcaagaagcagattagagaaaagattggccccattgccacaccagactacatccagaatgcacctggcttgcctaaaacccgctcagggaaaatcatgaggcgagtgcttcggaagattgctcagaatgaccatgacctcggggacatgtctactgtggctgacccatctgtcatcagtcacctcttcagccaccgctgcctgaccatccagtgaacatgatcctgacctttacctaggattcctcctgctccaaactttgcccatcctctttgccccctcaggagtgctgagggccagtgttgacccacactaccctcccttgaccagctgtctgggaccggaaaccagctttgtctccaggtagagacaacatcctgtgactgccaggcagaaaggacagggcccaggtcagcctcagtctgctgtgcctccagactgcagagctctcagaacccagaacagagacgaaaaggctacctctcctacccaagttaagtgttcaaaggggatgtgagggcctccactgaagcagggaggcagctgtgtaatcctatgtcagctctcttaggaagccccagtacttatattgggcatgcacttgcccttaaaaacaatgatttgtgagtccaggaacaatttactatttttaaaatattttgctgcttctgttctgggtctgaattcccttttgtgccagatgccagtactgtctgcccattggctccaggggctgtatgggcagattcagtctccagagggtattcagatcatctgcttctttgaaggagtaaatgtgttttgttcctagggccagaggagcttgtcttccttgtcctctgttcccaccctcccctgaacagaacccagcccataagagacattctcagatgaaactctgttttcttgccccagtcaggctcaagccctgtggttgtaggaataaagcctgtgatctcaagaa

SEQ ID NO: 199561 - protein, 1858 aa, Artificial Sequence
  derived and/or modified sequence
MSIVIPLGVDTAETSYLEMAAGSEPESVEASPVVVEKSNSYPHQLYTSSSHHSHSYIGLPYADHNYGARPPPTPPASPPPSVLISKNEVGIFTTPNFDETSSATTISTSEDGSYGTDVTRCICGFTHDDGYMICCDKCSVWQHIDCMGIDRQHIPDTYLCERCQPRNLDKERAVLLQRRKRENMSDGDTSATESGDEVPVELYTAFQHTPTSITLTASRVSKVNDKRRKKSGEKEQHISKCKKAFREGSRKSSRVKGSAPEIDPSSDGSNFGWETKIKAWMDRYEEANNNQYSEGVQREAQRIALRLGNGNDKKEMNKSDLNTNNLLFKPPVESHIQKNKKILKSAKDLPPDALIIEYRGKFMLREQFEANGYFFKRPYPFVLFYSKFHGLEMCVDARTFGNEARFIRRSCTPNAEVRHEIQDGTIHLYIYSIHSIPKGTEITIAFDFDYGNCKYKVDCACLKENPECPVLKRSSESMENINSGYETRRKKGKKDKDISKEKDTQNQNITLDCEGTTNKMKSPETKQRKLSPLRLSVSNNQEPDFIDDIEEKTPISNEVEMESEEQIAERKRKMTREERKMEAILQAFARLEKREKRREQALERISTAKTEVKTECKDTQIVSDAEVIQEQAKEENASKPTPAKVNRTKQRKSFSRSRTHIGQQRRRHRTVSMCSDIQPSSPDIEVTSQQNDIENTVLTIEPETETALAEIITETEVPALNKCPTKYPKTKKHLVNEWLSEKNEKTGKPSDGLSERPLRITTDPEVLATQLNSLPGLTYSPHVYSTPKHYIRFTSPFLSEKRRRKEPTENISGSCKKRWLKQALEEENSAILHRFNSPCQERSRSPAVNGENKSPLLLNDSCSLPDLTTPLKKRRFYQLLDSVYSETSTPTPSPYATPTHTDITPMDPSFATPPRIKSDDETCRNGYKPIYSPVTPVTPGTPGNTMHFENISSPESSPEIKRRTYSQEGYDRSSTMLTLGPFRNSNLTELGLQEIKTIGYTSPRSRTEVNRQCPGEKEPVSDLQLGLDAVEPTALHKTLETPAHDRAEPNSQLDSTHSGRGTMYSSWVKSPDRTGVNFSVNSNLRDLTPSHQLEVGGGFRISESKCLMQDDTRGMFMETTVFCTSEDGLVSGFGRTVNDNLIDGNCTPQNPPQKKKVSLLEYRKRQREARKSGSKTENFPLISVSPHASGSLSNNGDGCASSNDNGEQVDHTASLPLPTPATVYNATSEETSNNCPVKDATASEKNEPEVQWTASTSVEQVRERSYQRALLLSDHRKDKDSGGESPCVSCSPSHVQSSPSSHSNHIPQLQAKGPVPSFSELMEDPDPENPEPTTTNECPSPDTSQNTCKSPPKMSKPGSPGSVIPAQAHGKIFTKPDPQWDSTVSASEAENGVHLKTELQQKQLSNNNQALSKNHPPQTHVRNSSEQLSQKLPSVPTKLHCPPSPHLENPPKSSTPHTPVQHGYLSPKPPSQQLGSPYRPHHSQSPQVGTPQREPQRNFYPAAQNLPANTQQATSGTLFTQTPSGQSSATYSQFNQQSLNSTAPPPPPPPPPSSSYYQNQQPSANFQNYNQLKGSLSQQTVFTSGPNQALPGTTSQQTVPGHHVTPGHFLPSQNPTIHHQTAAAVVPPPPPPPPAPGPHLVQQPNSHQQHSVAHVVGPVHAVTPGSHIHSQTAGHHLPPPPPPPGPAPHHHPPPHPSTGLQGLQAQHQHVVNSAPPPPPPPPPSSVLASGHHTTSAQALHHPPHQGPPLFPSSAHPTVPPYPSQATHHTTLGPGPQHQPSGTGPHCPLPVTGPHLQPQGPNSIPTPTASGFCPHPGSVALPHGVQGPQQASPVPGQIPIHRAQVPPTFQNNYHGSGWH

SEQ ID NO: 199562 - protein, 589 aa, Artificial Sequence
  derived and/or modified sequence
MHFENISSPESSPEIKRRTYSQEGYDRSSTMLTLGPFRNSNLTELGLQEIKTIGYTSPRSRTEVNRQCPGEKEPVSDLQLGLDAVEPTALHKTLETPAHDRAEPNSQLDSTHSGRGTMYSSWVKSPDRTGVNFSVNSNLRDLTPSHQLEVGGGFRISESKCLMQDDTRGMFMETTVFCTSEDGLVSGFGRTVNDNLIDGNCTPQNPPQKKKVSLLEYRKRQREARKSGSKTENFPLISVSPHASGSLSNNGDGCASSNDNGEQVDHTASLPLPTPATVYNATSEETSNNCPVKDATASEKNEPEVQWTASTSVEQVRERSYQRALLLSDHRKDKDSGGESPCVSCSPSHVQSSPSSHSNHIPQLQAKGPVPSFSELMEDPDPENPEPTTTNECPSPDTSQNTCKSPPKMSKPGSPGSVIPAQAHGKIFTKPDPQWDSTVSASEAENGVHLKTELQQKQLSNNNQALSKNHPPQTHVRNSSEQLSQKLPSVPTKLHCPPSPHLENPPKSSTPHTPVQHGYLSPKPPSQQLGSPYRPHHSQSPQVGTPQREPQRNFYPAAQNLPANTQQATSGTLFTQTPSGQSSATYTQR

SEQ ID NO: 199563 - protein, 1778 aa, Artificial Sequence
  derived and/or modified sequence
MSIVIPLGVDTAETSYLEMAAGSEPESVEASPVVVEKSNSYPHQLYTSSSHHSHSYIGLPYADHNYGARPPPTPPASPPPSVLISKNEVGIFTTPNFDETSSATTISTSEDGSYGTDVTRCICGFTHDDGYMICCDKCSVWQHIDCMGIDRQHIPDTYLCERCQPRNLDKERAVLLQRRKRENMSDGDTSATESGDEVPVELYTAFQHTPTSITLTASRVSKVNDKRRKKSGEKEQHISKCKKAFREGSRKSSRVKGSAPEIDPSSDGSNFGWETKIKAWMDRYEEANNNQYSEGVQREAQRIALRLGNGNDKKEMNKSDLNTNNLLFKPPVESHIQKNKKILKSAKDLPPDALIIEYRGKFMLREQFEANGYFFKRPYPFVLFYSKFHGLEMCVDARTFGNEARFIRRSCTPNAEVRHEIQDGTIHLYIYSIHSIPKGTEITIAFDFDYGNCKYKVDCACLKENPECPVLKRSSESMENINSGYETRRKKGKKTREERKMEAILQAFARLEKREKRREQALERISTAKTEVKTECKDTQIVSDAEVIQEQAKEENASKPTPAKVNRTKQRKSFSRSRTHIGQQRRRHRTVSMCSDIQPSSPDIEVTSQQNDIENTVLTIEPETETALAEIITETEVPALNKCPTKYPKTKKHLVNEWLSEKNEKTGKPSDGLSERPLRITTDPEVLATQLNSLPGLTYSPHVYSTPKHYIRFTSPFLSEKRRRKEPTENISGSCKKRWLKQALEEENSAILHRFNSPCQERSRSPAVNGENKSPLLLNDSCSLPDLTTPLKKRRFYQLLDSVYSETSTPTPSPYATPTHTDITPMDPSFATPPRIKSDDETCRNGYKPIYSPVTPVTPGTPGNTMHFENISSPESSPEIKRRTYSQEGYDRSSTMLTLGPFRNSNLTELGLQEIKTIGYTSPRSRTEVNRQCPGEKEPVSDLQLGLDAVEPTALHKTLETPAHDRAEPNSQLDSTHSGRGTMYSSWVKSPDRTGVNFSVNSNLRDLTPSHQLEVGGGFRISESKCLMQDDTRGMFMETTVFCTSEDGLVSGFGRTVNDNLIDGNCTPQNPPQKKKVSLLEYRKRQREARKSGSKTENFPLISVSPHASGSLSNNGDGCASSNDNGEQVDHTASLPLPTPATVYNATSEETSNNCPVKDATASEKNEPEVQWTASTSVEQVRERSYQRALLLSDHRKDKDSGGESPCVSCSPSHVQSSPSSHSNHIPQLQAKGPVPSFSELMEDPDPENPEPTTTNECPSPDTSQNTCKSPPKMSKPGSPGSVIPAQAHGKIFTKPDPQWDSTVSASEAENGVHLKTELQQKQLSNNNQALSKNHPPQTHVRNSSEQLSQKLPSVPTKLHCPPSPHLENPPKSSTPHTPVQHGYLSPKPPSQQLGSPYRPHHSQSPQVGTPQREPQRNFYPAAQNLPANTQQATSGTLFTQTPSGQSSATYSQFNQQSLNSTAPPPPPPPPPSSSYYQNQQPSANFQNYNQLKGSLSQQTVFTSGPNQALPGTTSQQTVPGHHVTPGHFLPSQNPTIHHQTAAAVVPPPPPPPPAPGPHLVQQPNSHQQHSVAHVVGPVHAVTPGSHIHSQTAGHHLPPPPPPPGPAPHHHPPPHPSTGLQGLQAQHQHVVNSAPPPPPPPPPSSVLASGHHTTSAQALHHPPHQGPPLFPSSAHPTVPPYPSQATHHTTLGPGPQHQPSGTGPHCPLPVTGPHLQPQGPNSIPTPTASGFCPHPGSVALPHGVQGPQQASPVPGQIPIHRAQVPPTFQNNYHGSGWH

SEQ ID NO: 199564 - protein, 1653 aa, Artificial Sequence
  derived and/or modified sequence
MSIVIPLGVDTAETSYLEMAAGSEPESVEASPVVVEKSNSYPHQLYTSSSHHSHSYIGLPYADHNYGARPPPTPPASPPPSVLISKNEVGIFTTPNFDETSSATTISTSEDGSYGTDVTRCICGFTHDDGYMICCDKCSVWQHIDCMGIDRQHIPDTYLCERCQPRNLDKERAVLLQRRKRENMSDGDTSATESGDEVPVELYTAFQHTPTSITLTASRVSKVNDKRRKKSGEKEQHISKCKKAFREGSRKSSRVKGSAPEIDPSSDGSNFGWETKIKAWMDRYEEANNNQYSEGVQREAQRIALRLGNGNDKKEMNKSDLNTNNLLFKPPVESHIQKNKKILKSAKDLPPDALIIEYRGKFMLREQFEANGYFFKRPYPFVLFYSKFHGLEMCVDARTFGNEARFIRRSCTPNAEVRHEIQDGTIHLYIYSIHSIPKGTEITIAFDFDYGNCKYKVDCACLKENPECPVLKRSSESMENINSGYETRRKKGKKDKDISKEKDTQNQNITLDCEGTTNKMKSPETKQRKLSPLRLSVSNNQEPDFIDDIEEKTPISNEVEMESEEQIAERKRKMTREERKMEAILQAFARLEKREKRREQALERISTAKTEVKTECKDTQIVSDAEVIQEQAKEENASKPTPAKVNRTKQRKSFSRSRTHIGQQRRRHRTVSMCSDIQPSSPDIEVTSQQNDIENTVLTIEPETETALAEIITETEVPALNKCPTKYPKTKKHLVNEWLSEKNEKTGKPSDGLSERPLRITTDPEVLATQLNSLPGLTYSPHVYSTPKHYIRFTSPFLSEKRRRKEPTENISGSCKKRWLKQALEEENSAILHRFNSPCQERSRSPAVNGENKSPLLLNDSCSLPDLTTPLKKRRFYQLLDSVYSETSTPTPSPYATPTHTDITPMDPSFATPPRIKSDDETCRNGYKPIYSPVTPVTPGTPGNTMHFENISSPESSPEIKRRTYSQEGYDRSSTMLTLGPFRNSNLTELGLQEIKTIGYTSPRSRTEVNRQCPGEKEPVSDLQLGLDAVEPTALHKTLETPAHDRAEPNSQLDSTHSGRGTMYSSWVKSPDRTGVNFSVNSNLRDLTPSHQLEVGGGFRISESKCLMQDDTRGMFMETTVFCTSEDGLVSGFGRTVNDNLIDGNCTPQNPPQKKKVSLLEYRKRQREARKSGSKTENFPLISVSPHASGSLSNNGDGCASSNDNGEQVDHTASLPLPTPATVYNATSEETSNNCPVKDATASEKNEPEVQWTASTSVEQVRERSYQRALLLSDHRKDKDSGGESPCVSCSPSHVQSSPSSHSNHIPQLQAKGPVPSFSELMEDPDPENPEPTTTNECPSPDTSQNTCKSPPKMSKPGSPGSVIPAQAHGKIFTKPDPQWDSTVSASEAENGVHLKTELQQKQLSNNNQALSKNHPPQTHVRNSSEQLSQKLPSVPTKLHCPPSPHLENPPKSSTPHTPVQHGYLSPKPPSQQLGSPYRPHHSQSPQVGTPQREPQRNFYPAAQNLPVFWLLGIIPHQLKPYTTHLIKDLHFFLRVLIQLYHRIPHKLHIIPLWDRDPSTSLLEQGHIVHYLSQVLISSPKDQTVFQHLLLQGSVLILALWPCHMGFKDLSRHLQCLDRFQFTEHRCHQHFKTITMGQGGIKMDSKNIFLNVL

SEQ ID NO: 199565 - protein, 453 aa, Artificial Sequence [sequence omitted]

SEQ ID NO: 199566 - DNA, 5577 bp, Artificial Sequence
  derived and/or modified sequence
atgagcatagtcatcccgctgggcgtggacacagctgaaacctcatatttagagatggccgcaggaagcgagccagagagtgtggaagctagccctgttgtggttgaaaagagcaacagttatcctcaccagctctacacctcctcttcacatcactcacattcttatatcggccttccatatgcggatcacaactacggagcacggcctccccctactccccccgcgtcccctccaccctccgtcctgatcagtaagaacgaggtgggtatttttactactccaaacttcgacgaaacctcgtccgctaccaccataagcacttcagaggatgggagctatgggactgacgtgacccgatgcatatgtggcttcacacacgacgacggctacatgatctgttgtgacaagtgctctgtatggcagcacatcgactgtatgggcattgatcggcagcacattcccgatacttatctgtgcgaacgctgccagcccagaaacctggataaggagcgcgctgtgctgctccagcgccgcaaacgggaaaacatgtctgacggggacacttctgctactgaaagtggggacgaggttccagttgagctgtacaccgcctttcagcacacaccaaccagtatcacgctcactgctagtagggtatcaaaagtgaatgataagaggaggaagaaatctggtgagaaagaacagcatatatctaagtgcaagaaggctttccgggaggggtctaggaagagctccagggtcaaagggtccgcccccgaaatcgatccaagctcggacggcagcaactttggctgggagacaaaaataaaggcctggatggatcggtatgaggaggccaacaataatcagtattcggaaggggtccagcgcgaggcccagagaatcgccctgcgcctcgggaacggcaatgataaaaaggagatgaataagtctgacctcaatacaaataatcttcttttcaagcctcctgttgagagccatatccagaaaaataagaaaatcctgaaatcggcaaaggacctgcctcccgacgcactgatcattgagtatcgggggaaatttatgctccgcgagcagttcgaagccaacgggtatttctttaaaaggccctatccgttcgtgcttttctatagcaaattccatggattggaaatgtgtgtggacgctcgtaccttcggtaacgaagctcgctttattcggcggtcgtgcactccaaatgcagaggttcgacatgaaatccaggatggaactatccatctctacatttattccatccattccatcccgaagggcacggagatcacaatcgcttttgattttgactatggcaattgtaagtacaaggtggactgcgcctgcctgaaggaaaatcctgaatgccccgtgcttaaaaggagtagcgagtctatggaaaacattaacagcggttatgagacccggagaaagaagggtaaaaaggataaagatatttccaaagagaaagatacgcagaaccagaatattacactcgactgcgagggcacaacaaataaaatgaagtctccagagaccaagcagaggaaactctcgcctctaaggctgagtgtatctaacaaccaggaaccagacttcattgacgacatcgaggagaaaactcctatatccaatgaggtggaaatggaaagcgaggaacagatcgccgaaagaaaaagaaaaatgacccgagaggaacgcaagatggaggctattctccaggcgtttgctaggttagaaaagagggagaagagaagagaacaggccttggagaggatcagtacagccaagacggaagttaagactgaatgcaaggacacgcaaatagtcagcgacgccgaagttatacaggaacaagctaaagaggagaacgcatccaaaccgacgccagcaaaggtgaatcggaccaagcagcgaaagtctttcagccgatccaggacccatatcgggcagcagagaaggcggcataggactgtgtctatgtgcagcgacatccaaccgagctctcctgacattgaggtgacttcccagcagaatgacattgagaacactgtgctgactatcgagcctgagactgagacagctctggccgagatcattaccgaaaccgaagtgcccgccctgaacaaatgccccacaaaatatcccaagaccaaaaaacacttagtaaatgagtggctctccgaaaaaaatgaaaagaccggcaagccgtctgatggcttaagtgagcgccctctgcgaattacaacagacccggaggttcttgcaacacaacttaattccctgcctggcctgacctacagcccccacgtgtacagcacaccaaaacactacatccgattcacgtccccgtttctatcggaaaagcgccgccgaaaggagcccactgaaaacattagcggaagctgcaaaaagcggtggctcaagcaggctttagaagaggagaatagtgcgatcttgcacaggttcaattccccatgccaggagaggagtcggagccctgcagttaatggagaaaataaatcaccgcttctgctcaacgactcatgcagcctacccgatctgacaacaccccttaaaaagaggcggttttatcagctgctggatagcgtttacagcgagacctcaacacccactccatccccctatgcaacaccgacacacacggacattaccccaatggatccaagctttgcaaccccccctagaattaagtcggatgatgaaacttgcaggaacggctataaaccaatctactcacccgtgactccagtcacaccaggaacccccggaaataccatgcacttcgagaatatcagcagccctgagagcagccctgagattaagcgcaggacctattcacaggaagggtacgaccggtcttccactatgttaacactgggaccttttcgcaattcaaatctgaccgaattgggcctgcaggagattaaaactatcggctatacctctcccaggtctagaacagaggtaaaccgacaatgtcccggagaaaaagagcccgtctctgatctgcagctcggactggatgcggtcgaacctacggccctccacaaaactcttgagaccccagcccacgatcgggcagagcccaattcacaactcgattcaacccacagcggcagggggaccatgtatagctcttgggtcaaatcccctgaccgcacaggagtcaattttagcgtcaattcaaacctccgcgacttgacaccaagccatcagctggaggtggggggcggcttcaggatctctgagtctaaatgccttatgcaggatgacactagaggaatgttcatggagactaccgtattttgtaccagtgaggatggactggtcagcggctttggcaggacagttaacgacaatctgattgacggcaattgcacaccacaaaatcccccccaaaagaagaaggtatcactattagagtatagaaaacgacagcgagaggcccgcaagtccggaagtaagaccgagaattttcccctcatatcagtatcacctcacgcttccggatcactgagcaacaacggagacggatgtgcatcctccaatgacaatggagagcaggtagaccacaccgcaagtttgcctctccctacccccgcaaccgtgtataatgctacgagtgaagagaccagtaataattgccccgtgaaggacgccaccgcctcggagaagaatgagcccgaggtgcagtggaccgcctctacgtcggttgagcaagttagggagcgcagctatcagagagcgctgttgctttctgatcaccgcaaggataaggacagtgggggggagtccccctgcgtctcctgttctccatcgcacgttcagtccagtcccagctcgcactctaaccacataccacagctgcaagctaaaggtcctgtccccagcttctcggagctgatggaagaccccgacccagagaacccagagcccaccaccacgaatgagtgccctagtccagacaccagtcagaatacctgtaagtccccccccaagatgagtaaaccaggaagccccggcagcgttattcccgctcaggctcacggaaagatctttaccaagccagacccacagtgggactccacagtctccgcatcggaggctgagaatggggtccatctgaaaactgaattacaacaaaagcagctgagcaacaacaatcaggccttgtcaaagaatcatcctccacagacccacgtcaggaacagctctgaacagttgtcccagaaactgcccagcgtcccaacgaagctgcattgtcctcctagcccacaccttgagaaccccccaaagtcttcgacaccccatactcccgttcaacatgggtatctgagccctaagcccccatcacaacagcttggctccccctacaggccccatcatagccagagcccacaagttggaactcctcagagggagccacagcggaatttctacccagccgctcagaacctgcccgctaatacccagcaggctacaagcgggacactgttcacgcaaactccctcagggcagagttcagccacatactcacaattcaaccaacagagtctaaactccacagcgccccccccgcccccgccaccccctccaagttcttcatactatcagaaccagcagccatccgcgaacttccagaattataaccagctcaagggctcactgtcacagcagaccgtatttaccagcggcccaaatcaggctctcccaggcaccacgagccagcagacggtgcccggtcatcacgttactcccggccacttcttgccctctcaaaacccaaccatccaccaccagaccgcagccgccgttgtgccaccaccccctccccctcccccagccccaggcccacatttagtgcagcagcccaattcccaccagcagcactccgtcgcccacgtggtgggtcctgttcacgccgtgactcccggatcccatatccactcgcagactgcaggccatcacctcccaccacctccgccaccacccggcccagcaccccaccatcaccccccacctcacccttcaactggactgcaaggactccaggcccagcatcagcacgtggtcaattccgcaccccctccaccacccccaccaccaccctcctccgtcctggcttctggacaccatacgacctcagcacaggccttgcatcatcctccccatcaaggaccccctttgttcccttccagcgcccatcctacagtgccaccttatcctagccaggccactcaccacacgacactcgggcccggaccccagcatcaaccctctgggacaggtccgcactgtcctcttcccgtcaccgggcctcatttgcaaccccagggccccaatagtatcccaactcctacagcctccgggttctgccctcatcctggcagcgttgcccttccacacggcgtgcagggcccccagcaagcctcacctgtcccaggccagatcccaatccaccgggcccaggtaccaccaacattccagaacaactaccacgggtcaggctggcattag

SEQ ID NO: 199567 - DNA, 5577 bp, Artificial Sequence
  derived and/or modified sequence
atgtccatcgttattccccttggcgtagataccgccgaaacctcatatctggagatggctgctggctctgaaccagaaagtgtggaagcatcccctgtcgtggtagaaaaaagcaactcttacccacaccagttatacaccagcagtagtcaccactctcacagctatattggcctgccatacgcggaccacaattacggagcccgtccacctcctacaccacccgcttccccaccacccagcgttctgatatccaagaacgaggtgggcatatttactacaccaaattttgatgagacatcctcggccacaacgatctcaacatccgaggacgggtcatacggcaccgatgtcaccagatgcatttgcggcttcacccatgatgatgggtatatgatatgttgtgacaagtgctccgtgtggcagcatatcgattgtatgggtatcgaccgtcagcatatccctgatacgtacttgtgtgagcgctgtcaacccaggaatctggataaagagcgcgccgtccttctccaacgccgtaagcgcgagaatatgtccgacggcgatacgtccgccaccgagtccggagacgaggtgccggtggagctgtataccgcctttcagcacacccctacttccatcactctgactgcatcaagagttagcaaagtgaacgacaaacggagaaaaaaatccggcgaaaaggaacagcacatttccaagtgtaaaaaggccttccgggaggggagtaggaagtcatcgcgagtcaaaggatccgctcccgagattgatccttcctccgacggatctaattttggttgggaaactaagattaaagcatggatggaccggtacgaagaggccaacaataaccagtatagtgagggcgtgcagcgagaagctcagcggatcgccctacgcttagggaatggaaacgacaaaaaagagatgaacaagtcagacctgaatactaataacttgctgtttaagcctcctgtcgagtcacacatccagaaaaacaagaaaatcttaaagtctgcaaaggacctcccacctgacgcgttgattatcgagtacagaggaaagtttatgctgcgagaacagttcgaggcaaacgggtactttttcaaaagaccgtacccgtttgtgcttttttattcaaaattccatggacttgaaatgtgcgtggacgcacgcacattcggcaacgaagcccggtttattcgtcgttcttgtactcctaatgctgaggtgagacacgagattcaagatggcactatacatctgtatatttattctatccactccatacccaaagggaccgagatcactatagcttttgactttgattacggaaattgcaagtataaagtcgattgcgcatgtcttaaggagaaccctgaatgccccgtgctgaaaaggtcatccgagtccatggaaaacataaactcagggtatgagaccagacgtaagaagggcaaaaaagacaaggatatctccaaggagaaagacacacagaaccagaacatcactctggattgtgagggaaccactaacaagatgaagtccccggagaccaaacagcggaagctctcccccctgaggctctcagtgtccaacaaccaggagccagatttcattgacgacatcgaggaaaaaactcctatttccaacgaggtcgagatggagtctgaggagcagatagccgaacggaagagaaagatgacaagggaggagaggaaaatggaggcaatcctacaggcttttgctaggttggagaaacgagagaaacgcagagagcaagcactggaaagaatctccaccgccaagaccgaagtgaaaactgagtgcaaggatacgcagatcgtgagtgacgctgaggtcatccaggagcaggctaaggaggaaaatgcttcgaaacctacgccagctaaggtcaatagaacaaaacaacgcaagtctttcagccggagtagaacccatatcggccagcaaagaagaaggcatcgaacagtgtctatgtgtagcgacatacagccgtcttcaccagacattgaagtgacgtctcagcagaatgacatagagaacactgtgctcacgattgaaccagagacggagaccgcacttgccgagataatcaccgagacagaagtgcccgcgctgaacaaatgtcctacgaaatatcctaagactaaaaagcacctggtcaatgagtggctgagcgagaagaacgaaaaaaccggcaagccatccgacgggctgtccgagcgcccacttcggattacaacagaccctgaagtattggccacccaactgaattcgctcccaggacttacatactcaccacacgtttattcaacccctaagcattatattaggtttacgtcacctttcttgagcgagaaacgcaggcgtaaagaacccactgaaaacattagcggatcctgtaagaagcgatggttgaagcaggccctcgaggaggaaaacagtgcaattctccatagattcaattcaccatgtcaggagcgatctagatctcccgctgtgaacggcgagaacaagagtcctctactgctaaacgattcctgtagccttcctgatttaacaactcctcttaaaaaaagacgcttttatcagctcctggacagtgtgtattcagagaccagtactcctacgccctccccttacgccactccgacacacactgatatcactcctatggaccctagcttcgccacgcctcctaggatcaagtccgacgatgagacctgtcggaacggatataaaccgatttactcccccgtcaccccggtcactcctggaacacccggcaacactatgcacttcgagaacatctcaagtccagaaagcagtcccgaaataaagcgcagaacttatagccaggagggctatgaccgcagctctactatgctgactctcggtccttttaggaactccaatctgactgagctcggtctgcaggagatcaagaccatagggtatacatccccaagaagccgcacagaggtcaacagacagtgtccgggggaaaaggaaccagtgtcagatctgcagctgggactggatgctgtcgagcccaccgccctgcataaaacattggaaactccagcacacgacagggccgagccaaattcccagctggactccacccactctgggcgaggaactatgtacagcagttgggtcaaatctcccgacagaacgggagtcaattttagcgtgaattctaacctaagagatttgacaccaagtcaccagctggaggtgggcggtggcttcaggattagcgagtctaagtgtcttatgcaggatgatactcgcggcatgttcatggagacaactgtgttctgtaccagcgaagacggactagtctccggctttggtagaaccgtcaacgataatctgatcgatggcaattgcacacctcagaacccaccccaaaagaaaaaggtgtcgctgctggagtacagaaaaaggcagcgtgaggcccggaaaagcggatccaagactgaaaacttcccactgatttccgtttctccccacgcttccggatcactgtcaaacaacggtgacggatgtgcatcaagtaatgataatggggagcaagtagaccacacagcaagtctcccattacctacgccggccacagtgtataacgccacatcagaggaaacttctaacaattgcccggtgaaggacgcaacagcctccgagaagaatgaaccagaggtccagtggacagccagcacatctgtcgaacaggtgagggaacgcagctaccagcgagctctgttgctgagcgatcataggaaggataaggacagtggcggggaaagtccctgcgtcagctgttcaccgagccatgtgcagtcttccccttcatcccactcaaatcacatcccccagcttcaggccaagggacctgttccttccttttctgagttgatggaagaccccgatcctgagaaccccgagcccacaactaccaatgagtgcccttcaccagacacctcacagaatacatgcaaatcaccacccaagatgagtaaaccaggtagcccagggtcagtgattcccgctcaggcccatgggaaaatctttaccaaaccagatccacagtgggactctactgtgtcggcgtcagaagccgagaatggggtccacttaaagactgagctgcagcagaagcagctgtcaaacaataatcaagccctgagtaaaaaccacccaccacagacacacgtgcggaattcctcagagcagctgtcacagaagctcccaagcgttcccacaaaattacactgccctccttcgccacatttagaaaatccaccaaaatcttctaccccccatactcctgttcagcacggctacttatctcccaaaccccccagccagcagctggggagcccctatagaccacaccacagccagagtccacaagtgggaacaccccaaagagaaccacagaggaacttctaccccgcagcccagaatctcccggccaacacccagcaggccacctctggtaccctgttcacgcagacgccatctggccagtcatccgcgacttactcacagttcaatcagcaaagcttaaacagcacagccccacccccaccccctcctccaccaccaagttcaagctattaccaaaaccaacagcctagcgcaaactttcagaattacaaccagcttaagggctcattgagccagcagacagtattcacgtccggcccaaaccaggccctcccaggcacaacatcacagcagacagttcctggacatcatgtgactccaggacacttcctgccctcacagaatcctacaatccaccaccagacagcagcagcggtggttccaccgcctccgcctccgcctcccgccccagggccacatttggttcaacagccaaattcccatcaacagcatagtgtggcacatgtcgtgggcccggtgcatgcggttactcccgggtcccatatacactcacagactgctggccaccacctccccccacctccccctccacccggacctgccccccatcaccatcccccaccccacccaagtacaggcttgcaaggactgcaagcccagcaccaacacgtggtcaactcggccccaccccccccgcccccgcctccgccttcgtctgtgctggcaagcggacatcacacaaccagcgcccaggccctgcaccatcctccgcaccagggtccccccctgttcccctccagcgcccatcccaccgtgcccccctatccctcgcaggctactcatcacactacactcgggcccggcccacagcatcagccttcaggtaccggccctcactgccctcttcccgtgacaggaccccacctccagcctcagggtcctaactcaattcccaccccaacagcgagtggtttttgcccccacccaggcagtgtggcgctgccacacggggtgcaggggccacagcaagcaagtcccgtgccgggccagataccaattcaccgggcccaggtgccccctacctttcagaataactaccatggttccggctggcattag

SEQ ID NO: 199568 - DNA, 1770 bp, Artificial Sequence
  derived and/or modified sequence
atgcatttcgaaaacatctctagccctgaaagcagtcccgagattaagaggaggacatacagtcaagaggggtatgatcgaagttctaccatgctgaccctgggcccatttaggaattctaatctgactgagcttggccttcaggagatcaagactattgggtatacctctcccagatctaggaccgaagtgaatcgtcagtgtcctggcgagaaggaacctgtgtctgatcttcaactcggactggatgccgtagagcctacagctctgcacaagacccttgagaccccagcccacgacagggccgagccaaatagtcagttggacagcacccactcaggtcggggaacaatgtatagctcctgggtgaagagcccggatcggaccggagtgaacttcagtgttaatagcaacctacgcgacttaacacccagccatcaattagaggttggcggggggttcagaatctccgagagtaaatgcctgatgcaggacgacacacggggaatgtttatggaaacaacggtgttctgcacatcggaggatggcttagtaagcggcttcgggaggactgtaaacgataatctcatcgatgggaattgcacccctcagaacccaccccaaaagaagaaagtgtctctgctggagtatcgcaagagacaacgcgaggcccgcaaatctggctcaaagacggagaactttccacttatctccgtgtctccccatgcaagtggatctctgtcaaataacggtgatggatgcgcaagttcaaacgacaacggtgagcaggtagatcacacagcgtcgctaccacttccaacccccgccaccgtctacaatgctacaagcgaagaaaccagtaacaactgccccgtcaaagatgccaccgcgtcagagaaaaacgagccagaggtccaatggaccgccagcacctctgtggaacaggtgagggaaaggtcctaccaaagagctctgctgctgagtgaccatcgcaaagataaagatagcggaggagagtccccttgcgtatcctgctcgccctctcacgtgcagtccagcccctcttcacatagcaatcacatccctcagctgcaagcgaaaggacccgtgccatctttctctgagctcatggaggacccggacccagagaacccagagccgacaactacaaacgagtgcccaagcccggataccagtcaaaacacatgtaagagtcctccaaaaatgtccaagcctggaagtcctgggagcgtaataccagcccaggcccacggcaaaattttcacaaagcctgatccccaatgggacagtacagtatccgcgtccgaggccgagaacggtgtacacctgaagactgagctgcagcagaaacagctctccaacaacaaccaagctctgagcaagaatcatccaccacagacccatgtacggaacagtagtgagcagctcagccagaaactcccttccgttcccacgaagcttcactgccctccatcacctcacctggagaatccccccaagtccagcacccctcataccccagtgcagcatggctatttgtcccccaagccccccagtcagcaactgggaagcccttatcggccacatcactcacaaagtccacaggtagggacgcctcagcgagagccacagagaaatttctaccctgcggcccagaacctcccagcaaatacccaacaggccacctctggcacgttgtttactcaaacccctagtgggcagtcgagcgctacatatactcagcgctag
